United States Patent Application Publication US 2010/0120628 A1 - sequence listing, part 5

SEQ ID NO: 7833 - DNA, 854 bp, Homo sapiens
ggacaaaggcagcgcgcgccgcgagctgtcgcgtctggtcgtggtctggcggagctgcggttggcttgtggcgtctccgccgccgccgccctcccttcctcttccccatcttcttctctcggtcccgggagcccccgcccggagaaggcccgaacaagacaggaacgtcctgtgccctggactgtggagctggcattgggaggatcaccaagcggctgctcctgccgctgttcagagaggtggatatggtcgacataacggaggacttcctggttcaagccaagacctacctgggggaggagggcaagagggtgaggaactacttctgttgtgggctccaggacttcaccccggagccggactcttacgacgtgatctggatccagtgggtgataggccacctcaccgatcagcacctggccgagttcctgcggcgctgcaagggcagcctccgccccaacggcatcatcgtcatcaaagacaacatggcccaggagggcgtgattctggacgacgtggacagcagcgtgtgccgggaccttgacgtggtccgcaggatcatctgcagtgcaggcctcagcctcctggccgaggagaggcaggagaacctccccgatgagatctaccatgtctatagctttgccctgagatgagccggggctggcaggagaaactgaggaaccacagtcctggtggggggagctggcagctgggcaagatccaggcgccacgctggcggttcgtgagtgtcgaggcaccactaaatatagctgtctgccgtccactcattatgcgggctcttcttcaaaaggcaaggtgggacccggcggggagggtgctgctgaaccagcggt

SEQ ID NO: 7834 - protein, 135 aa, Homo sapiens; identical to SEQ ID NO: 7832

SEQ ID NO: 7835 - DNA, 1002 bp, Homo sapiens
caaaggcagcgcgcgccgcgagctgtcgcgtctggtcgtggtctggcggagctgcggttggcttgtggcgtctccgccgccgccgccctcccttcctcttccccatcttcttctctcggtcccgggagcccccgcccggagagagtcgcggttgctgatcgtggtgcttgagtagagccgtggttggtgacagcatgacgagcgaggtgatagaagacgagaagcaattctattccaaggccaagacctactggaaacaaatcccacccacggtggacggcatgcttggggggtatggccacatctccagcatcgacatcaacagctcccggaagtttctgcagaggtttttgagggaaggcccgaacaagacaggaacgtcctgtgccctggactgtggagctggcattgggaggatcaccaagcggctgctcctgccgctgttcagagaggtggatatggtcgacataacggaggacttcctggttcaagccaagacctacctgggggaggagggcaagagggtgaggaactacttctgttgtgggctccaggacttcaccccggagccggactcttacgacgtgatctggatccagtgggtgataggccacctcaccgatcagcacctggccgagttcctgcggcgctgcaagggcagcctccgccccaacggcatcatcgtcatcaaagacaacatggcccaggagggcgtgattctggacgacgtggacagcagcgtgtgccgggaccttgacgtggtccgcaggatcatctgcagtgcaggcctcagcctcctggccgaggagaggcaggagaacctccccgatgagatctaccatgtctatagctttgccctgagatgagccggggctggcaggagaaactgaggaaccacagtcctggtggggggagctggcagctgggcaagatccaggcgccacgctggcggttcgtgagtgtcgaggcaccactaaatatagctgtctgccgtccactcat

SEQ ID NO: 7836 - protein, 223 aa, Homo sapiens; identical to SEQ ID NO: 1138

SEQ ID NO: 7837 - DNA, 1643 bp, Homo sapiens
caaaggcagcgcgcgccgcgagctgtcgcgtctggtcgtggtctggcggagctgcggttggcttgtggcgtctccgccgccgccgccctcccttcctcttccccatcttcttctctcggtcccgggagcccccgcccggagagagtcgcggttgctgatcgtggtgcttgagtagagccgtggttggtgacagcatgacgagcgaggtgatagaagacgagaagcaattctattccaaggccaagacctactggaaacaaatcccacccacggtggacggcatgcttggggggtatggccacatctccagcatcgacatcaacagctcccggaagtttctgcagaggtttttgagggaaggcccgaacaagacaggaacgtcctgtgccctggactgtggagctggcattgggaggatcaccaagcggctgctcctgccgctgttcagagaggtggatatggtcgacataacggaggacttcctggttcaagccaagacctacctgggggaggagggcaagagggtgaggaactacttctgttgtgggctccaggacttcaccccggagccggactcttacgacgtgatctggatccagtgggtgataggccacctcaccgatcagcacctggccgagttcctgcggcgctgcaagggcagcctccgccccaacggcatcatcgtcatcaaagacaacatggcccaggagggcgtgattctggacgacgtggacagcagcgtgtgccgggaccttgacgtggtccgcaggatcatctgcagtgcaggcctcagcctcctggccgaggagaggcaggagaacctccccgatgagatctaccatgtctatagctttgccctgagatgagccggggctggcaggagaaactgaggaaccacagtcctggtggggggagctggcagctgggcaagatccaggcgccacgctggcggttcgtgagtgtcgaggcaccactaaatatagctgtctgccgtccactcattatgcgggctcttcttcaaaaggcaaggtgggacccggcggggagggtgctgctgaaccagcggtgaggcaggagcccagaccctgctctcctgcgagatgggattgggtggaaggggctccagggctcctggtgctccccatgtgggaatagggtggccacatcagtaaccgattccctgggcctccagcccggccttccagccatgggcctggctgcctgaagaggaaggaaaccacccccaacttggttgctggggacttgaagacttcagtgtgatctttacctaggggagggacagagctgggctggtggagcccatgggtgctgcctgatggtgctgtggggtgggtgctcatgtgccaagtcctgcttggcagtggagacctggggcccttaaagtgttacaacagcctgcagcaagggaagttccccgtagcctcagtcttctctgggcttgaggctgctccttggcaggcatttaaagtaaaaaataaaatggggctgggcgcggtggctcacgcctgtaatcccagcactttgggaggccgaggcgggcagatcacgaggtcaggagattgagaccatcctggctaacaggtgaaaccccgtctctacttaaaatacaaaaaaaaaaaaaa

SEQ ID NO: 7838 - protein, 223 aa, Homo sapiens; identical to SEQ ID NO: 1138

SEQ ID NO: 7839 - DNA, 852 bp, Homo sapiens
aaaggcagcgcgcgccgcgagctgtcgcgtctggtcgtggtctggcggagctgcggttggcttgtggcgtctccgccgccgccgccctcccttcctcttccccatcttcttctctcggtcccgggagcccccgcccggagagagtcgcggttgctgatcgtggtgcttgagtagagccgtggttggtgacagcatgacgagcgaggtgatagaagacgagaagcaattctattccaaggccaagacctactggaaacaaatcccacccacggtggacggcatgcttggggggaaggcccgaacaagacaggaacgtcctgtgccctggactgtggagctggcattgggaggatcaccaagcggctgctcctgccgctgttcagagaggtggatatggtcgacataacggaggacttcctggttcaagccaagacctacctgggggaggagggcaagagggccacctcaccgatcagcacctggccgagttcctgcggcgctgcaagggcagcctccgccccaacggcatcatcgtcatcaaagacaacatggcccaggagggcgtgattctggacgacgtggacagcagcgtgtgccgggaccttgacgtggtccgcaggatcatctgcagtgcaggcctcagcctcctggccgaggagaggcaggagaacctccccgatgagatctaccatgtctatagctttgccctgagatgagccggggctggcaggagaaactgaggaaccacagtcctggtggggggagctggcagctgggcaagatccaggcgccacgctggcggttcgtgagtgtcgaggcaccactaaatatagctgtctgccgtccactcat

SEQ ID NO: 7840 - protein, 70 aa, Homo sapiens
MTSEVIEDEKQFYSKAKTYWKQIPPTVDGMLGGKARTRQERPVPWTVELALGGSPSGCSCRCSERWIWST

SEQ ID NO: 7841 - DNA, 917 bp, Homo sapiens
aaaggcagcgcgcgccgcgagctgtcgcgtctggtcgtggtctggcggagctgcggttggcttgtggcgtctccgccgccgccgccctcccttcctcttccccatcttcttctctcggtcccgggagcccccgcccggagagagtcgcggttgctgatcgtggtgcttgagtagagccgtggttggtgacagcatgacgagcgaggtgatagaagacgagaagcaattctattccaaggccaagacctactggaaacaaatcccacccacggtggacggcatgcttggggggaaggcccgaacaagacaggaacgtcctgtgccctggactgtggagctggcattgggaggatcaccaagcggctgctcctgccgctgttcagagaggtggatatggtcgacataacggaggacttcctggttcaagccaagacctacctgggggaggagggcaagagggccacctcaccgatcagcacctggccgagttcctgcggcgctgcaagggcagcctccgccccaacggcatcatcgtcatcaaagacaacatggcccaggagggcgtgattctggacgacgtggacagcagcgtgtgccgggaccttgacgtggtccgcaggatcatctgcagtgcaggcctcagcctcctggccgaggagaggcaggagaacctccccgatgagatctaccatgtctatagctttgccctgagatgagccggggctggcaggagaaactgaggaaccacagtcctggtggggggagctggcagctgggcaagatccaggcgccacgctggcggttcgtgagtgtcgaggcaccactaaatatagctgtctgccgtccactcattatgcgggctcttcttcaaaaggcaaggtgggacccggcggggagggtgctgctgaaccagcggt

SEQ ID NO: 7842 - protein, 70 aa, Homo sapiens; identical to SEQ ID NO: 7840

SEQ ID NO: 7843 - DNA, 913 bp, Homo sapiens
ggcagcgcgcgccgcgagctgtcgcgtctggtcgtggtctggcggagctgcggttggcttgtggcgtctccgccgccgccgccctcccttcctcttccccatcttcttctctcggtcccgggagcccccgcccggagagagtcgcggttgctgatcgtggtgcttgagtagagccgtggttggtgacagcatgacgagcgaggtgatagaagacgagaagcaattctattccaaggccaagacctactggaaacaaatcccacccacggtggacggcatgcttggggggtatggccacatctccagcatcgacatcaacagctcccggaagtttctgcagaggtttttgagggaaggcccgaacaagacaggaacgtcctgtgccctggactgtggagctggcattgggaggatcaccaagcggctgctcctgccgctgttcagagaggtggatatggtcgacataacggaggacttcctggttcaagccaagacctacctgggggaggagggcaagagggccacctcaccgatcagcacctggccgagttcctgcggcgctgcaagggcagcctccgccccaacggcatcatcgtcatcaaagacaacatggcccaggagggcgtgattctggacgacgtggacagcagcgtgtgccgggaccttgacgtggtccgcaggatcatctgcagtgcaggcctcagcctcctggccgaggagaggcaggagaacctccccgatgagatctaccatgtctatagctttgccctgagatgagccggggctggcaggagaaactgaggaaccacagtcctggtggggggagctggcagctgggcaagatccaggcgccacgctggcggttcgtgagtgtcgaggcaccactaaatatagctgtctgccgtccactcat

SEQ ID NO: 7844 - protein, 145 aa, Homo sapiens; identical to SEQ ID NO: 7824

SEQ ID NO: 7845 - DNA, 978 bp, Homo sapiens
ggcagcgcgcgccgcgagctgtcgcgtctggtcgtggtctggcggagctgcggttggcttgtggcgtctccgccgccgccgccctcccttcctcttccccatcttcttctctcggtcccgggagcccccgcccggagagagtcgcggttgctgatcgtggtgcttgagtagagccgtggttggtgacagcatgacgagcgaggtgatagaagacgagaagcaattctattccaaggccaagacctactggaaacaaatcccacccacggtggacggcatgcttggggggtatggccacatctccagcatcgacatcaacagctcccggaagtttctgcagaggtttttgagggaaggcccgaacaagacaggaacgtcctgtgccctggactgtggagctggcattgggaggatcaccaagcggctgctcctgccgctgttcagagaggtggatatggtcgacataacggaggacttcctggttcaagccaagacctacctgggggaggagggcaagagggccacctcaccgatcagcacctggccgagttcctgcggcgctgcaagggcagcctccgccccaacggcatcatcgtcatcaaagacaacatggcccaggagggcgtgattctggacgacgtggacagcagcgtgtgccgggaccttgacgtggtccgcaggatcatctgcagtgcaggcctcagcctcctggccgaggagaggcaggagaacctccccgatgagatctaccatgtctatagctttgccctgagatgagccggggctggcaggagaaactgaggaaccacagtcctggtggggggagctggcagctgggcaagatccaggcgccacgctggcggttcgtgagtgtcgaggcaccactaaatatagctgtctgccgtccactcattatgcgggctcttcttcaaaaggcaaggtgggacccggcggggagggtgctgctgaaccagcggt

SEQ ID NO: 7846 - protein, 145 aa, Homo sapiens; identical to SEQ ID NO: 7824

SEQ ID NO: 7847 - DNA, 926 bp, Homo sapiens
gcgccgcgagctgtcgcgtctggtcgtggtctggcggagctgcggttggcttgtggcgtctccgccgccgccgccctcccttcctcttccccatcttcttctctcggtcccgggagcccccgcccggagagagtcgcggttgctgatcgtggtgcttgagtagagccgtggttggtgacagcatgacgagcgaggtgatagaagacgagaagcaattctattccaaggccaagacctactggaaacaaatcccacccacggtggacggcatgcttggggggaaggcccgaacaagacaggaacgtcctgtgccctggactgtggagctggcattgggaggatcaccaagcggctgctcctgccgctgttcagagaggtggatatggtcgacataacggaggacttcctggttcaagccaagacctacctgggggaggagggcaagagggtgaggaactacttctgttgtgggctccaggacttcaccccggagccggactcttacgacgtgatctggatccagtgggtgataggccacctcaccgatcagcacctggccgagttcctgcggcgctgcaagggcagcctccgccccaacggcatcatcgtcatcaaagacaacatggcccaggagggcgtgattctggacgacgtggacagcagcgtgtgccgggaccttgacgtggtccgcaggatcatctgcagtgcaggcctcagcctcctggccgaggagaggcaggagaacctccccgatgagatctaccatgtctatagctttgccctgagatgagccggggctggcaggagaaactgaggaaccacagtcctggtggggggagctggcagctgggcaagatccaggcgccacgctggcggttcgtgagtgtcgaggcaccactaaatatagctgtctgccgtccactcat

SEQ ID NO: 7848 - protein, 135 aa, Homo sapiens; identical to SEQ ID NO: 7832

SEQ ID NO: 7849 - DNA, 991 bp, Homo sapiens
gcgccgcgagctgtcgcgtctggtcgtggtctggcggagctgcggttggcttgtggcgtctccgccgccgccgccctcccttcctcttccccatcttcttctctcggtcccgggagcccccgcccggagagagtcgcggttgctgatcgtggtgcttgagtagagccgtggttggtgacagcatgacgagcgaggtgatagaagacgagaagcaattctattccaaggccaagacctactggaaacaaatcccacccacggtggacggcatgcttggggggaaggcccgaacaagacaggaacgtcctgtgccctggactgtggagctggcattgggaggatcaccaagcggctgctcctgccgctgttcagagaggtggatatggtcgacataacggaggacttcctggttcaagccaagacctacctgggggaggagggcaagagggtgaggaactacttctgttgtgggctccaggacttcaccccggagccggactcttacgacgtgatctggatccagtgggtgataggccacctcaccgatcagcacctggccgagttcctgcggcgctgcaagggcagcctccgccccaacggcatcatcgtcatcaaagacaacatggcccaggagggcgtgattctggacgacgtggacagcagcgtgtgccgggaccttgacgtggtccgcaggatcatctgcagtgcaggcctcagcctcctggccgaggagaggcaggagaacctccccgatgagatctaccatgtctatagctttgccctgagatgagccggggctggcaggagaaactgaggaaccacagtcctggtggggggagctggcagctgggcaagatccaggcgccacgctggcggttcgtgagtgtcgaggcaccactaaatatagctgtctgccgtccactcattatgcgggctcttcttcaaaaggcaaggtgggacccggcggggagggtgctgctgaaccagcggt

SEQ ID NO: 7850 - protein, 135 aa, Homo sapiens; identical to SEQ ID NO: 7832

SEQ ID NO: 7851 - DNA, 863 bp, Homo sapiens
gtctggcggagctgcggttggcttgtggcgtctccgccgccgccgccctcccttcctcttccccatcttcttctctcggtcccgggagcccccgcccggagagagtcgcggttgctgatcgtggtgcttgagtagagccgtggttggtgacagcatgacgagcgaggtgatagaagacgagaagcaattctattccaaggccaagacctactggaaacaaatcccacccacggtggacggcatgcttggggggtatggccacatctccagcatcgacatcaacagctcccggaagtttctgcagaggtttttgagggaaggcccgaacaagacaggaacgtcctgtgccctggactgtggagctggcattgggaggatcaccaagcggctgctcctgccgctgttcagagaggtggacttcaccccggagccggactcttacgacgtgatctggatccagtgggtgataggccacctcaccgatcagcacctggccgagttcctgcggcgctgcaagggcagcctccgccccaacggcatcatcgtcatcaaagacaacatggcccaggagggcgtgattctggacgacgtggacagcagcgtgtgccgggaccttgacgtggtccgcaggatcatctgcagtgcaggcctcagcctcctggccgaggagaggcaggagaacctccccgatgagatctaccatgtctatagctttgccctgagatgagccggggctggcaggagaaactgaggaaccacagtcctggtggggggagctggcagctgggcaagatccaggcgccacgctggcggttcgtgagtgtcgaggcaccactaaatatagctgtctgccgtccactcat

SEQ ID NO: 7852 - protein, 190 aa, Homo sapiens
MTSEVIEDEKQFYSKAKTYWKQIPPTVDGMLGGYGHISSIDINSSRKFLQRFLREGPNKTGTSCALDCGAGIGRITKRLLLPLFREVDFTPEPDSYDVIWIQWVIGHLTDQHLAEFLRRCKGSLRPNGIIVIKDNMAQEGVILDDVDSSVCRDLDVVRRIICSAGLSLLAEERQENLPDEIYHVYSFALR

SEQ ID NO: 7853 - DNA, 928 bp, Homo sapiens
gtctggcggagctgcggttggcttgtggcgtctccgccgccgccgccctcccttcctcttccccatcttcttctctcggtcccgggagcccccgcccggagagagtcgcggttgctgatcgtggtgcttgagtagagccgtggttggtgacagcatgacgagcgaggtgatagaagacgagaagcaattctattccaaggccaagacctactggaaacaaatcccacccacggtggacggcatgcttggggggtatggccacatctccagcatcgacatcaacagctcccggaagtttctgcagaggtttttgagggaaggcccgaacaagacaggaacgtcctgtgccctggactgtggagctggcattgggaggatcaccaagcggctgctcctgccgctgttcagagaggtggacttcaccccggagccggactcttacgacgtgatctggatccagtgggtgataggccacctcaccgatcagcacctggccgagttcctgcggcgctgcaagggcagcctccgccccaacggcatcatcgtcatcaaagacaacatggcccaggagggcgtgattctggacgacgtggacagcagcgtgtgccgggaccttgacgtggtccgcaggatcatctgcagtgcaggcctcagcctcctggccgaggagaggcaggagaacctccccgatgagatctaccatgtctatagctttgccctgagatgagccggggctggcaggagaaactgaggaaccacagtcctggtggggggagctggcagctgggcaagatccaggcgccacgctggcggttcgtgagtgtcgaggcaccactaaatatagctgtctgccgtccactcattatgcgggctcttcttcaaaaggcaaggtgggacccggcggggagggtgctgctgaaccagcggt

SEQ ID NO: 7854 - protein, 190 aa, Homo sapiens; identical to SEQ ID NO: 7852

SEQ ID NO: 7855 - DNA, 960 bp, Homo sapiens
cgcgtccccaagaggtctacgggccggacctgggcagggactacggagcagtccatgggtcggggtacaggaggaaagtcaaggcactcaaagcccaggagagtcgcggttgctgatcgtggtgcttgagtagagccgtggttggtgacagcatgacgagcgaggtgatagaagacgagaagcaattctattccaaggccaagacctactggaaacaaatcccacccacggtggacggcatgcttggggggtatggccacatctccagcatcgacatcaacagctcccggaagtttctgcagaggtttttgagggaaggcccgaacaagacaggaacgtcctgtgccctggactgtggagctggcattgggaggatcaccaagcggctgctcctgccgctgttcagagaggtggatatggtcgacataacggaggacttcctggttcaagccaagacctacctgggggaggagggcaagagggtgaggaactacttctgttgtgggctccaggacttcaccccggagccggactcttacgacgtgatctggatccagtgggtgataggccacctcaccgatcagcacctggccgagttcctgcggcgctgcaagggcagcctccgccccaacggcatcatcgtcatcaaagacaacatggcccaggagggcgtgattctggacgacgtggacagcagcgtgtgccgggaccttgacgtggtccgcaggatcatctgcagtgcaggcctcagcctcctggccgaggagaggcaggagaacctccccgatgagatctaccatgtctatagctttgccctgagatgagccggggctggcaggagaaactgaggaaccacagtcctggtggggggagctggcagctgggcaagatccaggcgccacgctggcggttcgtgagtgtcgaggcaccactaaatatagctgtctgccgtccactcat

SEQ ID NO: 7856 - protein, 223 aa, Homo sapiens; identical to SEQ ID NO: 1138

SEQ ID NO: 7857 - DNA, 1601 bp, Homo sapiens
cgcgtccccaagaggtctacgggccggacctgggcagggactacggagcagtccatgggtcggggtacaggaggaaagtcaaggcactcaaagcccaggagagtcgcggttgctgatcgtggtgcttgagtagagccgtggttggtgacagcatgacgagcgaggtgatagaagacgagaagcaattctattccaaggccaagacctactggaaacaaatcccacccacggtggacggcatgcttggggggtatggccacatctccagcatcgacatcaacagctcccggaagtttctgcagaggtttttgagggaaggcccgaacaagacaggaacgtcctgtgccctggactgtggagctggcattgggaggatcaccaagcggctgctcctgccgctgttcagagaggtggatatggtcgacataacggaggacttcctggttcaagccaagacctacctgggggaggagggcaagagggtgaggaactacttctgttgtgggctccaggacttcaccccggagccggactcttacgacgtgatctggatccagtgggtgataggccacctcaccgatcagcacctggccgagttcctgcggcgctgcaagggcagcctccgccccaacggcatcatcgtcatcaaagacaacatggcccaggagggcgtgattctggacgacgtggacagcagcgtgtgccgggaccttgacgtggtccgcaggatcatctgcagtgcaggcctcagcctcctggccgaggagaggcaggagaacctccccgatgagatctaccatgtctatagctttgccctgagatgagccggggctggcaggagaaactgaggaaccacagtcctggtggggggagctggcagctgggcaagatccaggcgccacgctggcggttcgtgagtgtcgaggcaccactaaatatagctgtctgccgtccactcattatgcgggctcttcttcaaaaggcaaggtgggacccggcggggagggtgctgctgaaccagcggtgaggcaggagcccagaccctgctctcctgcgagatgggattgggtggaaggggctccagggctcctggtgctccccatgtgggaatagggtggccacatcagtaaccgattccctgggcctccagcccggccttccagccatgggcctggctgcctgaagaggaaggaaaccacccccaacttggttgctggggacttgaagacttcagtgtgatctttacctaggggagggacagagctgggctggtggagcccatgggtgctgcctgatggtgctgtggggtgggtgctcatgtgccaagtcctgcttggcagtggagacctggggcccttaaagtgttacaacagcctgcagcaagggaagttccccgtagcctcagtcttctctgggcttgaggctgctccttggcaggcatttaaagtaaaaaataaaatggggctgggcgcggtggctcacgcctgtaatcccagcactttgggaggccgaggcgggcagatcacgaggtcaggagattgagaccatcctggctaacaggtgaaaccccgtctctacttaaaatacaaaaaaaaaaaaaa

SEQ ID NO: 7858 - protein, 223 aa, Homo sapiens; identical to SEQ ID NO: 1138

SEQ ID NO: 7859 - DNA, 3571 bp, Homo sapiens
aggggcagacgtcaaggccaccaccaaagatggggacacagtgttcacctgcatcatcttcctgcttggtgagaccgtgggaggggacaaagaggaggcccagatgatcaaccgcttctgcttccaagtcacacggctgctgctggcacacggggccgaccccagcgagtgcccagcccacgagtccctcacccacatctgcctgaagagctttaaactgcacttccctctcctgcgcttcctcctggagtccggagccgcctacaactgctccctgcacggtgcgtcctgctggtctggctttcacatcatctttgagaggctctgttcccacccaggctgcacggaagacgagagccatgcggacctcctgcgcaaagctgagactgtcctggatctcatggtgaccaactctcagaaactccagctgcccgaaaacttcgatatccaccctgtgggcagcctggcggaaaagatccaggccctccacttctccttgaggcagctggagagctatcccccgcccctcaagcacctgtgccgtgtggccatccggctctaccttcagccgtggcctgtggatgtgaaggtcaaagccctgcctctgcccgacaggctgaagtggtacctccttagcgagcacagtggctccgtggaagatgacatctgataggtctcaggctacaggaacgggggacacgggcagctcaggtcagcctgttggtagatgctgggacagcattagaagagggtctttttgatctgggagatgaagcctggggcacgtcctgtgcggtgccaccaaggccccacccctgccccttttccttccaggttctgttactcacagaagtgtttctggtgggctctgcgggagaagacactaagggccccacaggcttgtttcatggtgttgcaagccaagctggcccctgcctgttcctgtagctctggggccaggtcagccgtggccccacctaccagaactgtgctctgctggcagctgtgcttttgccaaacccagggcctcagcgaccatgacttctgctaaaaagcaatcatgagtgcgtggctggggacagacctctctgaagtgtctcctgttgtgaggggctcactttggagccactgaagagccgactgtgccacccacttgcgagcctcagtcccttccaagctgcactggtcattgggaattgtgtaaacacctctggggataagctgaggtgactaaatgatatatttatattataagattaaactgactttcttggccttaacaaggtccttatataaaatttccaccccgcccctccatagttcaggatagaggctcccacagcagccggtaaggaagtgggtggcaggtgtgaggggatgctgtgtttggggggttgtttccaagtccctgcaaagaagcaccactctagactggcaagggcctccacagtgtggaggtcccattttattatttttttttttcgagacactctgtcacccaggctggagtgcaatggtgcaatctcggctcactgcgacctctgcctcccaggttcaagcagttctcctgcctcagcctcctgagtagctggcattataggtgcccaccaccatgcctggctgatttttgtatttttagtagagacggggtttcgccatgttggtcaggctggtctcaaactcctgacctcaggtgattcgcctgcctcggcctttcaaagtgctgggattacagacatgagccactgtgcccggcccccattttattttagttttattttgagacagagtctcgctctgtcacctaggctggagtgcagtggcgcaatctcacctcactgcaagctctgcctcccgggctcaccccattctcctgcctcagcctcctgagtagctgggactacaggcgcccgccatcacgcctggctaattttttttttttttgtattttaagtagagacggggtttcacctgttagccaggatggtctcaatctcctgacctcgtgatctgcccgcctcggcctcccaaagtgctgggattacaggcgtgagccaccgcgcccagccccattttattttttactttaaatgcctgccaaggagcagcctcaagcccagagaagactgaggctacggggaacttcccttgctgcaggctgttgtaacactttaagggccccaggtctccactgccaagcaggacttggcacatgagcacccaccccacagcaccatcaggcagcacccatgggctccaccagcccagctctgtccctcccctaggtaaagatcacactgaagtcttcaagtccccagcaaccaagttgggggtggtttccttcctcttcaggcagccaggcccatggctggaaggccgggctggaggcccagggaatcggttactgatgtggccaccctattcccacatggggagcaccaggagccctggagccccttccacccaatcccatctcgcaggagagcagggtctgggctcctgcctcaccgctggttcagcagcaccctccccgccgggtcccaccttgccttttgaagaagagcccgcataatgagtggacggcagacagctatatttagtggtgcctcgacactcacgaaccgccagcgtggcgcctggatcttgcccagctgccagctccccccaccaggactgtggttcctcagtttctcctgccagccccggctcatctcagggcaaagctatagacatggtagatctcatcggggaggttctcctgcctctcctcggccaggaggctgaggcctgcactgcagatgatcctgcggaccacgtcaaggtcccggcacacgctgctgtccacgtcgtccagaatcacgccctcctgggccatgttgtctttgatgacgatgatgccgttggggcggaggctgcccttgcagcgccgcaggaactcggccaggtgctgatcggtgaggtggcctggggagggcagaggcaaggttaccagggcaccatgcaagcggatgtcggcactggatgggatgtacttctcagccccgctgagcccctcatttgtgcccagcattttgtgtgcacacatggcctcattggctctcagtcccgagagatttactaaaccccaattcatagaataggaaactgtggctcagaggtcatctacctaaagacacattaagccagaatttgacttgacgggatggcttacaagtcctgcctgatacctacacaccatgatgccccacccctgccaggcttggatcggaggagtgaacctgggctaagagtttggcattgcaggagctcccagagagactgccttccctacactagaagtccccacaaaggcttctgagaccacaaaatacaaggccagacctagagtgtccacagcaggcctgtgctgcccgcctcaggaggtggccgactgctgctagcggcctgccgccacgtcagcagcccagggcacagcgctcgaggtgtgctgttaggctaagagggtgcagggctagacacgaagcttaaactattcatcttattaaaaataaaacccttataaaactcctca

SEQ ID NO: 7860 - protein, 93 aa, Homo sapiens [sequence omitted]

SEQ ID NO: 7861 - DNA, 4549 bp, Homo sapiens
gcctgccctgcctgcagcgcctcctggaccttggagctgatgtcaatgccgctgacaagcatggtgggtgcctcctgcaggaaagcaggacagctgggcccccaggcaccttgtgggggacacccagggtgccccaggacaacagctaggtgggcagactggatgctggccctggctggtggcacagcatggctgggcacacagggattctgctgacttgctgagctcagaggcttcagagaggcagtgcagtcattgtccctgtgctggccctcaagggccttctataggaagaaatagggcatgtgtgcacttagtttccaagaaacaatggcttcccattgggagaggcccagccaacatctcaggtagcatcttggggtccagaaaaatcctacctttcctggcctttccgctcccacttctctgggtggaaagggaatggccagaagcctgtcaccctcagccctcacctgagctgagagttgtctctgaaagttcatcttctgatcctctgagtgtctggatttctgccacctcctctgggttgccctgacctgggcttcctggcctcctgctcctccttgctctccctccctccctaggaaaaactgctctgctccatgctctggccagcagcgacggggtgcagatccacaatactgagaacattcgtctcttactggaaggaggggcagacgtcaaggccaccaccaaagatggggacacagtgttcacctgcatcatcttcctgcttggtgagaccgtgggaggggacaaagaggaggcccagatgatcaaccgcttctgcttccaagtcacacggctgctgctggcacacggggccgaccccagcgagtgcccagcccacgagtccctcacccacatctgcctgaagagctttaaactgcacttccctctcctgcgcttcctcctggagtccggagccgcctacaactgctccctgcacggtgcgtcctgctggtctggctttcacatcatctttgagaggctctgttcccacccaggctgcacggaagacgagagccatgcggacctcctgcgcaaagctgagactgtcctggatctcatggtgaccaactctcagaaactccagctgcccgaaaacttcgatatccaccctgtgggcagcctggcggaaaagatccaggccctccacttctccttgaggcagctggagagctatcccccgcccctcaagcacctgtgccgtgtggccatccggctctaccttcagccgtggcctgtggatgtgaaggtcaaagccctgcctctgcccgacaggctgaagtggtacctccttagcgagcacagtggctccgtggaagatgacatctgataggtctcaggctacaggaacgggggacacgggcagctcaggtcagcctgttggtagatgctgggacagcattagaagagggtctttttgatctgggagatgagacgggatccttcatgagaaaagccagccaggtagagcctgaagctgtgatcactccagtggtgaagggtgcagctctggttcttccagagagactgcccccttccctccagcggcactccaagtcccccccatgttggaaagaggaacagggcttggattgatgtttataccctctgaattggagggcagtgccagggcatttgcagaagctgggaaggaccaagcctcagcaccccagggctgcggggctcttgttggccgcacgtggcagtgcagctggagaggaagcctggggcacgtcctgtgcggtgccaccaaggccccacccctgccccttttccttccaggttctgttactcacagaagtgtttctggtgggctctgcgggagaagacactaagggccccacaggcttgtttcatggtgttgcaagccaagctggcccctgcctgttcctgtagctctggggccaggtcagccgtggccccacctaccagaactgtgctctgctggcagctgtgcttttgccaaacccagggcctcagcgaccatgacttctgctaaaaagcaatcatgagtgcgtggctggggacagacctctctgaagtgtctcctgttgtgaggggctcactttggagccactgaagagccgactgtgccacccacttgcgagcctcagtcccttccaagctgcactggtcattgggaattgtgtaaacacctctggggataagctgaggtgactaaatgatatatttatattataagattaaactgactttcttggccttaacaaggtccttatataaaatttccaccccgcccctccatagttcaggatagaggctcccacagcagccggtaaggaagtgggtggcaggtgtgaggggatgctgtgtttggggggttgtttccaagtccctgcaaagaagcaccactctagactggcaagggcctccacagtgtggaggtcccattttattatttttttttttcgagacactctgtcacccaggctggagtgcaatggtgcaatctcggctcactgcgacctctgcctcccaggttcaagcagttctcctgcctcagcctcctgagtagctggcattataggtgcccaccaccatgcctggctgatttttgtatttttagtagagacggggtttcgccatgttggtcaggctggtctcaaactcctgacctcaggtgattcgcctgcctcggcctttcaaagtgctgggattacagacatgagccactgtgcccggcccccattttattttagttttattttgagacagagtctcgctctgtcacctaggctggagtgcagtggcgcaatctcacctcactgcaagctctgcctcccgggctcaccccattctcctgcctcagcctcctgagtagctgggactacaggcgcccgccatcacgcctggctaattttttttttttttgtattttaagtagagacggggtttcacctgttagccaggatggtctcaatctcctgacctcgtgatctgcccgcctcggcctcccaaagtgctgggattacaggcgtgagccaccgcgcccagccccattttattttttactttaaatgcctgccaaggagcagcctcaagcccagagaagactgaggctacggggaacttcccttgctgcaggctgttgtaacactttaagggccccaggtctccactgccaagcaggacttggcacatgagcacccaccccacagcaccatcaggcagcacccatgggctccaccagcccagctctgtccctcccctaggtaaagatcacactgaagtcttcaagtccccagcaaccaagttgggggtggtttccttcctcttcaggcagccaggcccatggctggaaggccgggctggaggcccagggaatcggttactgatgtggccaccctattcccacatggggagcaccaggagccctggagccccttccacccaatcccatctcgcaggagagcagggtctgggctcctgcctcaccgctggttcagcagcaccctccccgccgggtcccaccttgccttttgaagaagagcccgcataatgagtggacggcagacagctatatttagtggtgcctcgacactcacgaaccgccagcgtggcgcctggatcttgcccagctgccagctccccccaccaggactgtggttcctcagtttctcctgccagccccggctcatctcagggcaaagctatagacatggtagatctcatcggggaggttctcctgcctctcctcggccaggaggctgaggcctgcactgcagatgatcctgcggaccacgtcaaggtcccggcacacgctgctgtccacgtcgtccagaatcacgccctcctgggccatgttgtctttgatgacgatgatgccgttggggcggaggctgcccttgcagcgccgcaggaactcggccaggtgctgatcggtgaggtggcctggggagggcagaggcaaggttaccagggcaccatgcaagcggatgtcggcactggatgggatgtacttctcagccccgctgagcccctcatttgtgcccagcattttgtgtgcacacatggcctcattggctctcagtcccgagagatttactaaaccccaattcatagaataggaaactgtggctcagaggtcatctacctaaagacacattaagccagaatttgacttgacgggatggcttacaagtcctgcctgatacctacacaccatgatgccccacccctgccaggcttggatcggaggagtgaacctgggctaagagtttggcattgcaggagctcccagagagactgccttccctacactagaagtccccacaaaggcttctgagaccacaaaatacaaggccagacctagagtgtccacagcaggcctgtgctgcccgcctcaggaggtggccgactgctgctagcggcctgccgccacgtcagcagcccagggcacagcgctcgaggtgtgctgttaggctaagagggtgcagggctagacacgaagcttaaactattcatcttattaaaaataaaacccttataaaactcctca

SEQ ID NO: 7862 - protein, 57 aa, Homo sapiens
MLWPAATGCRSTILRTFVSYWKEGQTSRPPPKMGTQCSPASSSCLVRPWEGTKRRPR

SEQ ID NO: 7863 - DNA, 5146 bp, Homo sapiens
tttgtagcagagtttgcgtttttatagacaagagctggtctgtcgtggacctgcaggaaaggggtcgggagcgaatctgcattcactgcccatggtactaggcacctggggtccatcagtggctcagcaaaacccccgccttcttggcgcatgtgctccagaggagagactgacaagtaattgtacggcggcacgcgaggtggaagggaggggagagcagaaggaaggggctcggctcaggtgttgagggggttgtcagttggtatttccaacacgtggtaatgatgagtctcgccatccagggactctggtggaaacgtaggctttcttcatcaatatcagctgaaggtctcaatgtgaggggagggaggaggctgtgttgctgtcctggctgcaggtgttgccggggctggggtcctgcgggtttgaggatggaagggctttctgaggaagaagcatcaaagtcgggcttgggctcttggcctccaggctggtggtcccttcagtcccagcagcccaggtgtgtgaggctttgtacctaagtctgcgaccggactctgggcaacgcgggaggagagcgcagacagacccagcccattctccgcaaatcccagtctgctcccgtattaagagatgcagcgtggccctctctctacttcagagcttcccccaagcccctgtgacccacagagccagggccctgcttgctgatgatgatagcaggactaaagcccaccaacccacaggctgcgcggtcacccggtcccacagctgtgcctaccctcagcctctctcctgtcccaggcccagttatgtcgccagcgaggagagccgaatccttgttctcactgagctgctggagaggaaagcccactctcccttttaccaggaaggcgtgagcaacgccctgctcaagatggctgagctggggctgacgcgggcggccgacgttctcttgcggcatggggccaatctcaactttgaagacccagtcacctactacacggccttgcacatcgccgtcctgcggaaccagccggacatggtggagctgctggtgcatcacggggccgacgttaatcggagggaccggatccacgagagtagccccttggacctggccagcgaggagcctgagcgcctgccctgcctgcagcgcctcctggaccttggagctgatgtcaatgccgctgacaagcatggaaaaactgctctgctccatgctctggccagcagcgacggggtgcagatccacaatactgagaacattcgtctcttactggaaggaggggcagacgtcaaggccaccaccaaagatggggacacagtgttcacctgcatcatcttcctgcttggtgagaccgtgggaggggacaaagaggaggcccagatgatcaaccgcttctgcttccaagtcacacggctgctgctggcacacggggccgaccccagcgagtgcccagcccacgagtccctcacccacatctgcctgaagagctttaaactgcacttccctctcctgcgcttcctcctggagtccggagccgcctacaactgctccctgcacggtgcgtcctgctggtctggctttcacatcatctttgagaggctctgttcccacccaggctgcacggaagacgagagccatgcggacctcctgcgcaaagctgagactgtcctggatctcatggtgaccaactctcagaaactccagctgcccgaaaacttcgatatccaccctgtgggcagcctggcggaaaagatccaggccctccacttctccttgaggcagctggagagctatcccccgcccctcaagcacctgtgccgtgtggccatccggctctaccttcagccgtggcctgtggatgtgaaggtcaaagccctgcctctgcccgacaggctgaagtggtacctccttagcgagcacagtggctccgtggaagatgacatctgataggtctcaggctacaggaacgggggacacgggcagctcaggtcagcctgttggtagatgctgggacagcattagaagagggtctttttgatctgggagatgagacgggatccttcatgagaaaagccagccaggtagagcctgaagctgtgatcactccagtggtgaagggtgcagctctggttcttccagagagactgcccccttccctccagcggcactccaagtcccccccatgttggaaagaggaacagggcttggattgatgtttataccctctgaattggagggcagtgccagggcatttgcagaagctgggaaggaccaagcctcagcaccccagggctgcggggctcttgttggccgcacgtggcagtgcagctggagaggaagcctggggcacgtcctgtgcggtgccaccaaggccccacccctgccccttttccttccaggttctgttactcacagaagtgtttctggtgggctctgcgggagaagacactaagggccccacaggcttgtttcatggtgttgcaagccaagctggcccctgcctgttcctgtagctctggggccaggtcagccgtggccccacctaccagaactgtgctctgctggcagctgtgcttttgccaaacccagggcctcagcgaccatgacttctgctaaaaagcaatcatgagtgcgtggctggggacagacctctctgaagtgtctcctgttgtgaggggctcactttggagccactgaagagccgactgtgccacccacttgcgagcctcagtcccttccaagctgcactggtcattgggaattgtgtaaacacctctggggataagctgaggtgactaaatgatatatttatattataagattaaactgactttcttggccttaacaaggtccttatataaaatttccaccccgcccctccatagttcaggatagaggctcccacagcagccggtaaggaagtgggtggcaggtgtgaggggatgctgtgtttggggggttgtttccaagtccctgcaaagaagcaccactctagactggcaagggcctccacagtgtggaggtcccattttattatttttttttttcgagacactctgtcacccaggctggagtgcaatggtgcaatctcggctcactgcgacctctgcctcccaggttcaagcagttctcctgcctcagcctcctgagtagctggcattataggtgcccaccaccatgcctggctgatttttgtatttttagtagagacggggtttcgccatgttggtcaggctggtctcaaactcctgacctcaggtgattcgcctgcctcggcctttcaaagtgctgggattacagacatgagccactgtgcccggcccccattttattttagttttattttgagacagagtctcgctctgtcacctaggctggagtgcagtggcgcaatctcacctcactgcaagctctgcctcccgggctcaccccattctcctgcctcagcctcctgagtagctgggactacaggcgcccgccatcacgcctggctaattttttttttttttgtattttaagtagagacggggtttcacctgttagccaggatggtctcaatctcctgacctcgtgatctgcccgcctcggcctcccaaagtgctgggattacaggcgtgagccaccgcgcccagccccattttattttttactttaaatgcctgccaaggagcagcctcaagcccagagaagactgaggctacggggaacttcccttgctgcaggctgttgtaacactttaagggccccaggtctccactgccaagcaggacttggcacatgagcacccaccccacagcaccatcaggcagcacccatgggctccaccagcccagctctgtccctcccctaggtaaagatcacactgaagtcttcaagtccccagcaaccaagttgggggtggtttccttcctcttcaggcagccaggcccatggctggaaggccgggctggaggcccagggaatcggttactgatgtggccaccctattcccacatggggagcaccaggagccctggagccccttccacccaatcccatctcgcaggagagcagggtctgggctcctgcctcaccgctggttcagcagcaccctccccgccgggtcccaccttgccttttgaagaagagcccgcataatgagtggacggcagacagctatatttagtggtgcctcgacactcacgaaccgccagcgtggcgcctggatcttgcccagctgccagctccccccaccaggactgtggttcctcagtttctcctgccagccccggctcatctcagggcaaagctatagacatggtagatctcatcggggaggttctcctgcctctcctcggccaggaggctgaggcctgcactgcagatgatcctgcggaccacgtcaaggtcccggcacacgctgctgtccacgtcgtccagaatcacgccctcctgggccatgttgtctttgatgacgatgatgccgttggggcggaggctgcccttgcagcgccgcaggaactcggccaggtgctgatcggtgaggtggcctggggagggcagaggcaaggttaccagggcaccatgcaagcggatgtcggcactggatgggatgtacttctcagccccgctgagcccctcatttgtgcccagcattttgtgtgcacacatggcctcattggctctcagtcccgagagatttactaaaccccaattcatagaataggaaactgtggctcagaggtcatctacctaaagacacattaagccagaatttgacttgacgggatggcttacaagtcctgcctgatacctacacaccatgatgccccacccctgccaggcttggatcggaggagtgaacctgggctaagagtttggcattgcaggagctcccagagagactgccttccctacactagaagtccccacaaaggcttctgagaccacaaaatacaaggccagacctagagtgtccacagcaggcctgtgctgcccgcctcaggaggtggccgactgctgctagcggcctgccgccacgtcagcagcccagggcacagcgctcgaggtgtgctgttaggctaagagggtgcagggctagacacgaagcttaaactattcatcttattaaaaataaaacccttataaaactcctca

SEQ ID NO: 7864 - protein, 346 aa, Homo sapiens
MAELGLTRAADVLLRHGANLNFEDPVTYYTALHIAVLRNQPDMVELLVHHGADVNRRDRIHESSPLDLASEEPERLPCLQRLLDLGADVNAADKHGKTALLHALASSDGVQIHNTENIRLLLEGGADVKATTKDGDTVFTCIIFLLGETVGGDKEEAQMINRFCFQVTRLLLAHGADPSECPAHESLTHICLKSFKLHFPLLRFLLESGAAYNCSLHGASCWSGFHIIFERLCSHPGCTEDESHADLLRKAETVLDLMVTNSQKLQLPENFDIHPVGSLAEKIQALHFSLRQLESYPPPLKHLCRVAIRLYLQPWPVDVKVKALPLPDRLKWYLLSEHSGSVEDDI

SEQ ID NO: 7865 - DNA, 4920 bp, Homo sapiens
cggcagggccgagagcacgaccggcggaactcggacggcgcccagcggtcgcgggcgggatcgcagggcgaagccgagccgggccgggccctggcaggaaggggcggacccgcctgagtctcggatctggcttggctcgatcctccactctcccactccgctggggccgcccactggacatcgcccgagtcggcctggcggtcgtgccccaggacgcgccgaggtcctccgagcccgcagggggcgctgtcgccatatggcccaccctgagtcggcgcgggcaggaagtacgagggtcacttccggcgggggcgcggcttggactgaggagcggacccggccgggcgcaggggctggactggcggagcaggtggggtccgcggccgccggagcgttccggtcggcgtctgggcatctcggcctcggcagaaagcgcgacggccctgctgcgcggggcccgcggcgatgccgttcctgcacggcttccggaggatcatcttcgagtaccagccgctggtggatgcgattctgggctccctggggatccaggaccccgagcggcaggagtctctggaccggcccagttatgtcgccagcgaggagagccgaatccttgttctcactgagctgctggagaggaaagcccactctcccttttaccaggaaggcgtgagcaacgccctgctcaagatggctgagctggggctgacgcgggcggccgacgttctcttgcggcatggggccaatctcaactttgaagacccagtcacctactacacggccttgcacatcgccgtcctgcggaaccagccggacatggtggagctgctggtgcatcacggggccgacgttaatcggagggaccggatccacgagagtagccccttggacctggccagcgaggagcctgagcgcctgccctgcctgcagcgcctcctggaccttggagctgatgtcaatgccgctgacaagcatggaaaaactgctctgctccatgctctggccagcagcgacggggtgcagatccacaatactgagaacattcgtctcttactggaaggaggggcagacgtcaaggccaccaccaaagatggggacacagtgttcacctgcatcatcttcctgcttggtgagaccgtgggaggggacaaagaggaggcccagatgatcaaccgcttctgcttccaagtcacacggctgctgctggcacacggggccgaccccagcgagtgcccagcccacgagtccctcacccacatctgcctgaagagctttaaactgcacttccctctcctgcgcttcctcctggagtccggagccgcctacaactgctccctgcacggtgcgtcctgctggtctggctttcacatcatctttgagaggctctgttcccacccaggctgcacggaagacgagagccatgcggacctcctgcgcaaagctgagactgtcctggatctcatggtgaccaactctcagaaactccagctgcccgaaaacttcgatatccaccctgtgggcagcctggcggaaaagatccaggccctccacttctccttgaggcagctggagagctatcccccgcccctcaagcacctgtgccgtgtggccatccggctctaccttcagccgtggcctgtggatgtgaaggtcaaagccctgcctctgcccgacaggctgaagtggtacctccttagcgagcacagtggctccgtggaagatgacatctgataggtctcaggctacaggaacgggggacacgggcagctcaggtcagcctgttggtagatgctgggacagcattagaagagggtctttttgatctgggagatgagacgggatccttcatgagaaaagccagccaggtagagcctgaagctgtgatcactccagtggtgaagggtgcagctctggttcttccagagagactgcccccttccctccagcggcactccaagtcccccccatgttggaaagaggaacagggcttggattgatgtttataccctctgaattggagggcagtgccagggcatttgcagaagctgggaaggaccaagcctcagcaccccagggctgcggggctcttgttggccgcacgtggcagtgcagctggagaggaagcctggggcacgtcctgtgcggtgccaccaaggccccacccctgccccttttccttccaggttctgttactcacagaagtgtttctggtgggctctgcgggagaagacactaagggccccacaggcttgtttcatggtgttgcaagccaagctggcccctgcctgttcctgtagctctggggccaggtcagccgtggccccacctaccagaactgtgctctgctggcagctgtgcttttgccaaacccagggcctcagcgaccatgacttctgctaaaaagcaatcatgagtgcgtggctggggacagacctctctgaagtgtctcctgttgtgaggggctcactttggagccactgaagagccgactgtgccacccacttgcgagcctcagtcccttccaagctgcactggtcattgggaattgtgtaaacacctctggggataagctgaggtgactaaatgatatatttatattataagattaaactgactttcttggccttaacaaggtccttatataaaatttccaccccgcccctccatagttcaggatagaggctcccacagcagccggtaaggaagtgggtggcaggtgtgaggggatgctgtgtttggggggttgtttccaagtccctgcaaagaagcaccactctagactggcaagggcctccacagtgtggaggtcccattttattatttttttttttcgagacactctgtcacccaggctggagtgcaatggtgcaatctcggctcactgcgacctctgcctcccaggttcaagcagttctcctgcctcagcctcctgagtagctggcattataggtgcccaccaccatgcctggctgatttttgtatttttagtagagacggggtttcgccatgttggtcaggctggtctcaaactcctgacctcaggtgattcgcctgcctcggcctttcaaagtgctgggattacagacatgagccactgtgcccggcccccattttattttagttttattttgagacagagtctcgctctgtcacctaggctggagtgcagtggcgcaatctcacctcactgcaagctctgcctcccgggctcaccccattctcctgcctcagcctcctgagtagctgggactacaggcgcccgccatcacgcctggctaattttttttttttttgtattttaagtagagacggggtttcacctgttagccaggatggtctcaatctcctgacctcgtgatctgcccgcctcggcctcccaaagtgctgggattacaggcgtgagccaccgcgcccagccccattttattttttactttaaatgcctgccaaggagcagcctcaagcccagagaagactgaggctacggggaacttcccttgctgcaggctgttgtaacactttaagggccccaggtctccactgccaagcaggacttggcacatgagcacccaccccacagcaccatcaggcagcacccatgggctccaccagcccagctctgtccctcccctaggtaaagatcacactgaagtcttcaagtccccagcaaccaagttgggggtggtttccttcctcttcaggcagccaggcccatggctggaaggccgggctggaggcccagggaatcggttactgatgtggccaccctattcccacatggggagcaccaggagccctggagccccttccacccaatcccatctcgcaggagagcagggtctgggctcctgcctcaccgctggttcagcagcaccctccccgccgggtcccaccttgccttttgaagaagagcccgcataatgagtggacggcagacagctatatttagtggtgcctcgacactcacgaaccgccagcgtggcgcctggatcttgcccagctgccagctccccccaccaggactgtggttcctcagtttctcctgccagccccggctcatctcagggcaaagctatagacatggtagatctcatcggggaggttctcctgcctctcctcggccaggaggctgaggcctgcactgcagatgatcctgcggaccacgtcaaggtcccggcacacgctgctgtccacgtcgtccagaatcacgccctcctgggccatgttgtctttgatgacgatgatgccgttggggcggaggctgcccttgcagcgccgcaggaactcggccaggtgctgatcggtgaggtggcctggggagggcagaggcaaggttaccagggcaccatgcaagcggatgtcggcactggatgggatgtacttctcagccccgctgagcccctcatttgtgcccagcattttgtgtgcacacatggcctcattggctctcagtcccgagagatttactaaaccccaattcatagaataggaaactgtggctcagaggtcatctacctaaagacacattaagccagaatttgacttgacgggatggcttacaagtcctgcctgatacctacacaccatgatgccccacccctgccaggcttggatcggaggagtgaacctgggctaagagtttggcattgcaggagctcccagagagactgccttccctacactagaagtccccacaaaggcttctgagaccacaaaatacaaggccagacctagagtgtccacagcaggcctgtgctgcccgcctcaggaggtggccgactgctgctagcggcctgccgccacgtcagcagcccagggcacagcgctcgaggtgtgctgttaggctaagagggtgcagggctagacacgaagcttaaactattcatcttattaaaaataaaacccttataaaactcctca

SEQ ID NO: 7866 - protein, 421 aa, Homo sapiens; identical to SEQ ID NO: 1140

SEQ ID NO: 7867 - DNA, 4811 bp, Homo sapiens
cggcagggccgagagcacgaccggcggaactcggacggcgcccagcggtcgcgggcgggatcgcagggcgaagccgagccgggccgggccctggcaggaaggggcggacccgcctgagtctcggatctggcttggctcgatcctccactctcccactccgctggggccgcccactggacatcgcccgagtcggcctggcggtcgtgccccaggacgcgccgaggtcctccgagcccgcagggggcgctgtcgccatatggcccaccctgagtcggcgcgggcaggaagtacgagggtcacttccggcgggggcgcggcttggactgaggagcggacccggccgggcgcaggggctggactggcggagcaggtggggtccgcggccgccggagcgttccggtcggcgtctgggcatctcggcctcggcagaaagcgcgacggccctgctgcgcggggcccgcggcgatgccgttcctgcacggcttccggaggatcatcttcgagtaccagccgctggtggatgcgattctgggctccctggggatccaggaccccgagcggcaggagtctctggaccggcccagttatgtcgccagcgaggagagccgaatccttgttctcactgagctgctggagaggaaagcccactctcccttttaccaggaaggcgtgagcaacgccctgctcaagatggctgagctggggctgacgcgggcggccgacgttctcttgcggcatggggccaatctcaactttgaagacccagtcacctactacacggccttgcacatcgccgtcctgcggaaccagccggacatggtggagctgctggtgcatcacggggccgacgttaatcggagggaccgggaaaaactgctctgctccatgctctggccagcagcgacggggtgcagatccacaatactgagaacattcgtctcttactggaaggaggggcagacgtcaaggccaccaccaaagatggggacacagtgttcacctgcatcatcttcctgcttggtgagaccgtgggaggggacaaagaggaggcccagatgatcaaccgcttctgcttccaagtcacacggctgctgctggcacacggggccgaccccagcgagtgcccagcccacgagtccctcacccacatctgcctgaagagctttaaactgcacttccctctcctgcgcttcctcctggagtccggagccgcctacaactgctccctgcacggtgcgtcctgctggtctggctttcacatcatctttgagaggctctgttcccacccaggctgcacggaagacgagagccatgcggacctcctgcgcaaagctgagactgtcctggatctcatggtgaccaactctcagaaactccagctgcccgaaaacttcgatatccaccctgtgggcagcctggcggaaaagatccaggccctccacttctccttgaggcagctggagagctatcccccgcccctcaagcacctgtgccgtgtggccatccggctctaccttcagccgtggcctgtggatgtgaaggtcaaagccctgcctctgcccgacaggctgaagtggtacctccttagcgagcacagtggctccgtggaagatgacatctgataggtctcaggctacaggaacgggggacacgggcagctcaggtcagcctgttggtagatgctgggacagcattagaagagggtctttttgatctgggagatgagacgggatccttcatgagaaaagccagccaggtagagcctgaagctgtgatcactccagtggtgaagggtgcagctctggttcttccagagagactgcccccttccctccagcggcactccaagtcccccccatgttggaaagaggaacagggcttggattgatgtttataccctctgaattggagggcagtgccagggcatttgcagaagctgggaaggaccaagcctcagcaccccagggctgcggggctcttgttggccgcacgtggcagtgcagctggagaggaagcctggggcacgtcctgtgcggtgccaccaaggccccacccctgccccttttccttccaggttctgttactcacagaagtgtttctggtgggctctgcgggagaagacactaagggccccacaggcttgtttcatggtgttgcaagccaagctggcccctgcctgttcctgtagctctggggccaggtcagccgtggccccacctaccagaactgtgctctgctggcagctgtgcttttgccaaacccagggcctcagcgaccatgacttctgctaaaaagcaatcatgagtgcgtggctggggacagacctctctgaagtgtctcctgttgtgaggggctcactttggagccactgaagagccgactgtgccacccacttgcgagcctcagtcccttccaagctgcactggtcattgggaattgtgtaaacacctctggggataagctgaggtgactaaatgatatatttatattataagattaaactgactttcttggccttaacaaggtccttatataaaatttccaccccgcccctccatagttcaggatagaggctcccacagcagccggtaaggaagtgggtggcaggtgtgaggggatgctgtgtttggggggttgtttccaagtccctgcaaagaagcaccactctagactggcaagggcctccacagtgtggaggtcccattttattatttttttttttcgagacactctgtcacccaggctggagtgcaatggtgcaatctcggctcactgcgacctctgcctcccaggttcaagcagttctcctgcctcagcctcctgagtagctggcattataggtgcccaccaccatgcctggctgatttttgtatttttagtagagacggggtttcgccatgttggtcaggctggtctcaaactcctgacctcaggtgattcgcctgcctcggcctttcaaagtgctgggattacagacatgagccactgtgcccggcccccattttattttagttttattttgagacagagtctcgctctgtcacctaggctggagtgcagtggcgcaatctcacctcactgcaagctctgcctcccgggctcaccccattctcctgcctcagcctcctgagtagctgggactacaggcgcccgccatcacgcctggctaattttttttttttttgtattttaagtagagacggggtttcacctgttagccaggatggtctcaatctcctgacctcgtgatctgcccgcctcggcctcccaaagtgctgggattacaggcgtgagccaccgcgcccagccccattttattttttactttaaatgcctgccaaggagcagcctcaagcccagagaagactgaggctacggggaacttcccttgctgcaggctgttgtaacactttaagggccccaggtctccactgccaagcaggacttggcacatgagcacccaccccacagcaccatcaggcagcacccatgggctccaccagcccagctctgtccctcccctaggtaaagatcacactgaagtcttcaagtccccagcaaccaagttgggggtggtttccttcctcttcaggcagccaggcccatggctggaaggccgggctggaggcccagggaatcggttactgatgtggccaccctattcccacatggggagcaccaggagccctggagccccttccacccaatcccatctcgcaggagagcagggtctgggctcctgcctcaccgctggttcagcagcaccctccccgccgggtcccaccttgccttttgaagaagagcccgcataatgagtggacggcagacagctatatttagtggtgcctcgacactcacgaaccgccagcgtggcgcctggatcttgcccagctgccagctccccccaccaggactgtggttcctcagtttctcctgccagccccggctcatctcagggcaaagctatagacatggtagatctcatcggggaggttctcctgcctctcctcggccaggaggctgaggcctgcactgcagatgatcctgcggaccacgtcaaggtcccggcacacgctgctgtccacgtcgtccagaatcacgccctcctgggccatgttgtctttgatgacgatgatgccgttggggcggaggctgcccttgcagcgccgcaggaactcggccaggtgctgatcggtgaggtggcctggggagggcagaggcaaggttaccagggcaccatgcaagcggatgtcggcactggatgggatgtacttctcagccccgctgagcccctcatttgtgcccagcattttgtgtgcacacatggcctcattggctctcagtcccgagagatttactaaaccccaattcatagaataggaaactgtggctcagaggtcatctacctaaagacacattaagccagaatttgacttgacgggatggcttacaagtcctgcctgatacctacacaccatgatgccccacccctgccaggcttggatcggaggagtgaacctgggctaagagtttggcattgcaggagctcccagagagactgccttccctacactagaagtccccacaaaggcttctgagaccacaaaatacaaggccagacctagagtgtccacagcaggcctgtgctgcccgcctcaggaggtggccgactgctgctagcggcctgccgccacgtcagcagcccagggcacagcgctcgaggtgtgctgttaggctaagagggtgcagggctagacacgaagcttaaactattcatcttattaaaaataaaacccttataaaactcctca

SEQ ID NO: 7868 - protein, 197 aa, Homo sapiens; identical to SEQ ID NO: 1142

SEQ ID NO: 7869 - DNA, 648 bp, Homo sapiens
gatcaaccgcttctgcttccaagtcacacggctgctgctggcacacggggccgaccccagcgagtgcccagcccacgagtccctcacccacatctgcctgaagagctttaaactgcacttccctctcctgcgcttcctcctggagtccggagccgcctacaactgctccctgcacggtgcgtcctgctggtctggctttcacatcatctttgagaggctctgttcccacccaggctgcacggaagacgagagccatgcggacctcctgcgcaaagctgagactgtcctggatctcatggtgaccaactctcagaaactccagctgcccgaaaacttcgatatccaccctgtgggcagcctggcggaaaagatccaggccctccacttctccttgaggcagctggagagctatcccccgcccctcaagcacctgtgccgtgtggccatccggctctaccttcagccgtggcctgtggatgtgaaggtcaaagccctgcctctgcccgacaggtgctgctagcggcctgccgccacgtcagcagcccagggcacagcgctcgaggtgtgctgttaggctaagagggtgcagggctagacacgaagcttaaactattcatcttattaaaaataaaacccttataaaactcc

SEQ ID NO: 7870 - protein, 74 aa, Homo sapiens
MVTNSQKLQLPENFDIHPVGSLAEKIQALHFSLRQLESYPPPLKHLCRVAIRLYLQPWPVDVKVKALPLPDRCC

SEQ ID NO: 7871 - DNA, 1278 bp, Homo sapiens
aggggcagacgtcaaggccaccaccaaagatggggacacagtgttcacctgcatcatcttcctgcttggtgagaccgtgggaggggacaaagaggaggcccagatgatcaaccgcttctgcttccaagtcacacggctgctgctggcacacggggccgaccccagcgagtgcccagcccacgagtccctcacccacatctgcctgaagagctttaaactgcacttccctctcctgcgcttcctcctggagtccggagccgcctacaactgctccctgcacggtgcgtcctgctggtctggctttcacatcatctttgagaggctctgttcccacccaggctgcacggaagacgagagccatgcggacctcctgcgcaaagctgagactgtcctggatctcatggtgaccaactctcagaaactccagctgcccgaaaacttcgatatccaccctgtgggcagcctggcggaaaagatccaggccctccacttctccttgaggcagctggagagctatcccccgcccctcaagcacctgtgccgtgtggccatccggctctaccttcagccgtggcctgtggatgtgaaggtcaaagccctgcctctgcccgacaggctgaagtggtacctccttagcgagcacagtggctccgtggaagatgacatctgataggtctcaggctacaggaacgggggacacgggcagctcaggtcagcctgttggtagatgctgggacagcattagaagagggtctttttgatctgggagatgaagcctggggcacgtcctgtgcggtgccaccaaggccccacccctgccccttttccttccaggttctgttactcacagaagtgtttctggtgggctctgcgggagaagacactaagggccccacaggcttgtttcatggtgttgcaagccaagctggcccctgcctgttcctgtagctctggggccaggtcagccgtggccccacctaccagaactgtgctctgctggcagctgtgcttttgccaaacccagggcctcagcgaccatgacttctgctaaaaagcaatcatgagtgcgtggctggggacagacctctctgaagtgtctcctgttgtgaggggctcactttggagccactgaagagccgactgtgccacccacttgcgagcctcagtcccttccaagctgcactggtcattgggaattgtgtaaacacctctggggataagctgaggtgactaaatgatatatttatattataagattaaactgactttcttggcctt

SEQ ID NO: 7872 - protein, 93 aa, Homo sapiens [sequence omitted]

SEQ ID NO: 7873 - DNA, 2256 bp, Homo sapiens
gcctgccctgcctgcagcgcctcctggaccttggagctgatgtcaatgccgctgacaagcatggtgggtgcctcctgcaggaaagcaggacagctgggcccccaggcaccttgtgggggacacccagggtgccccaggacaacagctaggtgggcagactggatgctggccctggctggtggcacagcatggctgggcacacagggattctgctgacttgctgagctcagaggcttcagagaggcagtgcagtcattgtccctgtgctggccctcaagggccttctataggaagaaatagggcatgtgtgcacttagtttccaagaaacaatggcttcccattgggagaggcccagccaacatctcaggtagcatcttggggtccagaaaaatcctacctttcctggcctttccgctcccacttctctgggtggaaagggaatggccagaagcctgtcaccctcagccctcacctgagctgagagttgtctctgaaagttcatcttctgatcctctgagtgtctggatttctgccacctcctctgggttgccctgacctgggcttcctggcctcctgctcctccttgctctccctccctccctaggaaaaactgctctgctccatgctctggccagcagcgacggggtgcagatccacaatactgagaacattcgtctcttactggaaggaggggcagacgtcaaggccaccaccaaagatggggacacagtgttcacctgcatcatcttcctgcttggtgagaccgtgggaggggacaaagaggaggcccagatgatcaaccgcttctgcttccaagtcacacggctgctgctggcacacggggccgaccccagcgagtgcccagcccacgagtccctcacccacatctgcctgaagagctttaaactgcacttccctctcctgcgcttcctcctggagtccggagccgcctacaactgctccctgcacggtgcgtcctgctggtctggctttcacatcatctttgagaggctctgttcccacccaggctgcacggaagacgagagccatgcggacctcctgcgcaaagctgagactgtcctggatctcatggtgaccaactctcagaaactccagctgcccgaaaacttcgatatccaccctgtgggcagcctggcggaaaagatccaggccctccacttctccttgaggcagctggagagctatcccccgcccctcaagcacctgtgccgtgtggccatccggctctaccttcagccgtggcctgtggatgtgaaggtcaaagccctgcctctgcccgacaggctgaagtggtacctccttagcgagcacagtggctccgtggaagatgacatctgataggtctcaggctacaggaacgggggacacgggcagctcaggtcagcctgttggtagatgctgggacagcattagaagagggtctttttgatctgggagatgagacgggatccttcatgagaaaagccagccaggtagagcctgaagctgtgatcactccagtggtgaagggtgcagctctggttcttccagagagactgcccccttccctccagcggcactccaagtcccccccatgttggaaagaggaacagggcttggattgatgtttataccctctgaattggagggcagtgccagggcatttgcagaagctgggaaggaccaagcctcagcaccccagggctgcggggctcttgttggccgcacgtggcagtgcagctggagaggaagcctggggcacgtcctgtgcggtgccaccaaggccccacccctgccccttttccttccaggttctgttactcacagaagtgtttctggtgggctctgcgggagaagacactaagggccccacaggcttgtttcatggtgttgcaagccaagctggcccctgcctgttcctgtagctctggggccaggtcagccgtggccccacctaccagaactgtgctctgctggcagctgtgcttttgccaaacccagggcctcagcgaccatgacttctgctaaaaagcaatcatgagtgcgtggctggggacagacctctctgaagtgtctcctgttgtgaggggctcactttggagccactgaagagccgactgtgccacccacttgcgagcctcagtcccttccaagctgcactggtcattgggaattgtgtaaacacctctggggataagctgaggtgactaaatgatatatttatattataagattaaactgactttcttggcctt

SEQ ID NO: 7874 - protein, 57 aa, Homo sapiens; identical to SEQ ID NO: 7862

SEQ ID NO: 7875 - DNA, 2627 bp, Homo sapiens
cggcagggccgagagcacgaccggcggaactcggacggcgcccagcggtcgcgggcgggatcgcagggcgaagccgagccgggccgggccctggcaggaaggggcggacccgcctgagtctcggatctggcttggctcgatcctccactctcccactccgctggggccgcccactggacatcgcccgagtcggcctggcggtcgtgccccaggacgcgccgaggtcctccgagcccgcagggggcgctgtcgccatatggcccaccctgagtcggcgcgggcaggaagtacgagggtcacttccggcgggggcgcggcttggactgaggagcggacccggccgggcgcaggggctggactggcggagcaggtggggtccgcggccgccggagcgttccggtcggcgtctgggcatctcggcctcggcagaaagcgcgacggccctgctgcgcggggcccgcggcgatgccgttcctgcacggcttccggaggatcatcttcgagtaccagccgctggtggatgcgattctgggctccctggggatccaggaccccgagcggcaggagtctctggaccggcccagttatgtcgccagcgaggagagccgaatccttgttctcactgagctgctggagaggaaagcccactctcccttttaccaggaaggcgtgagcaacgccctgctcaagatggctgagctggggctgacgcgggcggccgacgttctcttgcggcatggggccaatctcaactttgaagacccagtcacctactacacggccttgcacatcgccgtcctgcggaaccagccggacatggtggagctgctggtgcatcacggggccgacgttaatcggagggaccggatccacgagagtagccccttggacctggccagcgaggagcctgagcgcctgccctgcctgcagcgcctcctggaccttggagctgatgtcaatgccgctgacaagcatggaaaaactgctctgctccatgctctggccagcagcgacggggtgcagatccacaatactgagaacattcgtctcttactggaaggaggggcagacgtcaaggccaccaccaaagatggggacacagtgttcacctgcatcatcttcctgcttggtgagaccgtgggaggggacaaagaggaggcccagatgatcaaccgcttctgcttccaagtcacacggctgctgctggcacacggggccgaccccagcgagtgcccagcccacgagtccctcacccacatctgcctgaagagctttaaactgcacttccctctcctgcgcttcctcctggagtccggagccgcctacaactgctccctgcacggtgcgtcctgctggtctggctttcacatcatctttgagaggctctgttcccacccaggctgcacggaagacgagagccatgcggacctcctgcgcaaagctgagactgtcctggatctcatggtgaccaactctcagaaactccagctgcccgaaaacttcgatatccaccctgtgggcagcctggcggaaaagatccaggccctccacttctccttgaggcagctggagagctatcccccgcccctcaagcacctgtgccgtgtggccatccggctctaccttcagccgtggcctgtggatgtgaaggtcaaagccctgcctctgcccgacaggctgaagtggtacctccttagcgagcacagtggctccgtggaagatgacatctgataggtctcaggctacaggaacgggggacacgggcagctcaggtcagcctgttggtagatgctgggacagcattagaagagggtctttttgatctgggagatgagacgggatccttcatgagaaaagccagccaggtagagcctgaagctgtgatcactccagtggtgaagggtgcagctctggttcttccagagagactgcccccttccctccagcggcactccaagtcccccccatgttggaaagaggaacagggcttggattgatgtttataccctctgaattggagggcagtgccagggcatttgcagaagctgggaaggaccaagcctcagcaccccagggctgcggggctcttgttggccgcacgtggcagtgcagctggagaggaagcctggggcacgtcctgtgcggtgccaccaaggccccacccctgccccttttccttccaggttctgttactcacagaagtgtttctggtgggctctgcgggagaagacactaagggccccacaggcttgtttcatggtgttgcaagccaagctggcccctgcctgttcctgtagctctggggccaggtcagccgtggccccacctaccagaactgtgctctgctggcagctgtgcttttgccaaacccagggcctcagcgaccatgacttctgctaaaaagcaatcatgagtgcgtggctggggacagacctctctgaagtgtctcctgttgtgaggggctcactttggagccactgaagagccgactgtgccacccacttgcgagcctcagtcccttccaagctgcactggtcattgggaattgtgtaaacacctctggggataagctgaggtgactaaatgatatatttatattataagattaaactgactttcttggcctt

SEQ ID NO: 7876 - protein, 421 aa, Homo sapiens; identical to SEQ ID NO: 1140

SEQ ID NO: 7877 - DNA, 2518 bp, Homo sapiens
cggcagggccgagagcacgaccggcggaactcggacggcgcccagcggtcgcgggcgggatcgcagggcgaagccgagccgggccgggccctggcaggaaggggcggacccgcctgagtctcggatctggcttggctcgatcctccactctcccactccgctggggccgcccactggacatcgcccgagtcggcctggcggtcgtgccccaggacgcgccgaggtcctccgagcccgcagggggcgctgtcgccatatggcccaccctgagtcggcgcgggcaggaagtacgagggtcacttccggcgggggcgcggcttggactgaggagcggacccggccgggcgcaggggctggactggcggagcaggtggggtccgcggccgccggagcgttccggtcggcgtctgggcatctcggcctcggcagaaagcgcgacggccctgctgcgcggggcccgcggcgatgccgttcctgcacggcttccggaggatcatcttcgagtaccagccgctggtggatgcgattctgggctccctggggatccaggaccccgagcggcaggagtctctggaccggcccagttatgtcgccagcgaggagagccgaatccttgttctcactgagctgctggagaggaaagcccactctcccttttaccaggaaggcgtgagcaacgccctgctcaagatggctgagctggggctgacgcgggcggccgacgttctcttgcggcatggggccaatctcaactttgaagacccagtcacctactacacggccttgcacatcgccgtcctgcggaaccagccggacatggtggagctgctggtgcatcacggggccgacgttaatcggagggaccgggaaaaactgctctgctccatgctctggccagcagcgacggggtgcagatccacaatactgagaacattcgtctcttactggaaggaggggcagacgtcaaggccaccaccaaagatggggacacagtgttcacctgcatcatcttcctgcttggtgagaccgtgggaggggacaaagaggaggcccagatgatcaaccgcttctgcttccaagtcacacggctgctgctggcacacggggccgaccccagcgagtgcccagcccacgagtccctcacccacatctgcctgaagagctttaaactgcacttccctctcctgcgcttcctcctggagtccggagccgcctacaactgctccctgcacggtgcgtcctgctggtctggctttcacatcatctttgagaggctctgttcccacccaggctgcacggaagacgagagccatgcggacctcctgcgcaaagctgagactgtcctggatctcatggtgaccaactctcagaaactccagctgcccgaaaacttcgatatccaccctgtgggcagcctggcggaaaagatccaggccctccacttctccttgaggcagctggagagctatcccccgcccctcaagcacctgtgccgtgtggccatccggctctaccttcagccgtggcctgtggatgtgaaggtcaaagccctgcctctgcccgacaggctgaagtggtacctccttagcgagcacagtggctccgtggaagatgacatctgataggtctcaggctacaggaacgggggacacgggcagctcaggtcagcctgttggtagatgctgggacagcattagaagagggtctttttgatctgggagatgagacgggatccttcatgagaaaagccagccaggtagagcctgaagctgtgatcactccagtggtgaagggtgcagctctggttcttccagagagactgcccccttccctccagcggcactccaagtcccccccatgttggaaagaggaacagggcttggattgatgtttataccctctgaattggagggcagtgccagggcatttgcagaagctgggaaggaccaagcctcagcaccccagggctgcggggctcttgttggccgcacgtggcagtgcagctggagaggaagcctggggcacgtcctgtgcggtgccaccaaggccccacccctgccccttttccttccaggttctgttactcacagaagtgtttctggtgggctctgcgggagaagacactaagggccccacaggcttgtttcatggtgttgcaagccaagctggcccctgcctgttcctgtagctctggggccaggtcagccgtggccccacctaccagaactgtgctctgctggcagctgtgcttttgccaaacccagggcctcagcgaccatgacttctgctaaaaagcaatcatgagtgcgtggctggggacagacctctctgaagtgtctcctgttgtgaggggctcactttggagccactgaagagccgactgtgccacccacttgcgagcctcagtcccttccaagctgcactggtcattgggaattgtgtaaacacctctggggataagctgaggtgactaaatgatatatttatattataagattaaactgactttcttggcctt

SEQ ID NO: 7878 - protein, 197 aa, Homo sapiens; identical to SEQ ID NO: 1142

SEQ ID NO: 7879 - DNA, 1119 bp, Homo sapiens
cggcagggccgagagcacgaccggcggaactcggacggcgcccagcggtcgcgggcgggatcgcagggcgaagccgagccgggccgggccctggcaggaaggggcggacccgcctgagtctcggatctggcttggctcgatcctccactctcccactccgctggggccgcccactggacatcgcccgagtcggcctggcggtcgtgccccaggacgcgccgaggtcctccgagcccgcagggggcgctgtcgccatatggcccaccctgagtcggcgcgggcaggaagtacgagggtcacttccggcgggggcgcggcttggactgaggagcggacccggccgggcgcaggggctggactggcggagcaggtggggtccgcggccgccggagcgttccggtcggcgtctgggcatctcggcctcggcagaaagcgcgacggccctgctgcgcggggcccgcggcgatgccgttcctgcacggcttccggaggatcatcttcgagtaccagccgctggtggatgcgattctgggctccctggggatccaggaccccgagcggcaggagtctctggaccggcccagttatgtcgccagcgaggagagccgaatccttgttctcactgagctgctggagaggaaagcccactctcccttttaccaggaaggcgtgagcaacgccctgctcaagatggctgagctggggctgacgcgggcggccgacgttctcttgcggcatggggccaatctcaactttgaagacccagtcacctactacacggccttgcacatcgccgtcctgcggaaccagccggacatggtggagctgctggtgcatcacggggccgacgttaatcggagggaccggatccacgagagtagccccttggacctggccagcgaggagcctgagcgcctgccctgcctgcagcgcctcctggaccttggagctgatgtcaatgccgctgacaagcatggtgggtgcctcctgcaggaaagcaggacagctgggcccccaggcaccttgtgggggacacccagggtgccccaggacaacagctaggtgggcagactggatgctggccctggctggtggcacagcatggctgggcacacaggg

SEQ ID NO: 7880 - protein, 198 aa, Homo sapiens
MPFLHGFRRIIFEYQPLVDAILGSLGIQDPERQESLDRPSYVASEESRILVLTELLERKAHSPFYQEGVSNALLKMAELGLTRAADVLLRHGANLNFEDPVTYYTALHIAVLRNQPDMVELLVHHGADVNRRDRIHESSPLDLASEEPERLPCLQRLLDLGADVNAADKHGGCLLQESRTAGPPGTLWGTPRVPQDNS

SEQ ID NO: 7881 - DNA, 844 bp, Homo sapiens
cggcagggccgagagcacgaccggcggaactcggacggcgcccagcggtcgcgggcgggatcgcagggcgaagccgagccgggccgggccctggcaggaaggggcggacccgcctgagtctcggatctggcttggctcgatcctccactctcccactccgctggggccgcccactggacatcgcccgagtcggcctggcggtcgtgccccaggacgcgccgaggtcctccgagcccgcagggggcgctgtcgccatatggcccaccctgagtcggcgcgggcaggaagtacgagggtcacttccggcgggggcgcggcttggactgaggagcggacccggccgggcgcaggggctggactggcggagcaggtggggtccgcggccgccggagcgttccggtcggcgtctgggcatctcggcctcggcagaaagcgcgacggccctgctgcgcggggcccgcggcgatgccgttcctgcacggcttccggaggatcatcttcgagtaccagccgctggtggatgcgattctgggctccctggggatccaggaccccgagcggcaggagtctctggaccggcccagttatgtcgccagcgaggagagccgaatccttgttctcactgagctgctggagaggaaagcccactctcccttttaccaggaaggcgtgagcaacgccctgctcaagatggctgagctggggctgacgcgggcggccgacgttctcttgcggcatggggccaatctcaactttgaaggtcagcgagagccccgggggtgggcaggtggcttaaacgcggcccgacgctgggtgggcgcccatgtccccagccttggcttct

SEQ ID NO: 7882 - protein, 138 aa, Homo sapiens
MAHPESARAGSTRVTSGGGAAWTEERTRPGAGAGLAEQVGSAAAGAFRSASGHLGLGRKRDGPAARGPRRCRSCTASGGSSSSTSRWWMRFWAPWGSRTPSGRSLWTGPVMSPARRAESLFSLSCWRGKPTLPFTRKA

SEQ ID NO: 7883 - DNA, 470 bp, Homo sapiens
atgggcgcccacccagcgtcgggccgcgtttaagccacctgcccacccccggggctctcgctgaccttcaaagttgagattggccccatgccgcaagagaacgtcggccgcccgcgtcagccccagctcagccatcttgagcagggcgttgctcacgccttcctggtaaaagggagagtgggctttcctctccagcagctcagtgagaacaaggattcggctctcctcgctggcgacataactgggcctgggacaggagagaggctgaggaaagcccttccatcctcaaacccgcaggaccccagccccggcaacacctgcagccaggacagcaacacagcctcctccctcccctcacattgagaccttcagctgatattgatgaagaaagcctacgtttccaccagagtccctggatggcgagactcatcattaccacgtgttggaaataccaactgacaaccccctca

SEQ ID NO: 7884 - protein, 91 aa, Homo sapiens
MPQENVGRPRQPQLSHLEQGVAHAFLVKGRVGFPLQQLSENKDSALLAGDITGPGTGERLRKALPSSNPQDPSPGNTCSQDSNTASSLPSH

SEQ ID NO: 7885 - DNA, 583 bp, Homo sapiens
ggcggctaacccacgtcggcatcagccgaggcagccatgaggcacgaatttctgacccaaagctcaatgttgtaagagcccggcggggttcccaccagggctgagatggtgacgtggcgtccacccgcctgtcaacaccccactctcccctgcacagtagctgccgcggtctttctgctccaggatgcagctgtctcaggtaccctgcgccgtgagcggaccacccatcgtcggcgtctcagacacgcccacccacttgcctgagctcagaaagtgccggctgtgcagcccaagcgtgccatgggcttccactcggcgttcacgtctcacctctcggcttaggaaaacccacgcctcgcgccaaggaaaatgaggcagaatgttgtgcaccgttaatgagaccatgggcctgggcatctcctggctgctgccccctggagaggcacttccattcaccagggcgccccgccaaagcccctgcccgatgaggaattttccccgctttgaagctggtgggtctgtgccagtttggaacacggggatccagctccttgcgggagaataaaagcaactcgcagacagt

SEQ ID NO: 7886 - protein, 62 aa, Homo sapiens
MQLSQVPCAVSGPPIVGVSDTPTHLPELRKCRLCSPSVPWASTRRSRLTSRLRKTHASRQGK

SEQ ID NO: 7887 - DNA, 6535 bp, Homo sapiens
gggaaaaaagtgctccgcgccgaaggcgaggtccgcactctccgtccccgcggctggcgcaggacctcactcgagcggagcgcccacggggagcgggtcgcggggcggcggcggcgaggaggaggcgagaaggagttggaggaggaggaggaggaggcgagggcgagctagcccagcggggtcccggccgccccgcgggccaaagtcgagccctcccgcccgtgggcgagcgcgccagccgccccttccagaacagccgccgccacaaagaagaacggggggtgccgaggtccccatgacctcctaaagtggtgcggtccctgctgagtgcgctgcccgggccgtgacccgcgcccctgtgcgtccccgcgcgcctccgagcgcccctgtgcgccccggcccgcgccccgccggcatggacgtccatacccgctggaaagcgcgcagcgcgctccgcccgggcgccccgctgctgcccccgctgctgctgctgctgctgtgggcgccgcctccgagccgcgcagctcagccagcagatctcctgaaggttctagattttcacaacttgcctgatggaataacaaagacaacaggcttttgcgccacgcggcgatcttccaaaggcccggatgtcgcttacagagtcaccaaagacgcgcagctcagcgcacccaccaagcagctgtaccctgcgtctgcatttcccgaggacttctccatcctaacaactgtgaaagccaagaaaggcagccaggccttcctggtctccatctacaacgagcagggtatccagcagattgggctggagctgggccgctctcccgtcttcctctacgaggaccacacggggaagcctggcccggaagactaccccctcttccggggcatcaacctgtcagatggcaagtggcacagaattgctctcagcgtccacaagaaaaatgtcaccttgatcctcgactgtaaaaagaagaccaccaaattcctcgaccgcagcgaccaccccatgatcgacatcaatggcatcatcgtgtttggcacccggatcctggatgaggaggtgtttgagggtgacatccagcagctgctctttgtctcggaccaccgggcagcttatgattactgtgagcactacagccctgactgtgacaccgcagtacctgacaccccacagtcgcaggaccccaatccagatgaatattacacggaaggagacggcgagggtgagacctattactacgaatacccctactacgaagaccccgaagacctagggaaggagcccacccccagcaagaagcccgtggaagctgccaaagaaaccacagaggtccccgaggagctgaccccgacccccacggaagctgctcccatgcctgaaaccagtgaaggggctgggaaggaagaggacgtcggcatcggggactatgactacgtgcccagtgaggactactacacgccctcaccgtatgatgacctcacctatggcgagggggaggagaaccccgaccagcccacagacccaggcgctggggccgaaattcccaccagcaccgccgacacctccaactcctccaatccagctccgcctccaggggaaggtgcggatgacttggagggggagttcactgaggaaacgatccggaaccttgacgagaactactacgacccctactacgaccccaccagctccccgtcggagatcgggccgggaatgccggcgaaccaggataccatctatgaagggattggaggacctcggggcgagaaaggccaaaagggagaaccagcgattatcgagccgggcatgctcatcgagggcccgcctggcccagaaggccccgcgggtcttcccggacctccaggaaccatgggtcccactggccaagtcggggaccctggagaaaggggcccccctggacgcccaggccttcctggggccgatggcctgcccggtcctccaggaaccatgctcatgctgcccttccggtttggaggtggcggcgatgcgggctccaaaggccccatggtctcagcccaggagtcccaggcgcaagccattctccagcaggccaggttggcactgaggggaccagctggcccgatgggtctcacagggagacctggccctgtgggtccccctgggagcggaggtttgaagggcgagccgggagacgtggggcctcagggtcctcgaggtgtgcaaggcccgcctggtccggccgggaagcccggaagacggggtcgggctgggagtgatggagccagaggaatgcctggacaaactggccccaagggtgaccggggtttcgacggcctggctgggttgccaggcgagaagggccacaggggtgaccctggtccttccggcccaccaggacctccgggagacgatggagaaaggggtgacgacggagaagttgggcccagggggctgcctggggagcccgggccacgtggtctgcttgggccgaaggggcccccaggtcctcccggacctcccggtgtcacgggtatggacggccagccggggccaaaaggaaatgtgggtccccagggagagcctggccccccaggacagcagggtaatccaggcgcccagggtcttccaggcccccagggtgcaattggtcctccaggagaaaagggtcccttggggaaaccaggccttccaggaatgcccggtgctgacggacccccgggacaccctggcaaagaaggccctccaggagagaaaggaggtcagggtccacctggcccccagggtccgattggctacccaggtcctcgaggagtcaagggggccgatggcatccgtggtctgaagggcacaaagggcgagaagggtgaagacggctttcctgggtttaaaggagacatgggcatcaagggtgatcggggggagatcggcccacccggtcccaggggagaagatggccctgaaggcccaaagggtcgcggaggtcccaatggtgaccccggtcctctgggaccccctggggagaagggaaaactcggagtcccagggttaccagggtatccaggaagacaaggaccaaagggctctattggattccctggatttcctggcgccaatggagagaagggcggcagggggacccctggaaagccaggaccgcgggggcagcgaggcccaacgggtccgaggggtgaaagaggcccccggggcatcactgggaagcctggccccaagggcaactccggaggtgacggcccagctggccctcctggtgaacggggacccaatggaccccaaggacccacaggatttcctggaccaaagggcccccctggccctccaggcaaggatggactcccaggacaccctggacagagaggcgagactggtttccaaggcaagaccggccctccaggcccccccggcgtggtcggccctcagggtcccacgggagaaacgggcccaatgggtgagcgtggccaccctgggccccctggaccccccggtgaacaggggcttccgggccttgctggaaaagaagggacgaagggtgacccaggccctgcaggcctccctgggaaagatggccctccaggattacgtggtttccctggggaccgagggcttcctggtccagtgggagctcttggactgaaaggcaatgaagggccccctggcccaccaggccctgcgggatctccaggggagagaggtccagctggagccgctgggcccatcggaattccagggagacctgggccccagggacccccagggccggcaggagagaaaggggctcctggcgagaaaggcccacaaggcccagctggccgagacggtctccaggggcctgtggggctcccgggtccagctggccctgtgggtccccctggagaagacggagataagggagagatcggggagccggggcagaaaggaagcaagggggacaaaggagaacagggtcctcctgggcctacaggtcctcaaggccccatcggacagccaggcccctctggagctgacggcgagccggggcctcggggccagcagggccttttcgggcagaaaggtgatgaaggtcccagaggctttcctggaccccctgggccagtggggctgcagggtttgccaggacctccaggcgagaagggtgagacaggagacgtgggccagatgggccccccgggtccccctggcccccgaggaccctccggagctccaggtgctgatggcccacaaggtcccccaggtggaataggaaaccctggtgcagtgggagagaagggcgagcctggcgaagcaggtgagcctggccttccgggagaaggcggccccccgggacccaaaggagaaaggggagagaagggcgagtcaggcccttcaggtgctgccggaccccctggacccaaaggccctcccggagatgatggtcccaaaggcagccctggcccagtgggttttcctggagatcctggcccccccggagagcctggccccgcgggtcaagatggtccccctggtgacaaaggagatgatggtgaacccgggcagacgggatcccccggccctactggtgaaccaggtccatcggggcctccaggaaaaaggggtcccccaggccccgcaggccccgaaggcagacagggagagaaaggggccaagggagaagccggcttggaaggccctcctgggaagactggccccatcggcccccagggggcccctgggaagcccggaccggatggccttcgagggatccctggccctgtgggagaacaaggtctcccaggatccccaggcccggacggtccccccggccccatgggtcccccaggacttcccggcctcaaaggagattctggtcccaaaggtgaaaagggtcatccaggcctgatcgggctcatcggtcctccgggtgaacagggtgagaagggcgaccgtggtctccctggcccccagggctcctccggtcctaagggagaacagggtatcactggtccttctggcccgattgggcctcctgggccccctggcctgccgggtccgcctggtccaaaaggtgctaagggctcctcgggtccaactggcccgaagggtgaggcaggccacccaggacccccaggccccccgggccccccgggagaggtcatccagcccctgccaatccaggcatccaggacgcggcggaacatcgacgccagccagctgctggacgacgggaatggcgagaactacgtggactacgcggacggcatggaagagatcttcggctctctcaactctctgaagctggagattgagcagatgaaacggcccctgggcacgcagcagaaccccgcccgcacctgcaaggacctgcagctctgccaccccgacttcccagatggtgaatactgggtcgatcctaaccaaggatgctccagggattccttcaaggtttactgcaacttcacagccggggggtcgacatgcgtcttccctgacaagaagtccgaaggggccagaatcacttcttggcccaaagaaaacccgggctcctggttcagtgaattcaagcgtgggaaactgctctcctatgtggacgccgagggcaaccctgtgggtgtggtacagatgaccttcctgcggctgctgagcgcctctgcccaccagaacgtcacctaccactgctaccagtcagtggcctggcaggacgcagccacgggcagctacgacaaggccctccgcttcctgggctccaacgacgaggagatgtcctatgacaacaacccctacatccgcgccctggtggacggctgtgctaccaagaaaggctaccagaagacggttctggagatcgacacccccaaagtggagcaggtgcccatcgtggacatcatgttcaatgacttcggtgaagcgtcacagaaatttggatttgaagtggggccggcttgcttcatgggctaggagccgccgagcccgggctcccgagagcaacctcgtgacctcagcatgccattcgttcgtgagtgtcccgtgcacgtcctgaccctggacagtgaaggcttctccctcccctcccacctgacttcatctacgcctcggcaccacggggtgtgggaccccagcccggagagaacagagggaaggagccgcgcccccacctggagctgaatcacatgacctagctgcaccccagcgcctgggcccgccccacgctctgtccacacccacgcgccccgggagcggggccatgcctccagccccccagctcgcccgacccatcctgttcgtgaataggtctcaggggttgggggagggactgccagatttggacactatatttttttctaaattcaacttgaagatgtgtatttcccctgaccttcaaaaaatgttccaaggtaagcctcgtaaaggtcatcccaccatcaccaaagcctccgtttttaacaacctccaacacgatccatttagaggccaaatgtcattctgcaggtgccttcccgatggattaaaggtgcttatgtttttgtgagttttaagtaaatatttgtattgtattgttat

SEQ ID NO: 7888 - protein, 1838 aa, Homo sapiens; identical to SEQ ID NO: 1144

SEQ ID NO: 7889 - DNA, 7336 bp, Homo sapiens
gggaaaaaagtgctccgcgccgaaggcgaggtccgcactctccgtccccgcggctggcgcaggacctcactcgagcggagcgcccacggggagcgggtcgcggggcggcggcggcgaggaggaggcgagaaggagttggaggaggaggaggaggaggcgagggcgagctagcccagcggggtcccggccgccccgcgggccaaagtcgagccctcccgcccgtgggcgagcgcgccagccgccccttccagaacagccgccgccacaaagaagaacggggggtgccgaggtccccatgacctcctaaagtggtgcggtccctgctgagtgcgctgcccgggccgtgacccgcgcccctgtgcgtccccgcgcgcctccgagcgcccctgtgcgccccggcccgcgccccgccggcatggacgtccatacccgctggaaagcgcgcagcgcgctccgcccgggcgccccgctgctgcccccgctgctgctgctgctgctgtgggcgccgcctccgagccgcgcagctcagccagcagatctcctgaaggttctagattttcacaacttgcctgatggaataacaaagacaacaggcttttgcgccacgcggcgatcttccaaaggcccggatgtcgcttacagagtcaccaaagacgcgcagctcagcgcacccaccaagcagctgtaccctgcgtctgcatttcccgaggacttctccatcctaacaactgtgaaagccaagaaaggcagccaggccttcctggtctccatctacaacgagcagggtatccagcagattgggctggagctgggccgctctcccgtcttcctctacgaggaccacacggggaagcctggcccggaagactaccccctcttccggggcatcaacctgtcagatggcaagtggcacagaattgctctcagcgtccacaagaaaaatgtcaccttgatcctcgactgtaaaaagaagaccaccaaattcctcgaccgcagcgaccaccccatgatcgacatcaatggcatcatcgtgtttggcacccggatcctggatgaggaggtgtttgagggtgacatccagcagctgctctttgtctcggaccaccgggcagcttatgattactgtgagcactacagccctgactgtgacaccgcagtacctgacaccccacagtcgcaggaccccaatccagatgaatattacacggaaggagacggcgagggtgagacctattactacgaatacccctactacgaagaccccgaagacctagggaaggagcccacccccagcaagaagcccgtggaagctgccaaagaaaccacagaggtccccgaggagctgaccccgacccccacggaagctgctcccatgcctgaaaccagtgaaggggctgggaaggaagaggacgtcggcatcggggactatgactacgtgcccagtgaggactactacacgccctcaccgtatgatgacctcacctatggcgagggggaggagaaccccgaccagcccacagacccaggcgctggggccgaaattcccaccagcaccgccgacacctccaactcctccaatccagctccgcctccaggggaaggtgcggatgacttggagggggagttcactgaggaaacgatccggaaccttgacgagaactactacgacccctactacgaccccaccagctccccgtcggagatcgggccgggaatgccggcgaaccaggataccatctatgaagggattggaggacctcggggcgagaaaggccaaaagggagaaccagcgattatcgagccgggcatgctcatcgagggcccgcctggcccagaaggccccgcgggtcttcccggacctccaggaaccatgggtcccactggccaagtcggggaccctggagaaaggggcccccctggacgcccaggccttcctggggccgatggcctgcccggtcctccaggaaccatgctcatgctgcccttccggtttggaggtggcggcgatgcgggctccaaaggccccatggtctcagcccaggagtcccaggcgcaagccattctccagcaggccaggttggcactgaggggaccagctggcccgatgggtctcacagggagacctggccctgtgggtccccctgggagcggaggtttgaagggcgagccgggagacgtggggcctcagggtcctcgaggtgtgcaaggcccgcctggtccggccgggaagcccggaagacggggtcgggctgggagtgatggagccagaggaatgcctggacaaactggccccaagggtgaccggggtttcgacggcctggctgggttgccaggcgagaagggccacaggggtgaccctggtccttccggcccaccaggacctccgggagacgatggagaaaggggtgacgacggagaagttgggcccagggggctgcctggggagcccgggccacgtggtctgcttgggccgaaggggcccccaggtcctcccggacctcccggtgtcacgggtatggacggccagccggggccaaaaggaaatgtgggtccccagggagagcctggccccccaggacagcagggtaatccaggcgcccagggtcttccaggcccccagggtgcaattggtcctccaggagaaaagggtcccttggggaaaccaggccttccaggaatgcccggtgctgacggacccccgggacaccctggcaaagaaggccctccaggagagaaaggaggtcagggtccacctggcccccagggtccgattggctacccaggtcctcgaggagtcaagggggccgatggcatccgtggtctgaagggcacaaagggcgagaagggtgaagacggctttcctgggtttaaaggagacatgggcatcaagggtgatcggggggagatcggcccacccggtcccaggggagaagatggccctgaaggcccaaagggtcgcggaggtcccaatggtgaccccggtcctctgggaccccctggggagaagggaaaactcggagtcccagggttaccagggtatccaggaagacaaggaccaaagggctctattggattccctggatttcctggcgccaatggagagaagggcggcagggggacccctggaaagccaggaccgcgggggcagcgaggcccaacgggtccgaggggtgaaagaggcccccggggcatcactgggaagcctggccccaagggcaactccggaggtgacggcccagctggccctcctggtgaacggggacccaatggaccccaaggacccacaggatttcctggaccaaagggcccccctggccctccaggcaaggatggactcccaggacaccctggacagagaggcgagactggtttccaaggcaagaccggccctccaggcccccccggcgtggtcggccctcagggtcccacgggagaaacgggcccaatgggtgagcgtggccaccctgggccccctggaccccccggtgaacaggggcttccgggccttgctggaaaagaagggacgaagggtgacccaggccctgcaggcctccctgggaaagatggccctccaggattacgtggtttccctggggaccgagggcttcctggtccagtgggagctcttggactgaaaggcaatgaagggccccctggcccaccaggccctgcgggatctccaggggagagaggtccagctggagccgctgggcccatcggaattccagggagacctgggccccagggacccccagggccggcaggagagaaaggggctcctggcgagaaaggcccacaaggcccagctggccgagacggtctccaggggcctgtggggctcccgggtccagctggccctgtgggtccccctggagaagacggagataagggagagatcggggagccggggcagaaaggaagcaagggggacaaaggagaacagggtcctcctgggcctacaggtcctcaaggccccatcggacagccaggcccctctggagctgacggcgagccggggcctcggggccagcagggccttttcgggcagaaaggtgatgaaggtcccagaggctttcctggaccccctgggccagtggggctgcagggtttgccaggacctccaggcgagaagggtgagacaggagacgtgggccagatgggccccccgggtccccctggcccccgaggaccctccggagctccaggtgctgatggcccacaaggtcccccaggtggaataggaaaccctggtgcagtgggagagaagggcgagcctggcgaagcaggtgagcctggccttccgggagaaggcggccccccgggacccaaaggagaaaggggagagaagggcgagtcaggcccttcaggtgctgccggaccccctggacccaaaggccctcccggagatgatggtcccaaaggcagccctggcccagtgggttttcctggagatcctggcccccccggagagcctggccccgcgggtcaagatggtccccctggtgacaaaggagatgatggtgaacccgggcagacgggatcccccggccctactggtgaaccaggtccatcggggcctccaggaaaaaggggtcccccaggccccgcaggccccgaaggcagacagggagagaaaggggccaagggagaagccggcttggaaggccctcctgggaagactggccccatcggcccccagggggcccctgggaagcccggaccggatggccttcgagggatccctggccctgtgggagaacaaggtctcccaggatccccaggcccggacggtccccccggccccatgggtcccccaggacttcccggcctcaaaggagattctggtcccaaaggtgaaaagggtcatccaggcctgatcgggctcatcggtcctccgggtgaacagggtgagaagggcgaccgtggtctccctggcccccagggctcctccggtcctaagggagaacagggtatcactggtccttctggcccgattgggcctcctgggccccctggcctgccgggtccgcctggtccaaaaggtgctaagggctcctcgggtccaactggcccgaagggtgaggcaggccacccaggacccccaggccccccgggccccccgggagaggtcatccagcccctgccaatccaggcatccaggacgcggcggaacatcgacgccagccagctgctggacgacgggaatggcgagaactacgtggactacgcggacggcatggaagagatcttcggctctctcaactctctgaagctggagattgagcagatgaaacggcccctgggcacgcagcagaaccccgcccgcacctgcaaggacctgcagctctgccaccccgacttcccagatggtgaatactgggtcgatcctaaccaaggatgctccagggattccttcaaggtttactgcaacttcacagccggggggtcgacatgcgtcttccctgacaagaagtccgaaggggccagaatcacttcttggcccaaagaaaacccgggctcctggttcagtgaattcaagcgtgggaaactgctctcctatgtggacgccgagggcaaccctgtgggtgtggtacagatgaccttcctgcggctgctgagcgcctctgcccaccagaacgtcacctaccactgctaccagtcagtggcctggcaggacgcagccacgggcagctacgacaaggccctccgcttcctgggctccaacgacgaggagatgtcctatgacaacaacccctacatccgcgccctggtggacggctgtgctaccaagaaaggctaccagaagacggttctggagatcgacacccccaaagtggagcaggtgcccatcgtggacatcatgttcaatgacttcggtgaagcgtcacagaaatttggatttgaagtggggccggcttgcttcatgggctaggagccgccgagcccgggctcccgagagcaacctcgtgacctcagcatgccattcgttcgtgagtgtcccgtgcacgtcctgaccctggacagtgaaggcttctccctcccctcccacctgacttcatctacgcctcggcaccacggggtgtgggaccccagcccggagagaacagagggaaggagccgcgcccccacctggagctgaatcacatgacctagctgcaccccagcgcctgggcccgccccacgctctgtccacacccacgcgccccgggagcggggccatgcctccagccccccagctcgcccgacccatcctgttcgtgaataggtctcaggggttgggggagggactgccagatttggacactatatttttttctaaattcaacttgaagatgtgtatttcccctgaccttcaaaaaatgttccaaggtaagcctcgtaaaggtcatcccaccatcaccaaagcctccgtttttaacaacctccaacacgatccatttagaggccaaatgtcattctgcaggtgccttcccgatggattaaaggtgcttatgtttttgtgagttttaagtaaatatttgtattgtattgttataaatgttaagtgtgcctggctttcaatcatgcacggaaacccagtctcagtcccacggacagaatgggcgaggcatggattctgggttgcagtaccgttctgattagaaataggaagtctccccacccccgccctggccaagaacgtgcaataaattggaagtttgccccggggcagcaagaatttatgctgccattgaaaagcaggtaccagtgccccttttcagacagtttttgattcgctctagactttttttttttttaatagggaaaaaatttgataattttcttttttctacatgcacttaagactaaaacacaggtttggattaattttatttgcttcctttttccgcttttcttcccgcagagcctgatgggagaatgtccagggcagggaaaccacattttttgtaggtgataactcaatgaaaattggtgcttattttttacacttctctcttgtggctctcttgtggtgctatctatctgttttaaggtctccttgaaggcgcactggggaccctggccatgcctcgttctccctgctttctttatcctgttattgcctccacagtctgttgccaaggactctaagatcaatgcacgtcactttcctttccactgggcaggatagccaagcacactccctcctgcgctctcccgccccggtgcgtccactcccgagggctgttatgaggactgggttgtgcctacttgatttgaaaacacacacaagcaataaaaagcctcttcctgcattgtctgtggtgtgaccatagcagattatatttggttcctg

SEQ ID NO: 7890 - protein, 1838 aa, Homo sapiens; identical to SEQ ID NO: 1144

SEQ ID NO: 7891 - DNA, 8174 bp, Homo sapiens
gggaaaaaagtgctccgcgccgaaggcgaggtccgcactctccgtccccgcggctggcgcaggacctcactcgagcggagcgcccacggggagcgggtcgcggggcggcggcggcgaggaggaggcgagaaggagttggaggaggaggaggaggaggcgagggcgagctagcccagcggggtcccggccgccccgcgggccaaagtcgagccctcccgcccgtgggcgagcgcgccagccgccccttccagaacagccgccgccacaaagaagaacggggggtgccgaggtccccatgacctcctaaagtggtgcggtccctgctgagtgcgctgcccgggccgtgacccgcgcccctgtgcgtccccgcgcgcctccgagcgcccctgtgcgccccggcccgcgccccgccggcatggacgtccatacccgctggaaagcgcgcagcgcgctccgcccgggcgccccgctgctgcccccgctgctgctgctgctgctgtgggcgccgcctccgagccgcgcagctcagccagcagatctcctgaaggttctagattttcacaacttgcctgatggaataacaaagacaacaggcttttgcgccacgcggcgatcttccaaaggcccggatgtcgcttacagagtcaccaaagacgcgcagctcagcgcacccaccaagcagctgtaccctgcgtctgcatttcccgaggacttctccatcctaacaactgtgaaagccaagaaaggcagccaggccttcctggtctccatctacaacgagcagggtatccagcagattgggctggagctgggccgctctcccgtcttcctctacgaggaccacacggggaagcctggcccggaagactaccccctcttccggggcatcaacctgtcagatggcaagtggcacagaattgctctcagcgtccacaagaaaaatgtcaccttgatcctcgactgtaaaaagaagaccaccaaattcctcgaccgcagcgaccaccccatgatcgacatcaatggcatcatcgtgtttggcacccggatcctggatgaggaggtgtttgagggtgacatccagcagctgctctttgtctcggaccaccgggcagcttatgattactgtgagcactacagccctgactgtgacaccgcagtacctgacaccccacagtcgcaggaccccaatccagatgaatattacacggaaggagacggcgagggtgagacctattactacgaatacccctactacgaagaccccgaagacctagggaaggagcccacccccagcaagaagcccgtggaagctgccaaagaaaccacagaggtccccgaggagctgaccccgacccccacggaagctgctcccatgcctgaaaccagtgaaggggctgggaaggaagaggacgtcggcatcggggactatgactacgtgcccagtgaggactactacacgccctcaccgtatgatgacctcacctatggcgagggggaggagaaccccgaccagcccacagacccaggcgctggggccgaaattcccaccagcaccgccgacacctccaactcctccaatccagctccgcctccaggggaaggtgcggatgacttggagggggagttcactgaggaaacgatccggaaccttgacgagaactactacgacccctactacgaccccaccagctccccgtcggagatcgggccgggaatgccggcgaaccaggataccatctatgaagggattggaggacctcggggcgagaaaggccaaaagggagaaccagcgattatcgagccgggcatgctcatcgagggcccgcctggcccagaaggccccgcgggtcttcccggacctccaggaaccatgggtcccactggccaagtcggggaccctggagaaaggggcccccctggacgcccaggccttcctggggccgatggcctgcccggtcctccaggaaccatgctcatgctgcccttccggtttggaggtggcggcgatgcgggctccaaaggccccatggtctcagcccaggagtcccaggcgcaagccattctccagcaggccaggttggcactgaggggaccagctggcccgatgggtctcacagggagacctggccctgtgggtccccctgggagcggaggtttgaagggcgagccgggagacgtggggcctcagggtcctcgaggtgtgcaaggcccgcctggtccggccgggaagcccggaagacggggtcgggctgggagtgatggagccagaggaatgcctggacaaactggccccaagggtgaccggggtttcgacggcctggctgggttgccaggcgagaagggccacaggggtgaccctggtccttccggcccaccaggacctccgggagacgatggagaaaggggtgacgacggagaagttgggcccagggggctgcctggggagcccgggccacgtggtctgcttgggccgaaggggcccccaggtcctcccggacctcccggtgtcacgggtatggacggccagccggggccaaaaggaaatgtgggtccccagggagagcctggccccccaggacagcagggtaatccaggcgcccagggtcttccaggcccccagggtgcaattggtcctccaggagaaaagggtcccttggggaaaccaggccttccaggaatgcccggtgctgacggacccccgggacaccctggcaaagaaggccctccaggagagaaaggaggtcagggtccacctggcccccagggtccgattggctacccaggtcctcgaggagtcaagggggccgatggcatccgtggtctgaagggcacaaagggcgagaagggtgaagacggctttcctgggtttaaaggagacatgggcatcaagggtgatcggggggagatcggcccacccggtcccaggggagaagatggccctgaaggcccaaagggtcgcggaggtcccaatggtgaccccggtcctctgggaccccctggggagaagggaaaactcggagtcccagggttaccagggtatccaggaagacaaggaccaaagggctctattggattccctggatttcctggcgccaatggagagaagggcggcagggggacccctggaaagccaggaccgcgggggcagcgaggcccaacgggtccgaggggtgaaagaggcccccggggcatcactgggaagcctggccccaagggcaactccggaggtgacggcccagctggccctcctggtgaacggggacccaatggaccccaaggacccacaggatttcctggaccaaagggcccccctggccctccaggcaaggatggactcccaggacaccctggacagagaggcgagactggtttccaaggcaagaccggccctccaggcccccccggcgtggtcggccctcagggtcccacgggagaaacgggcccaatgggtgagcgtggccaccctgggccccctggaccccccggtgaacaggggcttccgggccttgctggaaaagaagggacgaagggtgacccaggccctgcaggcctccctgggaaagatggccctccaggattacgtggtttccctggggaccgagggcttcctggtccagtgggagctcttggactgaaaggcaatgaagggccccctggcccaccaggccctgcgggatctccaggggagagaggtccagctggagccgctgggcccatcggaattccagggagacctgggccccagggacccccagggccggcaggagagaaaggggctcctggcgagaaaggcccacaaggcccagctggccgagacggtctccaggggcctgtggggctcccgggtccagctggccctgtgggtccccctggagaagacggagataagggagagatcggggagccggggcagaaaggaagcaagggggacaaaggagaacagggtcctcctgggcctacaggtcctcaaggccccatcggacagccaggcccctctggagctgacggcgagccggggcctcggggccagcagggccttttcgggcagaaaggtgatgaaggtcccagaggctttcctggaccccctgggccagtggggctgcagggtttgccaggacctccaggcgagaagggtgagacaggagacgtgggccagatgggccccccgggtccccctggcccccgaggaccctccggagctccaggtgctgatggcccacaaggtcccccaggtggaataggaaaccctggtgcagtgggagagaagggcgagcctggcgaagcaggtgagcctggccttccgggagaaggcggccccccgggacccaaaggagaaaggggagagaagggcgagtcaggcccttcaggtgctgccggaccccctggacccaaaggccctcccggagatgatggtcccaaaggcagccctggcccagtgggttttcctggagatcctggcccccccggagagcctggccccgcgggtcaagatggtccccctggtgacaaaggagatgatggtgaacccgggcagacgggatcccccggccctactggtgaaccaggtccatcggggcctccaggaaaaaggggtcccccaggccccgcaggccccgaaggcagacagggagagaaaggggccaagggagaagccggcttggaaggccctcctgggaagactggccccatcggcccccagggggcccctgggaagcccggaccggatggccttcgagggatccctggccctgtgggagaacaaggtctcccaggatccccaggcccggacggtccccccggccccatgggtcccccaggacttcccggcctcaaaggagattctggtcccaaaggtgaaaagggtcatccaggcctgatcgggctcatcggtcctccgggtgaacagggtgagaagggcgaccgtggtctccctggcccccagggctcctccggtcctaagggagaacagggtatcactggtccttctggcccgattgggcctcctgggccccctggcctgccgggtccgcctggtccaaaaggtgctaagggctcctcgggtccaactggcccgaagggtgaggcaggccacccaggacccccaggccccccgggccccccgggagaggtcatccagcccctgccaatccaggcatccaggacgcggcggaacatcgacgccagccagctgctggacgacgggaatggcgagaactacgtggactacgcggacggcatggaagagatcttcggctctctcaactctctgaagctggagattgagcagatgaaacggcccctgggcacgcagcagaaccccgcccgcacctgcaaggacctgcagctctgccaccccgacttcccagatggtgaatactgggtcgatcctaaccaaggatgctccagggattccttcaaggtttactgcaacttcacagccggggggtcgacatgcgtcttccctgacaagaagtccgaaggggccagaatcacttcttggcccaaagaaaacccgggctcctggttcagtgaattcaagcgtgggaaactgctctcctatgtggacgccgagggcaaccctgtgggtgtggtacagatgaccttcctgcggctgctgagcgcctctgcccaccagaacgtcacctaccactgctaccagtcagtggcctggcaggacgcagccacgggcagctacgacaaggccctccgcttcctgggctccaacgacgaggagatgtcctatgacaacaacccctacatccgcgccctggtggacggctgtgctaccaagaaaggctaccagaagacggttctggagatcgacacccccaaagtggagcaggtgcccatcgtggacatcatgttcaatgacttcggtgaagcgtcacagaaatttggatttgaagtggggccggcttgcttcatgggctaggagccgccgagcccgggctcccgagagcaacctcgtgacctcagcatgccattcgttcgtgagtgtcccgtgcacgtcctgaccctggacagtgaaggcttctccctcccctcccacctgacttcatctacgcctcggcaccacggggtgtgggaccccagcccggagagaacagagggaaggagccgcgcccccacctggagctgaatcacatgacctagctgcaccccagcgcctgggcccgccccacgctctgtccacacccacgcgccccgggagcggggccatgcctccagccccccagctcgcccgacccatcctgttcgtgaataggtctcaggggttgggggagggactgccagatttggacactatatttttttctaaattcaacttgaagatgtgtatttcccctgaccttcaaaaaatgttccaaggtaagcctcgtaaaggtcatcccaccatcaccaaagcctccgtttttaacaacctccaacacgatccatttagaggccaaatgtcattctgcaggtgccttcccgatggattaaaggtgcttatgtttttgtgagttttaagtaaatatttgtattgtattgttataaatgttaagtgtgcctggctttcaatcatgcacggaaacccagtctcagtcccacggacagaatgggcgaggcatggattctgggttgcagtaccgttctgattagaaataggaagtctccccacccccgccctggccaagaacgtgcaataaattggaagtttgccccggggcagcaagaatttatgctgccattgaaaagcaggtaccagtgccccttttcagacagtttttgattcgctctagactttttttttttttaatagggaaaaaatttgataattttcttttttctacatgcacttaagactaaaacacaggtttggattaattttatttgcttcctttttccgcttttcttcccgcagagcctgatgggagaatgtccagggcagggaaaccacattttttgtaggtgataactcaatgaaaattggtgcttattttttacacttctctcttgtggctctcttgtggtgctatctatctgttttaaggtctccttgaaggcgcactggggaccctggccatgcctcgttctccctgctttctttatcctgttattgcctccacagtctgttgccaaggactctaagatcaatgcacgtcactttcctttccactgggcaggatagccaagcacactccctcctgcgctctcccgccccggtgcgtccactcccgagggctgttatgaggactgggttgtgcctacttgatttgaaaacacacacaagcaataaaaagcctcttcctgcattgtctgtggtgtgaccatagcagattatatttggttcctgaatgtttgtggtgctaatttctgtgtttgttccaagccgttcagtcatgccatgcgctgcctcggtagatggagtaatgtacaatgaactccatgagtctctccagggctgcctgcagcacgtcttttccaagtagcctatttggattcccatctcaaatgtcctggatgcgagcgtcagcggctccagagctcggggcgggtgaggtcccctttggggaaccctttcctggccatcgaggtcggggggctgccgtctgtgggcaggaggacccgaggggcagccaggaaaggcgatctcttcactgtgaaaagttgcccgggtgcagcgccttttccttctaccatgggaaatgcaggctgggcccttggggtgagcctgcggggctctggtgctgtccccgacccccaccaccaccagaatgcagttccagcttaggaagccacaaacaagccacccaggaggaacaaaacaccgccagcgtggattttccaaatttccctggaaagtaagtctcgctcttgccaaagaaaagtctggcttggagagtctctggagcccaggatgccagcatgtgccaatgactgtcaccttcatctcttcaaaagaaaagccatagccgaggactgtcccgcgacccccgtggactgcgtctaggtcatgtgattctgttttcatttctcatcccatccaatttgtccttttctcctgtcattttcttcctctgtggtcccttcaaagttgttataatttgtactgaacttcaaaatgtgtcccgttctccccagaccactctagccacagtatattgcaataaaattacttcttatatttgcag

SEQ ID NO: 7892 - protein, 1838 aa, Homo sapiens; identical to SEQ ID NO: 1144

SEQ ID NO: 7893 - DNA, 8472 bp, Homo sapiens
gggaaaaaagtgctccgcgccgaaggcgaggtccgcactctccgtccccgcggctggcgcaggacctcactcgagcggagcgcccacggggagcgggtcgcggggcggcggcggcgaggaggaggcgagaaggagttggaggaggaggaggaggaggcgagggcgagctagcccagcggggtcccggccgccccgcgggccaaagtcgagccctcccgcccgtgggcgagcgcgccagccgccccttccagaacagccgccgccacaaagaagaacggggggtgccgaggtccccatgacctcctaaagtggtgcggtccctgctgagtgcgctgcccgggccgtgacccgcgcccctgtgcgtccccgcgcgcctccgagcgcccctgtgcgccccggcccgcgccccgccggcatggacgtccatacccgctggaaagcgcgcagcgcgctccgcccgggcgccccgctgctgcccccgctgctgctgctgctgctgtgggcgccgcctccgagccgcgcagctcagccagcagatctcctgaaggttctagattttcacaacttgcctgatggaataacaaagacaacaggcttttgcgccacgcggcgatcttccaaaggcccggatgtcgcttacagagtcaccaaagacgcgcagctcagcgcacccaccaagcagctgtaccctgcgtctgcatttcccgaggacttctccatcctaacaactgtgaaagccaagaaaggcagccaggccttcctggtctccatctacaacgagcagggtatccagcagattgggctggagctgggccgctctcccgtcttcctctacgaggaccacacggggaagcctggcccggaagactaccccctcttccggggcatcaacctgtcagatggcaagtggcacagaattgctctcagcgtccacaagaaaaatgtcaccttgatcctcgactgtaaaaagaagaccaccaaattcctcgaccgcagcgaccaccccatgatcgacatcaatggcatcatcgtgtttggcacccggatcctggatgaggaggtgtttgagggtgacatccagcagctgctctttgtctcggaccaccgggcagcttatgattactgtgagcactacagccctgactgtgacaccgcagtacctgacaccccacagtcgcaggaccccaatccagatgaatattacacggaaggagacggcgagggtgagacctattactacgaatacccctactacgaagaccccgaagacctagggaaggagcccacccccagcaagaagcccgtggaagctgccaaagaaaccacagaggtccccgaggagctgaccccgacccccacggaagctgctcccatgcctgaaaccagtgaaggggctgggaaggaagaggacgtcggcatcggggactatgactacgtgcccagtgaggactactacacgccctcaccgtatgatgacctcacctatggcgagggggaggagaaccccgaccagcccacagacccaggcgctggggccgaaattcccaccagcaccgccgacacctccaactcctccaatccagctccgcctccaggggaaggtgcggatgacttggagggggagttcactgaggaaacgatccggaaccttgacgagaactactacgacccctactacgaccccaccagctccccgtcggagatcgggccgggaatgccggcgaaccaggataccatctatgaagggattggaggacctcggggcgagaaaggccaaaagggagaaccagcgattatcgagccgggcatgctcatcgagggcccgcctggcccagaaggccccgcgggtcttcccggacctccaggaaccatgggtcccactggccaagtcggggaccctggagaaaggggcccccctggacgcccaggccttcctggggccgatggcctgcccggtcctccaggaaccatgctcatgctgcccttccggtttggaggtggcggcgatgcgggctccaaaggccccatggtctcagcccaggagtcccaggcgcaagccattctccagcaggccaggttggcactgaggggaccagctggcccgatgggtctcacagggagacctggccctgtgggtccccctgggagcggaggtttgaagggcgagccgggagacgtggggcctcagggtcctcgaggtgtgcaaggcccgcctggtccggccgggaagcccggaagacggggtcgggctgggagtgatggagccagaggaatgcctggacaaactggccccaagggtgaccggggtttcgacggcctggctgggttgccaggcgagaagggccacaggggtgaccctggtccttccggcccaccaggacctccgggagacgatggagaaaggggtgacgacggagaagttgggcccagggggctgcctggggagcccgggccacgtggtctgcttgggccgaaggggcccccaggtcctcccggacctcccggtgtcacgggtatggacggccagccggggccaaaaggaaatgtgggtccccagggagagcctggccccccaggacagcagggtaatccaggcgcccagggtcttccaggcccccagggtgcaattggtcctccaggagaaaagggtcccttggggaaaccaggccttccaggaatgcccggtgctgacggacccccgggacaccctggcaaagaaggccctccaggagagaaaggaggtcagggtccacctggcccccagggtccgattggctacccaggtcctcgaggagtcaagggggccgatggcatccgtggtctgaagggcacaaagggcgagaagggtgaagacggctttcctgggtttaaaggagacatgggcatcaagggtgatcggggggagatcggcccacccggtcccaggggagaagatggccctgaaggcccaaagggtcgcggaggtcccaatggtgaccccggtcctctgggaccccctggggagaagggaaaactcggagtcccagggttaccagggtatccaggaagacaaggaccaaagggctctattggattccctggatttcctggcgccaatggagagaagggcggcagggggacccctggaaagccaggaccgcgggggcagcgaggcccaacgggtccgaggggtgaaagaggcccccggggcatcactgggaagcctggccccaagggcaactccggaggtgacggcccagctggccctcctggtgaacggggacccaatggaccccaaggacccacaggatttcctggaccaaagggcccccctggccctccaggcaaggatggactcccaggacaccctggacagagaggcgagactggtttccaaggcaagaccggccctccaggcccccccggcgtggtcggccctcagggtcccacgggagaaacgggcccaatgggtgagcgtggccaccctgggccccctggaccccccggtgaacaggggcttccgggccttgctggaaaagaagggacgaagggtgacccaggccctgcaggcctccctgggaaagatggccctccaggattacgtggtttccctggggaccgagggcttcctggtccagtgggagctcttggactgaaaggcaatgaagggccccctggcccaccaggccctgcgggatctccaggggagagaggtccagctggagccgctgggcccatcggaattccagggagacctgggccccagggacccccagggccggcaggagagaaaggggctcctggcgagaaaggcccacaaggcccagctggccgagacggtctccaggggcctgtggggctcccgggtccagctggccctgtgggtccccctggagaagacggagataagggagagatcggggagccggggcagaaaggaagcaagggggacaaaggagaacagggtcctcctgggcctacaggtcctcaaggccccatcggacagccaggcccctctggagctgacggcgagccggggcctcggggccagcagggccttttcgggcagaaaggtgatgaaggtcccagaggctttcctggaccccctgggccagtggggctgcagggtttgccaggacctccaggcgagaagggtgagacaggagacgtgggccagatgggccccccgggtccccctggcccccgaggaccctccggagctccaggtgctgatggcccacaaggtcccccaggtggaataggaaaccctggtgcagtgggagagaagggcgagcctggcgaagcaggtgagcctggccttccgggagaaggcggccccccgggacccaaaggagaaaggggagagaagggcgagtcaggcccttcaggtgctgccggaccccctggacccaaaggccctcccggagatgatggtcccaaaggcagccctggcccagtgggttttcctggagatcctggcccccccggagagcctggccccgcgggtcaagatggtccccctggtgacaaaggagatgatggtgaacccgggcagacgggatcccccggccctactggtgaaccaggtccatcggggcctccaggaaaaaggggtcccccaggccccgcaggccccgaaggcagacagggagagaaaggggccaagggagaagccggcttggaaggccctcctgggaagactggccccatcggcccccagggggcccctgggaagcccggaccggatggccttcgagggatccctggccctgtgggagaacaaggtctcccaggatccccaggcccggacggtccccccggccccatgggtcccccaggacttcccggcctcaaaggagattctggtcccaaaggtgaaaagggtcatccaggcctgatcgggctcatcggtcctccgggtgaacagggtgagaagggcgaccgtggtctccctggcccccagggctcctccggtcctaagggagaacagggtatcactggtccttctggcccgattgggcctcctgggccccctggcctgccgggtccgcctggtccaaaaggtgctaagggctcctcgggtccaactggcccgaagggtgaggcaggccacccaggacccccaggccccccgggccccccgggagaggtcatccagcccctgccaatccaggcatccaggacgcggcggaacatcgacgccagccagctgctggacgacgggaatggcgagaactacgtggactacgcggacggcatggaagagatcttcggctctctcaactctctgaagctggagattgagcagatgaaacggcccctgggcacgcagcagaaccccgcccgcacctgcaaggacctgcagctctgccaccccgacttcccagatggtgaatactgggtcgatcctaaccaaggatgctccagggattccttcaaggtttactgcaacttcacagccggggggtcgacatgcgtcttccctgacaagaagtccgaaggggccagaatcacttcttggcccaaagaaaacccgggctcctggttcagtgaattcaagcgtgggaaactgctctcctatgtggacgccgagggcaaccctgtgggtgtggtacagatgaccttcctgcggctgctgagcgcctctgcccaccagaacgtcacctaccactgctaccagtcagtggcctggcaggacgcagccacgggcagctacgacaaggccctccgcttcctgggctccaacgacgaggagatgtcctatgacaacaacccctacatccgcgccctggtggacggctgtgctaccaagaaaggctaccagaagacggttctggagatcgacacccccaaagtggagcaggtgcccatcgtggacatcatgttcaatgacttcggtgaagcgtcacagaaatttggatttgaagtggggccggcttgcttcatgggctaggagccgccgagcccgggctcccgagagcaacctcgtgacctcagcatgccattcgttcgtgagtgtcccgtgcacgtcctgaccctggacagtgaaggcttctccctcccctcccacctgacttcatctacgcctcggcaccacggggtgtgggaccccagcccggagagaacagagggaaggagccgcgcccccacctggagctgaatcacatgacctagctgcaccccagcgcctgggcccgccccacgctctgtccacacccacgcgccccgggagcggggccatgcctccagccccccagctcgcccgacccatcctgttcgtgaataggtctcaggggttgggggagggactgccagatttggacactatatttttttctaaattcaacttgaagatgtgtatttcccctgaccttcaaaaaatgttccaaggtaagcctcgtaaaggtcatcccaccatcaccaaagcctccgtttttaacaacctccaacacgatccatttagaggccaaatgtcattctgcaggtgccttcccgatggattaaaggtgcttatgtttttgtgagttttaagtaaatatttgtattgtattgttataaatgttaagtgtgcctggctttcaatcatgcacggaaacccagtctcagtcccacggacagaatgggcgaggcatggattctgggttgcagtaccgttctgattagaaataggaagtctccccacccccgccctggccaagaacgtgcaataaattggaagtttgccccggggcagcaagaatttatgctgccattgaaaagcaggtaccagtgccccttttcagacagtttttgattcgctctagactttttttttttttaatagggaaaaaatttgataattttcttttttctacatgcacttaagactaaaacacaggtttggattaattttatttgcttcctttttccgcttttcttcccgcagagcctgatgggagaatgtccagggcagggaaaccacattttttgtaggtgataactcaatgaaaattggtgcttattttttacacttctctcttgtggctctcttgtggtgctatctatctgttttaaggtctccttgaaggcgcactggggaccctggccatgcctcgttctccctgctttctttatcctgttattgcctccacagtctgttgccaaggactctaagatcaatgcacgtcactttcctttccactgggcaggatagccaagcacactccctcctgcgctctcccgccccggtgcgtccactcccgagggctgttatgaggactgggttgtgcctacttgatttgaaaacacacacaagcaataaaaagcctcttcctgcattgtctgtggtgtgaccatagcagattatatttggttcctgaatgtttgtggtgctaatttctgtgtttgttccaagccgttcagtcatgccatgcgctgcctcggtagatggagtaatgtacaatgaactccatgagtctctccagggctgcctgcagcacgtcttttccaagtagcctatttggattcccatctcaaatgtcctggatgcgagcgtcagcggctccagagctcggggcgggtgaggtcccctttggggaaccctttcctggccatcgaggtcggggggctgccgtctgtgggcaggaggacccgaggggcagccaggaaaggcgatctcttcactgtgaaaagttgcccgggtgcagcgccttttccttctaccatgggaaatgcaggctgggcccttggggtgagcctgcggggctctggtgctgtccccgacccccaccaccaccagaatgcagttccagcttaggaagccacaaacaagccacccaggaggaacaaaacaccgccagcgtggattttccaaatttccctggaaagtaagtctcgctcttgccaaagaaaagtctggcttggagagtctctggagcccaggatgccagcatgtgccaatgactgtcaccttcatctcttcaaaagaaaagccatagccgaggactgtcccgcgacccccgtggactgcgtctaggtcatgtgattctgttttcatttctcatcccatccaatttgtccttttctcctgtcattttcttcctctgtggtcccttcaaagttgttataatttgtactgaacttcaaaatgtgtcccgttctccccagaccactctagccacagtatattgcaataaaattacttcttatatttgcagaaattcttttggtgtaattttattttttcctctcaatatatataattggacaaacgctggcaaaaagaaaaaaatggtaagcaaaaaacccaagataaagtttcgaggacatcaggccttttgaaatacaatgtcaaatgacacattgtacggtttcaaaaaatccgctagacatgtcataagttttaactgtaatgcccaggaaaggatatcttaaaatattctaaacttgtgtaacaaaggaataattaactgtaatagtttttcaataaatcgagttgggtgtttccaccgtaaa

SEQ ID NO: 7894 - protein, 1838 aa, Homo sapiens; identical to SEQ ID NO: 1144

SEQ ID NO: 7895 - DNA, 336 bp, Homo sapiens
agagaggcctcggggggattctggggcctggtaaagtttgggaactgctggtctacaccatgaggagaaacgctggacccggcctaagaagaggccctccctcctgtctgacaatgagccatgagaagaccatgggaaaaaaaagaggccaccagaaaccctattgccgaggtcctggcaaggaagaaaaggacagaagagctaatttccctacaagaacacgggtctaggaaacagaaaataaaggaagcttccatttcatgggcagagacatctcggcaaataggctgagcccatgtccccagagctctgagtaattaaattttgagaaaagtg

SEQ ID NO: 7896 - protein, 56 aa, Homo sapiens
MRRPWEKKEATRNPIAEVLARKKRTEELISLQEHGSRKQKIKEASISWAETSRQIG

SEQ ID NO: 7897 - DNA, 1336 bp, Homo sapiens
actcactcatctccaaagcaaagaccccactatccggcaggtcttagggagcagggagaccctgggggtgggggtgagcttccagagaaggggtttcccatgggtttggccatgagattctgctgttgttgatgttcttattatgggaaggctcagacacagcgcagcaaaggtcgtgttctgcctggggccacagggaccagcccacagccaaccccgttccagccagaggccagcccacgcccccgcacccggtgattttgaagccagtccctgacatcagctgcgttcttcgctcagccagcagatctcctgaaggttctagattttcacaacttgcctgatggaataacaaagacaacaggcttttgcgccacgcggcgatcttccaaaggcccggatgtcgcttacagagtcaccaaagacgcgcagctcagcgcacccaccaagcagctgtaccctggcccggagcgggaagcagcattagctctaagatacagcatccaagttgtccctgtcacccagtcgtggggcggcacctgccacagttaattaaaccctctgggcttatctggacgtgattaacgagctgttgatggagaacctcatcgccttgacccagccacttgctcatggcctggactaaaatgagctcctctttctgattcagatgagaaagggacgggggatgtagggcagcgtctgcatttcccgaggacttctccatcctaacaactgtgaaagccaagaaaggcagccaggccttcctggtctccatctacaacgagcagggtatccagcagattgggctggagctgggccgctctcccgtcttcctctacgaggaccacacggggaagcctggcccggaagactaccccctcttccggggcatcaacctgtcagatggcaagtggcacagaattgctctcagcgtccacaagaaaaatgtcaccttgatcctcgactgtaaaaagaagaccaccaaattcctcgaccgcagcgaccaccccatgatcgacatcaatggcatcatcgtgtttggcacccggatcctggatgaggaggtgtttgaggtcctcggtccaagacccgcatctacccagccctgctgtctccttagcatccactggtgctttctgtaggatccacctccgctgtctcaggccacctgtgtggcagcccagaccccaccctggcagtgctgaggcagcccctggcagcggaacaccagcaggtgaagggcagaggccccttgtcgtgtcttcagctctgcctgctttgctgagacctcctcttgcccctggaagggacaaggacattgcactctgcatga

SEQ ID NO: 7898 - protein, 102 aa, Homo sapiens
MASSCLAPGSWMRRCLRSSVQDPHLPSPAVSLASTGAFCRIHLRCLRPPVWQPRPHPGSAEAAPGSGTPAGEGQRPLVVSSALPALLRPPLAPGRDKDIALC

SEQ ID NO: 7899 - DNA, 424 bp, Homo sapiens
ctgatggaataacaaagacaacaggcttttgcgccacgcggcgatcttccaaaggcccggatgtcgcttacagagtcaccaaagacgcgcagctcagcgcacccaccatgcctccagccccccagctcgcccgacccatcctgttcgtgaataggtctcaggggttgggggagggactgccagatttggacactatatttttttctaaattcaacttgaagatgtgtatttcccctgaccttcaaaaaatgttccaaggtaagcctcgtaaaggtcatcccaccatcaccaaagcctccgtttttaacaacctccaacacgatccatttagaggccaaatgtcattctgcaggtgccttcccgatggattaaaggtgcttatgtttttgtgagttttaagtaaatatttgtattgtattgttat

SEQ ID NO: 7900 - protein, 94 aa, Homo sapiens [sequence omitted]

SEQ ID NO: 7901 - DNA, 1225 bp, Homo sapiens
ctgatggaataacaaagacaacaggcttttgcgccacgcggcgatcttccaaaggcccggatgtcgcttacagagtcaccaaagacgcgcagctcagcgcacccaccatgcctccagccccccagctcgcccgacccatcctgttcgtgaataggtctcaggggttgggggagggactgccagatttggacactatatttttttctaaattcaacttgaagatgtgtatttcccctgaccttcaaaaaatgttccaaggtaagcctcgtaaaggtcatcccaccatcaccaaagcctccgtttttaacaacctccaacacgatccatttagaggccaaatgtcattctgcaggtgccttcccgatggattaaaggtgcttatgtttttgtgagttttaagtaaatatttgtattgtattgttataaatgttaagtgtgcctggctttcaatcatgcacggaaacccagtctcagtcccacggacagaatgggcgaggcatggattctgggttgcagtaccgttctgattagaaataggaagtctccccacccccgccctggccaagaacgtgcaataaattggaagtttgccccggggcagcaagaatttatgctgccattgaaaagcaggtaccagtgccccttttcagacagtttttgattcgctctagactttttttttttttaatagggaaaaaatttgataattttcttttttctacatgcacttaagactaaaacacaggtttggattaattttatttgcttcctttttccgcttttcttcccgcagagcctgatgggagaatgtccagggcagggaaaccacattttttgtaggtgataactcaatgaaaattggtgcttattttttacacttctctcttgtggctctcttgtggtgctatctatctgttttaaggtctccttgaaggcgcactggggaccctggccatgcctcgttctccctgctttctttatcctgttattgcctccacagtctgttgccaaggactctaagatcaatgcacgtcactttcctttccactgggcaggatagccaagcacactccctcctgcgctctcccgccccggtgcgtccactcccgagggctgttatgaggactgggttgtgcctacttgatttgaaaacacacacaagcaataaaaagcctcttcctgcattgtctgtggtgtgaccatagcagattatatttggttcctg

SEQ ID NO: 7902 - protein, 94 aa, Homo sapiens [sequence omitted]

SEQ ID NO: 7903 - DNA, 2063 bp, Homo sapiens
ctgatggaataacaaagacaacaggcttttgcgccacgcggcgatcttccaaaggcccggatgtcgcttacagagtcaccaaagacgcgcagctcagcgcacccaccatgcctccagccccccagctcgcccgacccatcctgttcgtgaataggtctcaggggttgggggagggactgccagatttggacactatatttttttctaaattcaacttgaagatgtgtatttcccctgaccttcaaaaaatgttccaaggtaagcctcgtaaaggtcatcccaccatcaccaaagcctccgtttttaacaacctccaacacgatccatttagaggccaaatgtcattctgcaggtgccttcccgatggattaaaggtgcttatgtttttgtgagttttaagtaaatatttgtattgtattgttataaatgttaagtgtgcctggctttcaatcatgcacggaaacccagtctcagtcccacggacagaatgggcgaggcatggattctgggttgcagtaccgttctgattagaaataggaagtctccccacccccgccctggccaagaacgtgcaataaattggaagtttgccccggggcagcaagaatttatgctgccattgaaaagcaggtaccagtgccccttttcagacagtttttgattcgctctagactttttttttttttaatagggaaaaaatttgataattttcttttttctacatgcacttaagactaaaacacaggtttggattaattttatttgcttcctttttccgcttttcttcccgcagagcctgatgggagaatgtccagggcagggaaaccacattttttgtaggtgataactcaatgaaaattggtgcttattttttacacttctctcttgtggctctcttgtggtgctatctatctgttttaaggtctccttgaaggcgcactggggaccctggccatgcctcgttctccctgctttctttatcctgttattgcctccacagtctgttgccaaggactctaagatcaatgcacgtcactttcctttccactgggcaggatagccaagcacactccctcctgcgctctcccgccccggtgcgtccactcccgagggctgttatgaggactgggttgtgcctacttgatttgaaaacacacacaagcaataaaaagcctcttcctgcattgtctgtggtgtgaccatagcagattatatttggttcctgaatgtttgtggtgctaatttctgtgtttgttccaagccgttcagtcatgccatgcgctgcctcggtagatggagtaatgtacaatgaactccatgagtctctccagggctgcctgcagcacgtcttttccaagtagcctatttggattcccatctcaaatgtcctggatgcgagcgtcagcggctccagagctcggggcgggtgaggtcccctttggggaaccctttcctggccatcgaggtcggggggctgccgtctgtgggcaggaggacccgaggggcagccaggaaaggcgatctcttcactgtgaaaagttgcccgggtgcagcgccttttccttctaccatgggaaatgcaggctgggcccttggggtgagcctgcggggctctggtgctgtccccgacccccaccaccaccagaatgcagttccagcttaggaagccacaaacaagccacccaggaggaacaaaacaccgccagcgtggattttccaaatttccctggaaagtaagtctcgctcttgccaaagaaaagtctggcttggagagtctctggagcccaggatgccagcatgtgccaatgactgtcaccttcatctcttcaaaagaaaagccatagccgaggactgtcccgcgacccccgtggactgcgtctaggtcatgtgattctgttttcatttctcatcccatccaatttgtccttttctcctgtcattttcttcctctgtggtcccttcaaagttgttataatttgtactgaacttcaaaatgtgtcccgttctccccagaccactctagccacagtatattgcaataaaattacttcttatatttgcag

SEQ ID NO: 7904 - protein, 142 aa, Homo sapiens [sequence omitted]

SEQ ID NO: 7905 - DNA, 2360 bp, Homo sapiens
ctgatggaataacaaagacaacaggcttttgcgccacgcggcgatcttccaaaggcccggatgtcgcttacagagtcaccaaagacgcgcagctcagcgcacccaccatgcctccagccccccagctcgcccgacccatcctgttcgtgaataggtctcaggggttgggggagggactgccagatttggacactatatttttttctaaattcaacttgaagatgtgtatttcccctgaccttcaaaaaatgttccaaggtaagcctcgtaaaggtcatcccaccatcaccaaagcctccgtttttaacaacctccaacacgatccatttagaggccaaatgtcattctgcaggtgccttcccgatggattaaaggtgcttatgtttttgtgagttttaagtaaatatttgtattgtattgttataaatgttaagtgtgcctggctttcaatcatgcacggaaacccagtctcagtcccacggacagaatgggcgaggcatggattctgggttgcagtaccgttctgattagaaataggaagtctccccacccccgccctggccaagaacgtgcaataaattggaagtttgccccggggcagcaagaatttatgctgccattgaaaagcaggtaccagtgccccttttcagacagtttttgattcgctctagactttttttttttttaatagggaaaaaatttgataattttcttttttctacatgcacttaagactaaaacacaggtttggattaattttatttgcttcctttttccgcttttcttcccgcagagcctgatgggagaatgtccagggcagggaaaccacattttttgtaggtgataactcaatgaaaattggtgcttattttttacacttctctcttgtggctctcttgtggtgctatctatctgttttaaggtctccttgaaggcgcactggggaccctggccatgcctcgttctccctgctttctttatcctgttattgcctccacagtctgttgccaaggactctaagatcaatgcacgtcactttcctttccactgggcaggatagccaagcacactccctcctgcgctctcccgccccggtgcgtccactcccgagggctgttatgaggactgggttgtgcctacttgatttgaaaacacacacaagcaataaaaagcctcttcctgcattgtctgtggtgtgaccatagcagattatatttggttcctgaatgtttgtggtgctaatttctgtgtttgttccaagccgttcagtcatgccatgcgctgcctcggtagatggagtaatgtacaatgaactccatgagtctctccagggctgcctgcagcacgtcttttccaagtagcctatttggattcccatctcaaatgtcctggatgcgagcgtcagcggctccagagctcggggcgggtgaggtcccctttggggaaccctttcctggccatcgaggtcggggggctgccgtctgtgggcaggaggacccgaggggcagccaggaaaggcgatctcttcactgtgaaaagttgcccgggtgcagcgccttttccttctaccatgggaaatgcaggctgggcccttggggtgagcctgcggggctctggtgctgtccccgacccccaccaccaccagaatgcagttccagcttaggaagccacaaacaagccacccaggaggaacaaaacaccgccagcgtggattttccaaatttccctggaaagtaagtctcgctcttgccaaagaaaagtctggcttggagagtctctggagcccaggatgccagcatgtgccaatgactgtcaccttcatctcttcaaaagaaaagccatagccgaggactgtcccgcgacccccgtggactgcgtctaggtcatgtgattctgttttcatttctcatcccatccaatttgtccttttctcctgtcattttcttcctctgtggtcccttcaaagttgttataatttgtactgaacttcaaaatgtgtcccgttctccccagaccactctagccacagtatattgcaataaaattacttcttatatttgcagaaattcttttggtgtaattttattttttcctctcaatatatataattggacaaacgctggcaaaaagaaaaaaatggtaagcaaaaaacccaagataaagtttcgaggacatcaggccttttgaaatacaatgtcaaatgacacattgtacggtttcaaaaaatccgctagacatgtcataagttttaactgtaatgcccaggaaaggatatcttaaaatattctaaacttgtgtaacaaaggaataattaactgtaatagtttttcaataaatcgagttgggtgtttccaccgtaa

SEQ ID NO: 7906 - protein, 142 aa, Homo sapiens [sequence omitted]

SEQ ID NO: 7907 - DNA, 5653 bp, Homo sapiens
aaagtggctggtgccaaacaactagcagaggcgcaaaagtagcctccctgcgctgggagcccagagcaggaggcagagcccgcgggaagctcggagcactcaggacgccgcgcgcccttccccgccctccctgaccagggagcagctcgctccaggcgcccagccgaggcccccagcccagtgggagcaagtcatagagaacaattcgagagacagagagacggagcgcgctttcctgctcagtcctgaaaagtgagccgctcccgggtttgcaacctcaagcttcgcagcagcggcggcggcggctgccgggaaggaggcaggtgcaggtgcaggagggaggcggctctgggctccgcgcctgggtctcggccatggcctcggtcctggggagcggcagagggtctggagggctgagcagtcaactcaaatgcaagtccaagaggaggaggaggcggaggtccaagcggaaagataaagtaagcatattgtcaaccttcctcgctcctttcaagcacctgagtcctggcatcacaaacacggaggatgacgacaccctcagtaccagcagcgcggaggtgaaggagaaccgcaacgtgggcaacctggccgcgcggccaccgccctccggggaccgggcccggggcggcgcgcccggcgcgaagaggaagcggccgctggaggaggggaatgggggccacttgtgcaaactgcagctggtctggaagaagctgtcgtggtcggtggcgcccaagaacgcgctggtgcagctgcacgagctgaggccgggcctgcagtaccggacagtgtcgcagacgggcccggtgcatgccccggtcttcgcggtagcggtggaggtgaacgggctcacgttcgagggcacaggccccaccaagaagaaggccaagatgcgcgcggcggagctggcactcaggtccttcgtgcagttccccaacgcctgccaggcgcacctggccatgggcgggggcccgggccccggcacggacttcacctccgaccaggccgatttccccgacacgctcttccaggagttcgagcccccggcgccgcgccccggactcgcgggaggccgccccggggacgccgcgcttctgtccgcggcctacgggcgacggcggctgctgtgccgcgcgctggacctggtgggcccgacccccgccacccccgcggccccgggcgagcgcaaccccgtggtgctgctgaaccgcctgcgcgccgggctgcgctacgtgtgtctggcagaaccggccgagcggcgcgcgcggagcttcgtgatggccgtgagcgtggacggcaggacgttcgagggctcggggcgcagcaagaagctggcccggggtcaggccgcgcaggccgcactgcaggagctgttcgacatccagatgcccggccacgcgcccggcagggccaggaggacgccaatgccgcaggaattcgcagactccatatcccagctggtcacacagaagttccgcgaggtgacgacggacctcacgcccatgcacgcccgccataaagcgctggcaggaatcgtcatgaccaaaggcctggatgctcggcaggcgcaggtcgtggccctgtcctcggggaccaagtgcatcagcggcgagcacctcagtgaccaggggctggtggtgaatgactgccacgcggaggtcgtggcccggcgggcgttcctgcacttcctctacacgcagctggagctgcacctgagcaagcggcgcgaggactcagagcgatcgatattcgtgcggttaaaagaaggtggctaccggctgcgagagaacatcctcttccatctctacgtgagcacctccccctgtggagacgcaagactccactctccctacgagatcaccacagacctgcacagcagcaaacacctcgtcaggaagttccgcgggcacctgcgcaccaagatcgagtccggggaagggacggtccccgtgcgtggccccagcgcagtgcagacctgggacggcgtcctgctgggggagcagctgatcaccatgtcctgcacggacaagatcgccaggtggaacgtcctggggctgcagggcgcgctcctgtcccacttcgtggagcccgtgtacctgcagagcatcgtggtgggcagcctgcaccacacgggccacctcgcacgcgtcatgagccaccgcatggagggtgtcggccagctgcccgcctcctaccggcacaaccggcctctcctcagcggcgtgagtgacgccgaggcgcgccagccggggaagtcgccccccttcagcatgaactgggtcgtgggcagcgcggacctggagattatcaacgccaccactgggcggaggagctgtgggggcccatcccggctctgcaagcacgtgctgtctgcacggtgggcgcggctgtatggcaggctgagcacacggacacccagccctggagacacgccctccatgtactgtgaggccaagctgggggcgcacacctaccagtctgtgaaacagcagctgttcaaggcctttcagaaggctggcctgggcacctgggtgaggaaaccaccggagcagcagcagtttctactgactctctaggctgcgggctcctggctgctggagctgagcgggacgctggagggatgggaccgtgtctggggggcgacgtggcgggtcggccggttccctgcattcgttttactttggtgtcccagaaacacgcgagtgtgcaatgtttggacgagcaacaacacaaattcagaacgtgcctctttccagatcgctggccccagaaccctgtcccccacacccaggggcacatgcactgttgagttagcgccgactcttcctgtggagtctgagggaggggctccattcaggcaaaggggttttagctgcagccttggaaggaggcaccgacacgacaccaggcaggagtgagcctcaggccccgtccctgcaccccacccctgcgtgcgcctcttggtgatgctggggtctcactagcttgagggggcacatgaagataagccacaaatgaagagaaaagccatgcccaccccagccccagagaaaccaataagaatcctctattattttcactattcatttaggtttttatactccacctcctttcaaaaaagatttaagatgtacgacattaccgaacacctaaaatagaaccagagaaacgaaagccattcccacaaagtgaaggaacagtttccaaaacccctgcgaggcagagttaagacctgtgacgtggggagcctggaaacacccggcccacgcgtgctgcagatgtggggagcctggaaacacccggcccacgcgtgctgcagatgtggggagcctggaaacacccggcccacgcgtgctgcagatgtggggagtctggaaacacccggcccacgcgtgctgcagatgtggggagcccggaaacacctggcccatgcctgttcagtccgtcatggcgtttggtttatggtggccgatactaagagccactgaggtctgggttgtgtaagggttagctaccaccctataacctccctaccaggtaataaggagaccaagtctttgatcaaattctgattttttaactaaattttcattagaaagcaagcacaaaataaaatcaaaacaacctttaccttcagcttgagaggctaccagctctctattctttcagattctccaatcaacaccttgcaggacaagaccccaaaaaagttcagctgtcaaaaaatgtaagaggcaggattctgtgaccctcagagcaggcttccaacaccagagaccttcagctcacagtggagatgggacatgggggctttagcccacagcatcatccctgagagccaaggcgctgtattcatacggggtcaggctcttttccaagtatctttacgtaatccatgtacctcgagctgctgtcatctcacctccgagaactcatttctaacattcatcatgctagatagccagtctctcatttctccaacttaaaaaatccatctctgaaattcatgacagtgatggcagacggcaaagcatggtggtgtccacctctggggtgtgggcttcccggaaagaatcccagctgaccaccccagaaagtgcaagaataacattgtgctgtacatagtcaagtgctataaattacagttatcataatgagaaggcagaaatgaaactgagttgtagctatttgttacaagataataagaagtagagatattagtatggaaaaagaaacttttcctgggatttaaaatcaggccaaatttatcactcgagttcttttagaaaagaaaacaggtactggagtagacaacttcttccagataaagtttcaaaagatacgagaacattttttcaaataaaggactcacattaatcttttataaaaatcacaaaaataaatgaaatcttaattcagtgcaaaagctaagctcaaacgaccagtttctattaagttctggtaacttgacatcactaggatgaagcttagagaacttagagtcgagaggtgatgggtggctcagacattcgcagcagtcagaagtgagcgctcccctgaatgcgtgggagcacggccagctcctggctgaagtctcccacccaggcctcaaatcaccttcatctgagatgttggctagagaagcatataatgctttgtcccagtgggctccaaatcacgctgtttctgcagcgagggggcctgtgttgtaagcagatttcactgtcacagggaagacgcagggtctgattcacgggactcggaaagcgctcggccacccagtggccagcatcatgaagccacagctggggggttgggattcgttttgtctcaggcattgaccttccagaaacaactcagactttactgaaatatcaacatccacatctggagaaagccacacattaattccatgctacccattagtacaagtgtatggattcgtgtattaagtccacaggagactccatggaaggagagattaaagctcttcagagaaggccgatagcgacagaagagtttccaatgcagccagagtgaggttgaggtgccggagcctttccgtggagggatctgtcagaggggatgtgggctgcagaggggaccccacgtaaggaaaggagggtcccaggccctgggtagtgaaaggagaaggtagtcgaggcagtcaagggtgaccctacacgcaggaggcacgccacaccagatcacgccacacgcaggctgctcccaactggcagggcctgacccagccaggaagggccaggtcctaggattccacagtgccaggagtgcccgaaggggccaggtcccaggattcccacagccccaggtgtgcctggaagacccgggtcccaggattcccacagccccagctatgcttgggggggccgagtcccaggattcccacagccccaggtgtgcctggaagacccgggtcccaggattcccacagccccaagagttcccggaagagctgggtcccaggattcccacagccccagctatgcttgggggggccgggtcccaggattcccacagccccaggtgtgcctggaagacccaggtcccaggattcccacagccctggatgtgcctggaggggctgtgccacctctgcagagatggaagggct

SEQ ID NO: 7908 - protein, 739 aa, Homo sapiens; identical to SEQ ID NO: 1146

SEQ ID NO: 7909 - DNA, 412 bp, Homo sapiens
gtcgtccaagctgatggactgaggggggtcattccagtggacacgggggagctgagctgtgagggtcctggattgcgtggggccatgtctgacctgcagatgctgcagagtttgggtcgagttacacgtggaattggggaatccccactgaagggcgctctctggccttttagtggccacggtttgcaatttcttgagccagggtcaccctgaacattcatttcaagaaacaggagatgcccaaggacagggcttcatgcctcacacaactttctgattaaaaggcaatcaattaaaataaatcccttcgtttctagggaagccccatcacacaggcatcatctgggcttgcgttctgacatcaggggaagctgtgaaatcacacagcaataaataataaaggcttgagatt

SEQ ID NO: 7910 - protein, 42 aa, Homo sapiens
MSDLQMLQSLGRVTRGIGESPLKGALWPFSGHGLQFLEPGSP

SEQ ID NO: 7911 - DNA, 559 bp, Homo sapiens
gaaactgaaggatagatctctagaaccctgaagttcctgtgttctcattaacaattctatgacctactttagttttgaatgtaattccacagcagatggctggaacgtggtctgggggattaagcgagccttttcagattaatgccaagaaaatatatgcagaagagacacccatgtcattgaacaagaggttctaatattacataacagggtagtggtatgtagctgtagtggtatgtgctctctctcaatgctgagctgcagctcccagtcagccactggatcatgagggtaaaatacggatacttgacatcttcttaaagaacatcatgcctgctaagccatccagtttggatgccccagtgccttccaccagccattctcaagcctcattagaagagagagattgatgaccctgtagctgcagcatcccatcatcctgcattttagttcaatgcttcaaacgttcttcaggcccagtgtgctttcagctgtgtatgttaatggagaaaatcagcttcctgtttggatacccactagacatttgaagttctacaat

SEQ ID NO: 7912 - protein, 34 aa, Homo sapiens
MLQTFFRPSVLSAVYVNGENQLPVWIPTRHLKFY

SEQ ID NO: 7913 - DNA, 2214 bp, Homo sapiens
tttgagccactgcatcccctagcggcgcccgggtggctgcagccgctggcccgaaaatgctgctcgggcgagcaggggtcaggcgggaaaagaagactccaaatccactctctgctcgcccccagggcaatgctgccaggagagggagtgggttcccccgcaggctatcccaccgatggggctgagagcttaatttggggttttatttgaattggagacattgttccctcttcgctcctctaccccataaaattccctacaaatgcaaaaattcgagatagaagaagccgtccctgaaagtaagttctgaaggattcctttcatgcggtgaaggaacaacaacaatattcaacttcaccttggtgtgtgagggtcgtcgtgttttaaaacactatccctgtagaaagattagtgaaatgtattggaagaagtagtggaaacgtgaatcttcctggtctcgcgtttggatcttctttggagtcctcaccttcttaaatctgatgtttgtttgaaatcagggctgaatttccatatataggacagaaagaaagaaccccaattttttaaagaaagctccccccccccccgccacgtttctcctgagcccacttggtctcccgttattaggcggcccagttaagaggcatcgattttcctttcattctctgaccactcgtctctcctgggccagccaggctgcccgcatcttctcctgctcacagcgctctctaaaccttttaattatttagttgctgtctaacattcaccggaaacctctccataaacaaggagaaacgaatgcacacgcatttttgctaagaagcccgggattaagatttaaggatacaagctgaaagaaaaaatgaaaaatgcttctccgcgcgtcaatcgaggggtggatgcgccacgcagcgtgagcccagctcacagccacgcgtaagaccaaaagctgccatgggttctgcgcgcggagacctcagagccgaagagagaagtccccgcgtcagaaacgctgcggatgccaggtcttgaaaatgctgacttctgaggctaagaattatttcaaagacaaaaagaaaagactggagcagccggcggagctcgggtggaggaaagcgaggaggcgaccaggaggatgccgccgccgccgccgcagggcccggggcttctgcagggcgcaaggcctccctcaccagggtaaggggctggcgatcaacctggacgcctgggaccttgggagcaagcatcccgcagccgagcaggcgacggcgcggccaccgcctagagaggagccggggcccggggcggcgtgcgggtcggcagcagccggcttggcctatccgaaaccccaggcctggaagcggctgctttaggcgtcaagttgagcggggtatgtgtgtcctcttgggaaaaaggtgagaaatggagccggactttctccactcggtaggggttaagctaccacacacacccccaaacacatgcccacgtgcaagtccctcccacccgccctcccaggggcgaagagaccctgtcccagtggaagtggggaaacccagtcgggtacagaaagcagaggccatggcgcagagcggaggcgcggctttctggggctcagccctagggctacagacccagggcgcggagatgctcgcggccgggccacccaccagagccaggcaaccggcgcttccaggcgagctccgcggggccgaggtgccgggagaagcggccccgggcgcccgcgcgctgcccgacctgggtaacaggcaaagcggagccccggggtcgaagtcctaaagttactaatcccgcggagggggagagagcgtgcctcgggccgcccggggcggtcatttgagcgtgtttacttaaagactttgcaagcagagcgcgcgcgaaatcgtcggatttccagcgaggcagcaaatatttgcaggcagaagaaagaagcggagccgagccgagccgccgagtccctccccccggagccccggagccccggcgcctgcctgggcggtcccggccgcgcagacagaaaagaagccgggaatctgcggggctggggggcggggagcgacaccaaaggccagaaactgcagcacggcccgaggccctggcgagctgggcctgggggaggagaagtcccttcccattccagctcgatcaatcttgctgggctgcgatcggtcaataaaaacggtgtgaagcggc

SEQ ID NO: 7914 - protein, 112 aa, Homo sapiens
MLTSEAKNYFKDKKKRLEQPAELGWRKARRRPGGCRRRRRRARGFCRAQGLPHQGKGLAINLDAWDLGSKHPAAEQATARPPPREEPGPGAACGSAAAGLAYPKPQAWKRLL

SEQ ID NO: 7915 - DNA, 1411 bp, Homo sapiens
cacacataccccgctcaacttgacgcctaaagcagccgcttccaggcctggggtttcggataggccaagccggctgctgccgacccgcacgccgccccgggccccggctcctctctaggcggtggccgcgccgtcgcctgctcggctgcgggatgcttgctcccaaggtcccaggcgtccaggttgatcgccagccccttaccctggtgagggaggccttgcgccctgcagaagccccgggccctgcggcggcggcggcggcatcctcctggtcgcctcctcgctttcctccacccgagctccgccggctgctccttgggaggaaggggactcgctagaccaggccgaggcccagcctcagaagtcagcattttcaagacctggcatccgcagcgtttctgacgcggggacttctctcttcggctctgaggtctccgcgcgcagaacccatggcagcttttggtcttacgcgtggctgtgagctgggctcacgctgcgtggcgcatccacccctcgattgacgcgcggagaagcatttttcattttttctttcagcttgtatccttaaatcttaatcccgggcttcttagcaaaaatgcgtgtgcattcgtttctccttgtttatggagaggtttccggtgaatgttagacagcaactaaataattaaaaggtttagagagcgctgtgagcaggagaagatgcgggcagcctggctggcccaggagagacgagtggtcagagaatgaaaggaaaatcgatgcctcttaactgggccgcctaataacgggagaccaagtgggctcaggagaaacgtggcggggggggggggagctttctttaaaaaattggggttctttctttctgtcctatatatggaaattcagccctgatttcaaacaaacatcagatttaagaaggtgaggactccaaagaagatccaaacgcgagaccaggaagattcacgtttccactacttcttccaatacatttcactaatctttctacagggatagtgttttaaaacacgacgaccctcacacaccaaggtgaagttgaatattgttgttgttccttcaccgcatgaaaggaatccttcagaacttactttcagggacggcttcttctatctcgaatttttgcatttgtagggaattttatggggtagaggagcgaagagggaacaatgtctccaattcaaataaaaccccaaattaagctctcagccccatcggtgggatagcctgcgggggaacccactccctctcctggcagcattgccctgggggcgagcagagagtggatttggagtcttcttttcccgcctgacccctgctcgcccgagcagcattttcgggccagcggctgcagccacccgggcgccgctaggggatgcagtggctcaaaggaccg

SEQ ID NO: 7916 - protein, 61 aa, Homo sapiens
MLAPKVPGVQVDRQPLTLVREALRPAEAPGPAAAAAASSWSPPRFPPPELRRLLLGRKGTR

SEQ ID NO: 7917 - DNA, 402 bp, Homo sapiens
ctcctcgctttcctccacccgagctccgccggctgctccttgggaggaaggggactcgctagaccaggccgaggcccagcctcagaagtcagcattttcaagacctggcatccgcagcgtttctgacgcggggacttctctcttcggctctgaggtctccgcgcgcagaacccatggcagcttttggtcttacgcgtggctgtgagctgggctcacgctgcgtggcgcatccacccctcgattgacgcgcggagaagcatttttcattttttctttcagcttccctgatttcaaacaaacatcagatttaagaaggtgaggactccaaagaagatccaaacgcgagaccaggaagattcacgtttccactacttcttccaatacatttcactaatctttcta

SEQ ID NO: 7918 - protein, 67 aa, Homo sapiens
SSLSSTRAPPAAPWEEGDSLDQAEAQPQKSAFSRPGIRSVSDAGTSLFGSEVSARRTHGSFWSYAWL

SEQ ID NO: 7919 - DNA, 1110 bp, Homo sapiens
gcctcaaaccacccagaccaagaagggccttcgagatcttttatttttctaaagcctcagaagtcagcattttcaagacctggcatccgcagcgtttctgacgcggggacttctctcttcggctctgaggtctccgcgcgcagaacccatggcagcttttggtcttacgcgtggctgtgagctgggctcacgctgcgtggcgcatccacccctcgattgacgcgcggagaagcatttttcattttttctttcagcttgtatccttaaatcttaatcccgggcttcttagcaaaaatgcgtgtgcattcgtttctccttgtttatggagaggtttccggtgaatgttagacagcaactaaataattaaaaggtttagagagcgctgtgagcaggagaagatgcgggcagcctggctggcccaggagagacgagtggtcagagaatgaaaggaaaatcgatgcctcttaactgggccgcctaataacgggagaccaagtgggctcaggagaaacgtggcggggggggggggagctttctttaaaaaattggggttctttctttctgtcctatatatggaaattcagccctgatttcaaacaaacatcagatttaagaaggtgaggactccaaagaagatccaaacgcgagaccaggaagattcacgtttccactacttcttccaatacatttcactaatctttctacagggatagtgttttaaaacacgacgaccctcacacaccaaggtgaagttgaatattgttgttgttccttcaccgcatgaaaggaatccttcagaacttactttcagggacggcttcttctatctcgaatttttgcatttgtagggaattttatggggtagaggagcgaagagggaacaatgtctccaattcaaataaaaccccaaattaagctctcagccccatcggtgggatagcctgcgggggaacccactccctctcctggcagcattgccctgggggcgagcagagagtggatttggagtcttcttttcccgcctgacccctgctcgcccgagcagcattttcgggccagcggctgcagccacccgggcgccgctaggggatgcagtggctcaaaggaccg

SEQ ID NO: 7920 - protein, 44 aa, Homo sapiens
MKGILQNLLSGTASSISNFCICREFYGVEERRGNNVSNSNKTPN

SEQ ID NO: 7921 - DNA, 731 bp, Homo sapiens
ctcgggcgagcaggggtcaggcgggaaaagaagactccaaatccactctctgctcgcccccagggcaatgctgccaggagagggagtgggttcccccgcaggctatcccaccgatggggctgagagcttaatttggggttttatttgaattggagacattgttccctcttcgctcctctaccccataaaattccctacaaatgcaaaaattcgagatagaagaagccgtccctgaaattgctgtctaacattcaccggaaacctctccataaacaaggagaaacgaatgcacacgcatttttgctaagaagcccgggattaagatttaaggatacaagctgaaagaaaaaatgaaaaatgcttctccgcgcgtcaatcgaggggtggatgcgccacgcagcgtgagcccagctcacagccacgcgtaagaccaaaagctgccatgggttctgcgcgcggagacctcagagccgaagagagaagtccccgcgtcagaaacgctgcggatgccaggtcttgaaaatgctgacttctgaggctaagaattatttcaaagacaaaaagaaaagactggtgaggaggccttccggtgcaagggcgcctatccgctaattttggatggggaagtagggattattcgtttaaattcaatcgcgagcaccaagtcggactggccggggatggagaagggcaacccccacctttagaaaaataaaagatctcgaaggccc

SEQ ID NO: 7922 - protein, 40 aa, Homo sapiens
KKPSLKLLSNIHRKPLHKQGETNAHAFLLRSPGLRFKDTS

SEQ ID NO: 7923 - DNA, 820 bp, Homo sapiens
gctgcagccgctggcccgaaaatgctgctcgggcgagcaggggtcaggcgggaaaagaagactccaaatccactctctgctcgcccccagggcaatgctgccaggagagggagtgggttcccccgcaggctatcccaccgatggggctgagagcttaatttggggttttatttgaattggagacattgttccctcttcgctcctctaccccataaaattccctacaaatgcaaaaattcgagatagaagaagccgtccctgaaagtaagttctgaaggattcctttcatgcggtgaaggaacaacaacaatattcaacttcaccttgttgctgtctaacattcaccggaaacctctccataaacaaggagaaacgaatgcacacgcatttttgctaagaagcccgggattaagatttaaggatacaagctgaaagaaaaaatgaaaaatgcttctccgcgcgtcaatcgaggggtggatgcgccacgcagcgtgagcccagctcacagccacgcgtaagaccaaaagctgccatgggttctgcgcgcggagacctcagagccgaagagagaagtccccgcgtcagaaacgctgcggatgccaggtcttgaaaatgctgacttctgaggctaagaattatttcaaagacaaaaagaaaagactggtgaggaggccttccggtgcaagggcgcctatccgctaattttggatggggaagtagggattattcgtttaaattcaatcgcgagcaccaagtcggactggccggggatggagaagggcaacccccacctttagaaaaataaaagatctcgaaggcc

SEQ ID NO: 7924 - protein, 42 aa, Homo sapiens
MLLGRAGVRREKKTPNPLSARPQGNAARRGSGFPRRLSHRWG

SEQ ID NO: 7925 - DNA, 470 bp, Homo sapiens
atccgtgtcaaggcaggctctgagtaggggaatcagggcagaattcggtctggctggactcagaaagccccacactttttctgcccgatgttttacccctgtttcttctttaggaacaaacttagagctggaaagtgttcgatcttttttcctcaaactacacaggcctggtcttctttttttacatttcagaactctcctgaacttctccagggaatgcattctttctgaaagtatcaagacggcgccaggcagctcagtgttcgcagacagctgtggcgcgacgcaacttaaggaggttctagtgtcatccgcgccgggggggaggagcctggcgctggcgagtaggggacaggatccccggcacaaggaaactgcaacccaaacccgctccaggacttctccccccgccccgcgcacccccgcccctcctcccgcccctccactgaccggaaaggggcgccgcagag

SEQ ID NO: 7926 - protein, 47 aa, Homo sapiens [sequence omitted]

SEQ ID NO: 7927 - DNA, 2815 bp, Homo sapiens
acctccttaagttgcgtcgcgccacagctgtctgcgaacactgagctgcctggcgccgtcttgatactttcagaaagaatgcattccctgtaaaaaaaaaaaaaaaatactgagagagggagagagagagagaagaagagagagagacggagggagagcgagacagagcgagcaacgcaatctgaccgagcaggtcgtacgccgccgcctcctcctcctctctgctcttcgctacccaggtgacccgaggagggactccgcctccgagcggctgaggaccccggtgcagaggagcctggctcgcagaattgcagagtcgtcgcccctttttacaacctggtcccgttttattctgccgtacccagtttttggatttttgtcttccccttcttctctttgctaaacgacccctccaagataatttttaaaaaaccttctcctttgctcacctttgcttcccagccttcccatccccccaccgaaagcaaatcattcaacgacccccgaccctccgacggcaggagccccccgacctcccaggcggaccgccctccctccccgcgcgcgggttccgggcccggcgagagggcgcgagcacagccgaggccatggaggtgacggcggaccagccgcgctgggtgagccaccaccaccccgccgtgctcaacgggcagcacccggacacgcaccacccgggcctcagccactcctacatggacgcggcgcagtacccgctgccggaggaggtggatgtgctttttaacatcgacggtcaaggcaaccacgtcccgccctactacggaaactcggtcagggccacggtgcagaggtaccctccgacccaccacgggagccaggtgtgccgcccgcctctgcttcatggatccctaccctggctggacggcggcaaagccctgggcagccaccacaccgcctccccctggaatctcagccccttctccaagacgtccatccaccacggctccccggggcccctctccgtctaccccccggcctcgtcctcctccttgtcggggggccacgccagcccgcacctcttcaccttcccgcccaccccgccgaaggacgtctccccggacccatcgctgtccaccccaggctcggccggctcggcccggcaggacgagaaagagtgcctcaagtaccaggtgcccctgcccgacagcatgaagctggagtcgtcccactcccgtggcagcatgaccgccctgggtggagcctcctcgtcgacccaccaccccatcaccacctacccgccctacgtgcccgagtacagctccggactcttcccccccagcagcctgctgggcggctcccccaccggcttcggatgcaagtccaggcccaaggcccggtccagcacagaaggcagggagtgtgtgaactgtggggcaacctcgaccccactgtggcggcgagatggcacgggacactacctgtgcaacgcctgcgggctctatcacaaaatgaacggacagaaccggcccctcattaagcccaagcgaaggctgtctgcagccaggagagcagggacgtcctgtgcgaactgtcagaccaccacaaccacactctggaggaggaatgccaatggggaccctgtctgcaatgcctgtgggctctactacaagcttcacaatattaacagacccctgactatgaagaaggaaggcatccagaccagaaaccgaaaaatgtctagcaaatccaaaaagtgcaaaaaagtgcatgactcactggaggacttccccaagaacagctcgtttaacccggccgccctctccagacacatgtcctccctgagccacatctcgcccttcagccactccagccacatgctgaccacgcccacgccgatgcacccgccatccagcctgtcctttggaccacaccacccctccagcatggtcaccgccatgggttagagccctgctcgatgctcacagggcccccagcgagagtccctgcagtccctttcgacttgcatttttgcaggagcagtatcatgaagcctaaacgcgatggatatatgtttttgaaggcagaaagcaaaattatgtttgccactttgcaaaggagctcactgtggtgtctgtgttccaaccactgaatctggaccccatctgtgaataagccattctgactcatatcccctatttaacagggtctctagtgctgtgaaaaaaaaaatgctgaacattgcatataacttatattgtaagaaatactgtacaatgactttattgcatctgggtagctgtaaggcatgaaggatgccaagaagtttaaggaatatgggagaaatagtgtggaaattaagaagaaactaggtctgatattcaaatggacaaactgccagttttgtttcctttcactggccacagttgtttgatgcattaaaagaaaataaaaaaaagaaaaaagagaaaagaaaaaaaaagaaaaaagttgtaggcgaatcatttgttcaaagctgttggcctctgcaaaggaaataccagttctgggcaatcagtgttaccgttcaccagttgccgttgagggtttcagagagcctttttctaggcctacatgctttgtgaacaagtccctgtaattgttgtttgtatgtataattcaaagcaccaaaataagaaaagatgtagatttatttcatcatattatacagaccgaactgttgtataaatttatttactgctagtcttaagaactgctttctttcgtttgtttgtttcaatattttccttctctctcaatttttggttgaataaactagattacattcagttggcctaag

SEQ ID NO: 7928 - protein, 444 aa, Homo sapiens; identical to SEQ ID NO: 1150

SEQ ID NO: 7929 - DNA, 3217 bp, Homo sapiens
acctccttaagttgcgtcgcgccacagctgtctgcgaacactgagctgcctggcgccgtcttgatactttcagaaagaatgcattccctgtaaaaaaaaaaaaaaaatactgagagagggagagagagagagaagaagagagagagacggagggagagcgagacagagcgagcaacgcaatctgaccgagcaggtcgtacgccgccgcctcctcctcctctctgctcttcgctacccaggtgacccgaggagggactccgcctccgagcggctgaggaccccggtgcagaggagcctggctcgcagaattgcagagtcgtcgcccctttttacaacctggtcccgttttattctgccgtacccagtttttggatttttgtcttccccttcttctctttgctaaacgacccctccaagataatttttaaaaaaccttctcctttgctcacctttgcttcccagccttcccatccccccaccgaaagcaaatcattcaacgacccccgaccctccgacggcaggagccccccgacctcccaggcggaccgccctccctccccgcgcgcgggttccgggcccggcgagagggcgcgagcacagccgaggccatggaggtgacggcggaccagccgcgctgggtgagccaccaccaccccgccgtgctcaacgggcagcacccggacacgcaccacccgggcctcagccactcctacatggacgcggcgcagtacccgctgccggaggaggtggatgtgctttttaacatcgacggtcaaggcaaccacgtcccgccctactacggaaactcggtcagggccacggtgcagaggtaccctccgacccaccacgggagccaggtgtgccgcccgcctctgcttcatggatccctaccctggctggacggcggcaaagccctgggcagccaccacaccgcctccccctggaatctcagccccttctccaagacgtccatccaccacggctccccggggcccctctccgtctaccccccggcctcgtcctcctccttgtcggggggccacgccagcccgcacctcttcaccttcccgcccaccccgccgaaggacgtctccccggacccatcgctgtccaccccaggctcggccggctcggcccggcaggacgagaaagagtgcctcaagtaccaggtgcccctgcccgacagcatgaagctggagtcgtcccactcccgtggcagcatgaccgccctgggtggagcctcctcgtcgacccaccaccccatcaccacctacccgccctacgtgcccgagtacagctccggactcttcccccccagcagcctgctgggcggctcccccaccggcttcggatgcaagtccaggcccaaggcccggtccagcacagaaggcagggagtgtgtgaactgtggggcaacctcgaccccactgtggcggcgagatggcacgggacactacctgtgcaacgcctgcgggctctatcacaaaatgaacggacagaaccggcccctcattaagcccaagcgaaggctgtctgcagccaggagagcagggacgtcctgtgcgaactgtcagaccaccacaaccacactctggaggaggaatgccaatggggaccctgtctgcaatgcctgtgggctctactacaagcttcacaatattaacagacccctgactatgaagaaggaaggcatccagaccagaaaccgaaaaatgtctagcaaatccaaaaagtgcaaaaaagtgcatgactcactggaggacttccccaagaacagctcgtttaacccggccgccctctccagacacatgtcctccctgagccacatctcgcccttcagccactccagccacatgctgaccacgcccacgccgatgcacccgccatccagcctgtcctttggaccacaccacccctccagcatggtcaccgccatgggttagagccctgctcgatgctcacagggcccccagcgagagtccctgcagtccctttcgacttgcatttttgcaggagcagtatcatgaagcctaaacgcgatggatatatgtttttgaaggcagaaagcaaaattatgtttgccactttgcaaaggagctcactgtggtgtctgtgttccaaccactgaatctggaccccatctgtgaataagccattctgactcatatcccctatttaacagggtctctagtgctgtgaaaaaaaaaatgctgaacattgcatataacttatattgtaagaaatactgtacaatgactttattgcatctgggtagctgtaaggcatgaaggatgccaagaagtttaaggaatatgggagaaatagtgtggaaattaagaagaaactaggtctgatattcaaatggacaaactgccagttttgtttcctttcactggccacagttgtttgatgcattaaaagaaaataaaaaaaagaaaaaagagaaaagaaaaaaaaagaaaaaagttgtaggcgaatcatttgttcaaagctgttggcctctgcaaaggaaataccagttctgggcaatcagtgttaccgttcaccagttgccgttgagggtttcagagagcctttttctaggcctacatgctttgtgaacaagtccctgtaattgttgtttgtatgtataattcaaagcaccaaaataagaaaagatgtagatttatttcatcatattatacagaccgaactgttgtataaatttatttactgctagtcttaagaactgctttctttcgtttgtttgtttcaatattttccttctctctcaatttttggttgaataaactagattacattcagttggcctaaggtggttgtgctcggagggtttcttgtttcttttccattttgtttttggatgatatttattaaatagcttctaagagtccggcggcatctgtcttgtccctattcctgcagcctgtgctgagggtagcagtgtatgagctaccagcgtgcatgtcagcgaccctggcccgacaggccacgtcctgcaatcggcccggctgcctcttcgccctgtcgtgttctgtgttagtgatcactgcctttaatacagtctgttggaataatattataagcataataataaagtgaaaatattttaaaactacaaaatgacatcgtatccacgtggtggccgagctcttctagaatctggtagctctagctaatttcagagaaaggagttaaaagaaacaacttaacaacc

SEQ ID NO: 7930 - protein, 444 aa, Homo sapiens; identical to SEQ ID NO: 1150

SEQ ID NO: 7931 - DNA, 6128 bp, Homo sapiens
ggagagggctgcgcgcttctcgccaagcaagcgggaggcgcactggggccgccgccgttcccgcgctcctccctctcctctgcacccactgtcacgctacccgcccgcgggggagcctcgagagcctccaggtgaattgaaagtcgtttccgggggaggacggagagggtgctgcagtcctggcatgccctgaaactgcaagtcgggcagaaacgacccggcggaggagcagggcgcgcagcgccctgcgcagcatccccgggctgccagaagaggccaccactcggctggcagccgcgagcggcggccgaacctcggccccagactcgggcccccggcacgctcgcccgggagataccccttccccctcttgcgcatttcgcagctgcgctggtgtggggcatgagagcgaggtggctccaggtctccgcggagcagctgccagtgggagagcgaggagaggcgagggggcggcagcctcggcccgaaacggagatcctggggtcctaaatttgtggccgattgcactgtgtcctggagacggagtggaaccacagcccagagcccctgggaatcatccctgaaagactgcattacttctccatggagtcttcctcctcctgcttattttctttttggaacaaggcaaaggcaatctgcatgtaacatcaccagaagatgcagaatgccgcagaaccaaggaacgcctttctaatggaaacagtcgtggttcagtttccaagtcttcccgcaatatcccaaggagacacaccctaggggggccccgaagttccaaggaaatactgggaatgcaaacatctgagatggatcggaagagagaagcgttcctagaacatctgaagcagaagtacccccaccacgcctctgcaatcatgggtcaccaagagaggctgagagaccagacaaggagccccaaactgtctcacagtcctcaaccacccagtctgggtgacccggtcgagcatttatcagagacgtccgctgattctttggaagccatgtctgagggggatgctccaacccctttttccagaggcagccggactcgtgcgagccttcctgtggtgaggtcaaccaaccagacgaaagaaagatctctgggggttctctatctccagtatggagatgaaaccaagcagctcaggatgccgaatgaaatcacaagtgcagacacaatccgtgctctcttcgtaagtgcctttccacagcagctcaccatgaaaatgctggaatcgcccagtgtcgccatttacatcaaagatgaaagcagaaatgtctattatgaattaaatgatgtaaggaacattcaagacagatcactcctcaaagtgtacaacaaggatcctgcacatgcgtttaatcacacaccaaaaactatgaatggagacatgaggatgcagagagaacttgtttatgcaagaggagatggccctggggcccctcgccccggatctactgctcatccaccccatgcgattccaaattccccaccgtctactccagtgccccattccatgcccccctccccgtccagaattccttatgggggcacccgctccatggttgttcctggcaatgccaccatccccagggacagaatctccagcctgccagtctccagacccatctctccaagcccaagcgccattttagaaagaagagatgtcaagcctgatgaagacatgagtggcaaaaacattgcaatgtacagaaatgagggtttctatgctgatccttacctttatcacgagggacggatgagcatagcctcatcccatggtggacacccactggatgtccccgaccacatcattgcatatcaccgcaccgccatccggtcagcgagtgcttattgtaacccctcaatgcaagcggaaatgcatatggaacaatcactgtacagacagaaatcaaggaaatatccggatagccatttgcctacactgggctccaaaacaccccctgcctctcctcacagagtcagtgacctgaggatgatagacatgcacgctcactataatgcccacggcccccctcacaccatgcagccagaccgggcctctccgagccgccaggcctttaaaaaggagccaggcaccttggtgtatatagaaaagccacggagcgctgcaggattatccagccttgtagacctcggccctcctctaatggagaagcaagtttttgcctacagcacggcgacaatacccaaagacagagagaccagagagaggatgcaagccatggagaaacagattgccagtttaactggccttgttcagtctgcgctttttaaagggcccattacaagttatagcaaagatgcgtctagcgagaaaatgatgaaaaccacagccaacaggaaccacacagatagtgcaggaacgccccatgtgtctggtgggaagatgctcagtgctctggagtccacggtgcctcccagccagcctccacctgtgggcacctcagccatccacatgagcctgcttgagatgaggcggagcgtggcggaactcaggctccagctccagcagatgcggcagctccagctgcagaaccaggagttgctgagggcaatgatgaagaaggccgagctggaaatcagtggcaaagtgatggaaacaatgaagagactggaggatcccgtgcagcgacagcgcgtcctagtggagcaagagagacaaaaatatcttcatgaggaagagaagatcgtcaagaagttgtgcgagttggaagactttgttgaagacttgaagaaggactccacggcagccagccgattggttactctgaaagacgtggaagacggggctttcctcctgcgtcaagtgggagaggctgtagctaccctgaaaggagaatttccaaccttacaaaacaagatgcgagccatcctgcgcatagaagtggaggccgtgcggtttctgaaggaggagccacacaagctggacagtctcctgaagcgtgtgcgcagcatgacagacgtcctgaccatgctgcggagacatgtcactgatgggctcctgaaaggcacggacgcagcccaagccgcacagtacatggctatggaaaaggccacagccgcagaagtcctgaagagtcaggaggaggcagcccacacctccggccagcccttccacagcacaggtgcccctggcgatgcgaagtcggaagtggtgcctttgtccggcatgatggttcgccacgcgcagagctcccctgtggtcatccagccctcccagcactccgtggccctgctgaaccctgctcagaacttgcctcacgtggccagctccccagccgtcccccaggaagcaacctccactctgcagatgtcgcaggctccgcagtccccacagatacccatgaatgggtctgccatgcagagcttgttcattgaagaaatccacagtgtgagtgccaagaacagggcagtgtctatcgagaaagcagaaaagaaatgggaggaaaaaaggcaaaatctggatcactataatgggaaagagtttgagaagctcctagaagaagctcaggccaatatcatgaagtcaataccaaatctggagatgccgccagccacaggcccactgccaaggggagatgccccagtggacaaggtggaactttcagaagattctccaaattcggaacaggacttggaaaagctggggggaaagtcgccccctcctcctccgccacctcctcgtcgaagctacctgccaggatcgggactcaccaccacgaggtcaggcgatgtggtctacaccggcagaaaggagaacatcaccgctaaggcaagcagtgaagatgctggaccaagcccacagaccagagctacaaaatatccagcagaggagcctgcttcagcctggaccccatccccaccgcctgtcaccacctcctcctcaaaggatgaggaggaagaagaagaagaaggagacaaaataatggcagaactccagggctccagcggggccccacagacgagcaggatgcctgtccccatgagtgccaagaacagacccggaaccctggacaaacccggcaagcagtccaaactgcaggatccccgccaatatcgtcaggctaatggaagtgctaagaaatctggtggggactttaagcctacttccccctccttacctgcttctaagattccagccctttctcccagctctgggaaaagcagttctctgccctcttctagtggtgacagctctaacctccctaatccacctgctactaaaccatcgattgcttctaaccctctcagcccccaaacaggaccacctgctcactctgcctccctcatcccttctgtctctaatggctctttgaagtttcagagcctcactcatacaggtaaaggtcaccatctttcattctcaccgcagagtcaaaatggccgagcaccccctcctttgtcattttcctcctcccctccttctcctgcctcctccgtctcactgaatcaaggtgccaagggcaccaggaccatccatactcccagcctcaccagctacaaggcacagaatggaagttcaagcaaagccaccccatccacagcaaaagaaacctcttaaaggtcaaatcctattaggcacaagtcggagttacatttaaaaaaaattaacagtctacaacaactgttttcacaagagaatgtaacatattgctgtatcgtttgaggcttaatgctaaatatgtgctaaatactggattaatagatttcagtaaagctcgttcgttttgtttggttttctttttacctagttgctatagtgtctacagtctatactcaatacctataaaatgcagtaagcatgtgttacagaaagaggttctggtgggagagaaaggtgcgtgtgagacaggagaattgtcttaagcatataaaacatgtatgattccagaattttagtatgttttgtataaaactatttttcattacggagactagaagtgaacagagaattacacaagtgtgactatacaaattgtaaaacagatactataatatttccttttattttagtgttatttagctttattacagatttctatttttgtcaaaacttcatggttcctttcaagatcttttttgccaaaacattttgatactatagcattgtacatttgaaagtagtgttctagactataaaaccaatgaacttctacatgagccctacagacaggcatgtgtagaaggcaatttatcaaacctattgcactgccatgaaaagtgtgtataataatttgctagcccaagcaagctagttttctttgcttgcttcttttctttcttttttccttccttttttttttttttttcttttttaacatgttgagattctctagttgttttctttggcgtatctaaccccttcttttgttttctgagacctggtaacccacgctcttgcattgtggattttaaaatgtatactctgtacggttctgtaaaccgaaaaacttttgtaaatatataaatatacatagacataaaaatactgtatgtgacagcacatagagtagttttcccacaccaaagttaatttttatgcatgctttaaaagtatatatcgggaccggcagaaatggaagtatccatacatttttaaaaagcaacaagtttgcacagctagagtgtttttgtaaataaatgtatttgtataacacagtcatgtaatatacagaactataagcagagactttgcaaaactaaataaagggctgcatgcttattattttttgtaccttgtcactataactacttcctagtcaaagaacgaaatgtaactgttaccgagttaaatgtttttccgctttgagggatgtaaccacatccactcagaggacactacttttctgaaagctctggggtgactaatgatgagttcctaataaattaattgcaagtgtggtgccttggatgtggcctgttggctcgctttcttctctgtggcttatcaaggtgtagatgacagaaagcaaacctggatacagagtttccaccctcagttcctggaggggctcttattattttctctctttttaaaaaacttccagtagaagtaaagtggaaataaaatgtctttatcacttgg

SEQ ID NO: 7932 - protein, 1264 aa, Homo sapiens
MQTSEMDRKREAFLEHLKQKYPHHASAIMGHQERLRDQTRSPKLSHSPQPPSLGDPVEHLSETSADSLEAMSEGDAPTPFSRGSRTRASLPVVRSTNQTKERSLGVLYLQYGDETKQLRMPNEITSADTIRALFVSAFPQQLTMKMLESPSVAIYIKDESRNVYYELNDVRNIQDRSLLKVYNKDPAHAFNHTPKTMNGDMRMQRELVYARGDGPGAPRPGSTAHPPHAIPNSPPSTPVPHSMPPSPSRIPYGGTRSMVVPGNATIPRDRISSLPVSRPISPSPSAILERRDVKPDEDMSGKNIAMYRNEGFYADPYLYHEGRMSIASSHGGHPLDVPDHIIAYHRTAIRSASAYCNPSMQAEMHMEQSLYRQKSRKYPDSHLPTLGSKTPPASPHRVSDLRMIDMHAHYNAHGPPHTMQPDRASPSRQAFKKEPGTLVYIEKPRSAAGLSSLVDLGPPLMEKQVFAYSTATIPKDRETRERMQAMEKQIASLTGLVQSALFKGPITSYSKDASSEKMMKTTANRNHTDSAGTPHVSGGKMLSALESTVPPSQPPPVGTSAIHMSLLEMRRSVAELRLQLQQMRQLQLQNQELLRAMMKKAELEISGKVMETMKRLEDPVQRQRVLVEQERQKYLHEEEKIVKKLCELEDFVEDLKKDSTAASRLVTLKDVEDGAFLLRQVGEAVATLKGEFPTLQNKMRAILRIEVEAVRFLKEEPHKLDSLLKRVRSMTDVLTMLRRHVTDGLLKGTDAAQAAQYMAMEKATAAEVLKSQEEAAHTSGQPFHSTGAPGDAKSEVVPLSGMMVRHAQSSPVVIQPSQHSVALLNPAQNLPHVASSPAVPQEATSTLQMSQAPQSPQIPMNGSAMQSLFIEEIHSVSAKNRAVSIEKAEKKWEEKRQNLDHYNGKEFEKLLEEAQANIMKSIPNLEMPPATGPLPRGDAPVDKVELSEDSPNSEQDLEKLGGKSPPPPPPPPRRSYLPGSGLTTTRSGDVVYTGRKENITAKASSEDAGPSPQTRATKYPAEEPASAWTPSPPPVTTSSSKDEEEEEEEGDKIMAELQGSSGAPQTSRMPVPMSAKNRPGTLDKPGKQSKLQDPRQYRQANGSAKKSGGDFKPTSPSLPASKIPALSPSSGKSSSLPSSSGDSSNLPNPPATKPSIASNPLSPQTGPPAHSASLIPSVSNGSLKFQSLTHTGKGHHLSFSPQSQNGRAPPPLSFSSSPPSPASSVSLNQGAKGTRTIHTPSLTSYKAQNGSSSKATPSTAKETS

SEQ ID NO: 7933 - DNA, 2113 bp, Homo sapiens
gatactggggaactataaatgtctccgtccaactctgttcaactctaatttttttttttttttgagacggagtcttactctgtcacccaggctggagtgcaatgacgtaatcttggctcacagcaacctctgcctcctgggttcaagtgattctcctgcctcagcctcccaagtagctgggattacaggagcccgccaccatgcccagctaatttttgtattttttagtagacacagggtttcaccatgttggccaggctggtctcgaactcctgacctcaagccatccacctccctcggcttcccagagtgctgggattacaggcatgagccatgacacccggcctgtaattttctttaaagactgccactgggtggaacccactgggcccagtgagaactacggaaaagagacccattcttgccctcattgttagtgtccacatccggatttacctaaaccccacccaggtggcatttgcatagtaatgaaaaaccggtattttctagctgtgaatcacacttcaaatcctgagcggctgactgtcaggggtgcgtcaggcctgcttgctgggagaatggacgagctggttgtggagcgggcgggtcccgccacccgtgggctcagcactggactgctcccagaacattaaaggtctggctgatgttccatgccacatctggacatgaagacccatgtctgcccttctgtagaagggccaaagaagaaaggaggcatcacatgtttctgctgtggggggcccttccgagcagcagacaggagcaagacaaggagccccaaactgtctcacagtcctcaaccacccagtctgggtgacccggtcgagcatttatcagagacgtccgctgattctttggaagccatgtctgagggggatgctccaacccctttttccagaggcagccggactcgtgcgagccttcctgtggtgaggtcaaccaaccagacgaaagaaagatctctgggggttctctatctccagtatggagatgaaaccaagcagctcaggatgccgaatgaaatcacaagtgcagacacaatccgtgctctcttcgtaagtgcctttccacagcagctcaccatgaaaatgctggaatcgcccagtgtcgccatttacatcaaagatgaaagcagaaatgtctattatgaattaaatgatgtaaggaacattcaagacagatcactcctcaaagtgtacaacaaggatcctgcacatgcgtttaatcacacaccaaaaactatgaatggagacatgaggatgcagagagaacttgtttatgcaagaggagatggccctggggcccctcgccccggatctactgctcatccaccccatgcgattccaaattccccaccgtctactccagtgccccattccatgcccccctccccgtccagaattccttatgggggcacccgctccatggttgttcctggcaatgccaccatccccagggacagaatctccagcctgccagtctccagacccatctctccaagcccaagcgccattttagaaagaagagatgtcaagcctgatgaagacatgagtggcaaaaacattgcaatgtacagaaatgagggtttctatgctgatccttacctttatcacgagggacggatgagcatagcctcatcccatggtggacacccactggatgtccccgaccacatcattgcatatcaccgcaccgccatccggtcagcgagtgcttattgtaacccctcaatgcaagcggaaatgcatatggaacaatcactgtacagacagaaatcaaggaaatatccggatagccatttgcctacactgggctccaaaacaccccctgcctctcctcacagagtcagtgacctgaggatgatagacatgcacgctcactataatgcccacggcccccctcacaccatgcagccagaccgggcctctccgagccgccaggcctttaaaaaggagccaggcaccttggtgtatatagaaaagccacggagcgctgcaggattatccagccttgtagacctcggccctcctctaatggagaagcaagtttttgcctacagcacggcgacaatacccaaagacagagagaccag

SEQ ID NO: 7934 - protein, 479 aa, Homo sapiens
MPHLDMKTHVCPSVEGPKKKGGITCFCCGGPFRAADRSKTRSPKLSHSPQPPSLGDPVEHLSETSADSLEAMSEGDAPTPFSRGSRTRASLPVVRSTNQTKERSLGVLYLQYGDETKQLRMPNEITSADTIRALFVSAFPQQLTMKMLESPSVAIYIKDESRNVYYELNDVRNIQDRSLLKVYNKDPAHAFNHTPKTMNGDMRMQRELVYARGDGPGAPRPGSTAHPPHAIPNSPPSTPVPHSMPPSPSRIPYGGTRSMVVPGNATIPRDRISSLPVSRPISPSPSAILERRDVKPDEDMSGKNIAMYRNEGFYADPYLYHEGRMSIASSHGGHPLDVPDHIIAYHRTAIRSASAYCNPSMQAEMHMEQSLYRQKSRKYPDSHLPTLGSKTPPASPHRVSDLRMIDMHAHYNAHGPPHTMQPDRASPSRQAFKKEPGTLVYIEKPRSAAGLSSLVDLGPPLMEKQVFAYSTATIPKDRE

SEQ ID NO: 7935 - DNA, 386 bp, Homo sapiens
ttagtcacaggtcaagactcaggggacacacagcacaagctgagccacttctttcctgctgcacttaggaacgttcaggacaagcttggcaagcatgtaacaagagatctaggtttggaatttccaaggaatgcactgtttggttattgtaactcagcttctgaggagtccaacccagccacacgggaggtcacatgctgaagaaccaccccatctaagcgcccattttacagctggaaccactgaggttatgtggatgagccgtcttgggagtggtctccccagccccaggtgagctaccccagctgatgccagcagaaatgagatggcccctccaagcactgtccaaattgcagaatgataagcaaataaatgactgtcatgtg

SEQ ID NO: 7936 - protein, 54 aa, Homo sapiens [sequence omitted]

SEQ ID NO: 7937 - DNA, 3281 bp, Homo sapiens
acacatggaagaaacatttctcgttagttcagcattggttttagttatgctgatttccgggacaggaaaaatgccttcctactcagaattaactttcatagagtagaaacaaaacctctgaatgtccgtgaaatagttttaacaagagtggatactgctcctttaaaccacatattttgactaaaagcttccttctgtaaaaaacccaaggcttgcatttagtcaccatgaagacaggcaaagctgaaagcattggagagaggggtggtttcgaggtctctgcaagtctagaaagtttcttctagaaaagaaaggctcacggaaaatgtaagatgcagagagaacttgtttatgcaagaggagatggccctggggcccctcgccccggatctactgctcatccaccccatgcgattccaaattccccaccgtctactccagtgccccattccatgcccccctccccgtccagaattccttatgggggcacccgctccatggttgttcctggcaatgccaccatccccagggacagaatctccagcctgccagtctccagacccatctctccaagcccaagcgccattttagaaagaagagatgtcaagcctgatgaagacatgagtggcaaaaacattgcaatgtacagaaatgagggtttctatgctgatccttacctttatcacgagggacggatgagcatagcctcatcccatggtggacacccactggatgtccccgaccacatcattgcatatcaccgcaccgccatccggtcagcgagtgcttattgtaacccctcaatgcaagcggaaatgcatatggaacaatcactgtacagacagaaatcaaggaaatatccggatagccatttgcctacactgggctccaaaacaccccctgcctctcctcacagagtcagtgacctgaggatgatagacatgcacgctcactataatgcccacggcccccctcacaccatgcagccagaccgggcctctccgagccgccaggcctttaaaaaggagccaggcaccttggtgtatatagaaaagccacggagcgctgcaggattatccagccttgtagacctcggccctcctctaatggagaagcaagtttttgcctacagcacggcgacaatacccaaagacagagagaccagcgagaaaatgatgaaaaccacagccaacaggaaccacacagatagtgcaggaacgccccatgtgtctggtgggaagatgctcagtgctctggagtccacggtgcctcccagccagcctccacctgtgggcacctcagccatccacatgagcctgcttgagatgaggcggagcgtggcggaactcaggctccagctccagcagatgcggcagctccagctgcagaaccaggagttgctgagggcaatgatgaagaaggccgagctggaaatcagtggcaaagtgatggaaacaatgaagagactggaggatcccgtgcagcgacagcgcgtcctagtggagcaagagagacaaaaatatcttcatgaggaagagaagatcgtcaagaagttgtgcgagttggaagactttgttgaagacttgaagaaggactccacggcagccagccgattggttactctgaaagacgtggaagacggggctttcctcctgcgtcaagtgggagaggctgtagctaccctgaaaggagaatttccaaccttacaaaacaagatgcgagccatcctgcgcatagaagtggaggccgtgcggtttctgaaggaggagccacacaagctggacagtctcctgaagcgtgtgcgcagcatgacagacgtcctgaccatgctgcggagacatgtcactgatgggctcctgaaaggcacggacgcagcccaagccgcacagtacatggctatggaaaaggccacagccgcagaagtcctgaagagtcaggaggaggcagcccacacctccggccagcccttccacagcacaggtgcccctggcgatgcgaagtcggaagtggtgcctttgtccggcatgatggttcgccacgcgcagagctcccctgtggtcatccagccctcccagcactccgtggccctgctgaaccctgctcagaacttgcctcacgtggccagctccccagccgtcccccaggaagcaacctccactctgcagatgtcgcaggctccgcagtccccacagatacccatgaatgggtctgccatgcagagcttgttcattgaagaaatccacagtgtgagtgccaagaacagggcagtgtctatcgagaaagcagaaaagaaatgggaggaaaaaaggcaaaatctggatcactataatgggaaagagtttgagaagctcctagaagaagctcaggccaatatcatgaagtcaataccaaatctggagatgccgccagccacaggcccactgccaaggggagatgccccagtggacaaggtggaactttcagaagattctccaaattcggaacaggacttggaaaagctggggggaaagtcgccccctcctcctccgccacctcctcgtcgaagctacctgccaggatcgggactcaccaccacgaggtcaggcgatgtggtctacaccggcagaaaggagaacatcaccgctaaggcaagcagtgaagatgctggaccaagcccacagaccagagctacaaaatatccagcagaggagcctgcttcagcctggaccccatccccaccgcctgtcaccacctcctcctcaaaggatgaggaggaagaagaagaagaaggagacaaaataatggcagaactccaggcattccagaagtgttcctttatggatgtaaattcaaacagtcatgctgagccatcccgggctgacagtcacgttaaagacactaggtcgggcgccacagtgccacccaaggagaagaagaatttggaatttttccatgaagatgtacggaaatctgatgttgaatatgaaaatggcccccaaatggaattccaaaagggctccagcggggccccacagacgagcaggatgcctgtccccatgagtgccaagaacagacccggaaccctggacaaacccggcaagcagtccaaactgcaggatccccgccaatatcgtcaggtagttttaccttaaacccacttttggatggacgctatttcagttaagcaagtcactgacttagtttataccaaatattgtgctttctttgtaagataacggtttacatagacatcctggatctgggggcatgaagaaagtctaaataaacctttgttacacttt

SEQ ID NO: 7938 - protein, 932 aa, Homo sapiens
MQRELVYARGDGPGAPRPGSTAHPPHAIPNSPPSTPVPHSMPPSPSRIPYGGTRSMVVPGNATIPRDRISSLPVSRPISPSPSAILERRDVKPDEDMSGKNIAMYRNEGFYADPYLYHEGRMSIASSHGGHPLDVPDHIIAYHRTAIRSASAYCNPSMQAEMHMEQSLYRQKSRKYPDSHLPTLGSKTPPASPHRVSDLRMIDMHAHYNAHGPPHTMQPDRASPSRQAFKKEPGTLVYIEKPRSAAGLSSLVDLGPPLMEKQVFAYSTATIPKDRETSEKMMKTTANRNHTDSAGTPHVSGGKMLSALESTVPPSQPPPVGTSAIHMSLLEMRRSVAELRLQLQQMRQLQLQNQELLRAMMKKAELEISGKVMETMKRLEDPVQRQRVLVEQERQKYLHEEEKIVKKLCELEDFVEDLKKDSTAASRLVTLKDVEDGAFLLRQVGEAVATLKGEFPTLQNKMRAILRIEVEAVRFLKEEPHKLDSLLKRVRSMTDVLTMLRRHVTDGLLKGTDAAQAAQYMAMEKATAAEVLKSQEEAAHTSGQPFHSTGAPGDAKSEVVPLSGMMVRHAQSSPVVIQPSQHSVALLNPAQNLPHVASSPAVPQEATSTLQMSQAPQSPQIPMNGSAMQSLFIEEIHSVSAKNRAVSIEKAEKKWEEKRQNLDHYNGKEFEKLLEEAQANIMKSIPNLEMPPATGPLPRGDAPVDKVELSEDSPNSEQDLEKLGGKSPPPPPPPPRRSYLPGSGLTTTRSGDVVYTGRKENITAKASSEDAGPSPQTRATKYPAEEPASAWTPSPPPVTTSSSKDEEEEEEEGDKIMAELQAFQKCSFMDVNSNSHAEPSRADSHVKDTRSGATVPPKEKKNLEFFHEDVRKSDVEYENGPQMEFQKGSSGAPQTSRMPVPMSAKNRPGTLDKPGKQSKLQDPRQYRQVVLP

SEQ ID NO: 7939 - DNA, 3058 bp, Homo sapiens
atgccagtgtcagcttctctccgaaaactgggtaatacgaaatggtctttattggttgtgaacactcgagctgagaaacattttaggatctttgtgtcttttgtgatgattttgtttctgaagaggaagctgtctaaaatattcaagtgtgcaaccaaggatttagatgaagccagcaaacaaaggaatcatgtaatcaggacctgagcgaatgtgcttactcacggcgttagttacacaggtgatttccttaagaaaaaatgcagagagaacttgtttatgcaagaggagatggccctggggcccctcgccccggatctactgctcatccaccccatgcgattccaaattccccaccgtctactccagtgccccattccatgcccccctccccgtccagaattccttatgggggcacccgctccatggttgttcctggcaatgccaccatccccagggacagaatctccagcctgccagtctccagacccatctctccaagcccaagcgccattttagaaagaagagatgtcaagcctgatgaagacatgagtggcaaaaacattgcaatgtacagaaatgagggtttctatgctgatccttacctttatcacgagggacggatgagcatagcctcatcccatggtggacacccactggatgtccccgaccacatcattgcatatcaccgcaccgccatccggtcagcgagtgcttattgtaacccctcaatgcaagcggaaatgcatatggaacaatcactgtacagacagaaatcaaggaaatatccggatagccatttgcctacactgggctccaaaacaccccctgcctctcctcacagagtcagtgacctgaggatgatagacatgcacgctcactataatgcccacggcccccctcacaccatgcagccagaccgggcctctccgagccgccaggcctttaaaaaggagccaggcaccttggtgtatatagaaaagccacggagcgctgcaggattatccagccttgtagacctcggccctcctctaatggagaagcaagtttttgcctacagcacggcgacaatacccaaagacagagagaccagcgagaaaatgatgaaaaccacagccaacaggaaccacacagatagtgcaggaacgccccatgtgtctggtgggaagatgctcagtgctctggagtccacggtgcctcccagccagcctccacctgtgggcacctcagccatccacatgagcctgcttgagatgaggcggagcgtggcggaactcaggctccagctccagcagatgcggcagctccagctgcagaaccaggagttgctgagggcaatgatgaagaaggccgagctggaaatcagtggcaaagtgatggaaacaatgaagagactggaggatcccgtgcagcgacagcgcgtcctagtggagcaagagagacaaaaatatcttcatgaggaagagaagatcgtcaagaagttgtgcgagttggaagactttgttgaagacttgaagaaggactccacggcagccagccgattggttactctgaaagacgtggaagacggggctttcctcctgcgtcaagtgggagaggctgtagctaccctgaaaggagaatttccaaccttacaaaacaagatgcgagccatcctgcgcatagaagtggaggccgtgcggtttctgaaggaggagccacacaagctggacagtctcctgaagcgtgtgcgcagcatgacagacgtcctgaccatgctgcggagacatgtcactgatgggctcctgaaaggcacggacgcagcccaagccgcacagtacatggctatggaaaaggccacagccgcagaagtcctgaagagtcaggaggaggcagcccacacctccggccagcccttccacagcacaggtgcccctggcgatgcgaagtcggaagtggtgcctttgtccggcatgatggttcgccacgcgcagagctcccctgtggtcatccagccctcccagcactccgtggccctgctgaaccctgctcagaacttgcctcacgtggccagctccccagccgtcccccaggaagcaacctccactctgcagatgtcgcaggctccgcagtccccacagatacccatgaatgggtctgccatgcagagcttgttcattgaagaaatccacagtgtgagtgccaagaacagggcagtgtctatcgagaaagcagaaaagaaatgggaggaaaaaaggcaaaatctggatcactataatgggaaagagtttgagaagctcctagaagaagctcaggccaatatcatgaagtcaataccaaatctggagatgccgccagccacaggcccactgccaaggggagatgccccagtggacaaggtggaactttcagaagattctccaaattcggaacaggacttggaaaagctggggggaaagtcgccccctcctcctccgccacctcctcgtcgaagctacctgccaggatcgggactcaccaccacgaggtcaggcgatgtggtctacaccggcagaaaggagaacatcaccgctaaggcaagcagtgaagatgctggaccaagcccacagaccagagctacaaaatatccagcagaggagcctgcttcagcctggaccccatccccaccgcctgtcaccacctcctcctcaaaggatgaggaggaagaagaagaagaaggagacaaaataatggcagaactccagggctccagcggggccccacagacgagcaggatgcctgtccccatgagtgccaagaacagacccggaaccctggacaaacccggcaagcagtccaaactgcaggatccccgccaatatcgtcaggtagttttaccttaaacccacttttggatggacgctatttcagttaagcaagtcactgacttagtttataccaaatattgtgctttctttgtaagataacggtttacatagacatcctggatctgggggcatgaagaaagtctaaataaacctttgttacacttttttaccacgcttttgcatgcttgcaataaaacatcttttactttgtg

SEQ ID NO: 7940 - protein, 866 aa, Homo sapiens
MQRELVYARGDGPGAPRPGSTAHPPHAIPNSPPSTPVPHSMPPSPSRIPYGGTRSMVVPGNATIPRDRISSLPVSRPISPSPSAILERRDVKPDEDMSGKNIAMYRNEGFYADPYLYHEGRMSIASSHGGHPLDVPDHIIAYHRTAIRSASAYCNPSMQAEMHMEQSLYRQKSRKYPDSHLPTLGSKTPPASPHRVSDLRMIDMHAHYNAHGPPHTMQPDRASPSRQAFKKEPGTLVYIEKPRSAAGLSSLVDLGPPLMEKQVFAYSTATIPKDRETSEKMMKTTANRNHTDSAGTPHVSGGKMLSALESTVPPSQPPPVGTSAIHMSLLEMRRSVAELRLQLQQMRQLQLQNQELLRAMMKKAELEISGKVMETMKRLEDPVQRQRVLVEQERQKYLHEEEKIVKKLCELEDFVEDLKKDSTAASRLVTLKDVEDGAFLLRQVGEAVATLKGEFPTLQNKMRAILRIEVEAVRFLKEEPHKLDSLLKRVRSMTDVLTMLRRHVTDGLLKGTDAAQAAQYMAMEKATAAEVLKSQEEAAHTSGQPFHSTGAPGDAKSEVVPLSGMMVRHAQSSPVVIQPSQHSVALLNPAQNLPHVASSPAVPQEATSTLQMSQAPQSPQIPMNGSAMQSLFIEEIHSVSAKNRAVSIEKAEKKWEEKRQNLDHYNGKEFEKLLEEAQANIMKSIPNLEMPPATGPLPRGDAPVDKVELSEDSPNSEQDLEKLGGKSPPPPPPPPRRSYLPGSGLTTTRSGDVVYTGRKENITAKASSEDAGPSPQTRATKYPAEEPASAWTPSPPPVTTSSSKDEEEEEEEGDKIMAELQGSSGAPQTSRMPVPMSAKNRPGTLDKPGKQSKLQDPRQYRQVVLP

SEQ ID NO: 7941 - DNA, 5350 bp, Homo sapiens
atgccagtgtcagcttctctccgaaaactgggtaatacgaaatggtctttattggttgtgaacactcgagctgagaaacattttaggatctttgtgtcttttgtgatgattttgtttctgaagaggaagctgtctaaaatattcaagtgtgcaaccaaggatttagatgaagccagcaaacaaaggaatcatgtaatcaggacctgagcgaatgtgcttactcacggcgttagttacacaggtgatttccttaagaaaaaatgcagagagaacttgtttatgcaagaggagatggccctggggcccctcgccccggatctactgctcatccaccccatgcgattccaaattccccaccgtctactccagtgccccattccatgcccccctccccgtccagaattccttatgggggcacccgctccatggttgttcctggcaatgccaccatccccagggacagaatctccagcctgccagtctccagacccatctctccaagcccaagcgccattttagaaagaagagatgtcaagcctgatgaagacatgagtggcaaaaacattgcaatgtacagaaatgagggtttctatgctgatccttacctttatcacgagggacggatgagcatagcctcatcccatggtggacacccactggatgtccccgaccacatcattgcatatcaccgcaccgccatccggtcagcgagtgcttattgtaacccctcaatgcaagcggaaatgcatatggaacaatcactgtacagacagaaatcaaggaaatatccggatagccatttgcctacactgggctccaaaacaccccctgcctctcctcacagagtcagtgacctgaggatgatagacatgcacgctcactataatgcccacggcccccctcacaccatgcagccagaccgggcctctccgagccgccaggcctttaaaaaggagccaggcaccttggtgtatatagaaaagccacggagcgctgcaggattatccagccttgtagacctcggccctcctctaatggagaagcaagtttttgcctacagcacggcgacaatacccaaagacagagagaccagcgagaaaatgatgaaaaccacagccaacaggaaccacacagatagtgcaggaacgccccatgtgtctggtgggaagatgctcagtgctctggagtccacggtgcctcccagccagcctccacctgtgggcacctcagccatccacatgagcctgcttgagatgaggcggagcgtggcggaactcaggctccagctccagcagatgcggcagctccagctgcagaaccaggagttgctgagggcaatgatgaagaaggccgagctggaaatcagtggcaaagtgatggaaacaatgaagagactggaggatcccgtgcagcgacagcgcgtcctagtggagcaagagagacaaaaatatcttcatgaggaagagaagatcgtcaagaagttgtgcgagttggaagactttgttgaagacttgaagaaggactccacggcagccagccgattggttactctgaaagacgtggaagacggggctttcctcctgcgtcaagtgggagaggctgtagctaccctgaaaggagaatttccaaccttacaaaacaagatgcgagccatcctgcgcatagaagtggaggccgtgcggtttctgaaggaggagccacacaagctggacagtctcctgaagcgtgtgcgcagcatgacagacgtcctgaccatgctgcggagacatgtcactgatgggctcctgaaaggcacggacgcagcccaagccgcacagtacatggctatggaaaaggccacagccgcagaagtcctgaagagtcaggaggaggcagcccacacctccggccagcccttccacagcacaggtgcccctggcgatgcgaagtcggaagtggtgcctttgtccggcatgatggttcgccacgcgcagagctcccctgtggtcatccagccctcccagcactccgtggccctgctgaaccctgctcagaacttgcctcacgtggccagctccccagccgtcccccaggaagcaacctccactctgcagatgtcgcaggctccgcagtccccacagatacccatgaatgggtctgccatgcagagcttgttcattgaagaaatccacagtgtgagtgccaagaacagggcagtgtctatcgagaaagcagaaaagaaatgggaggaaaaaaggcaaaatctggatcactataatgggaaagagtttgagaagctcctagaagaagctcaggccaatatcatgaagtcaataccaaatctggagatgccgccagccacaggcccactgccaaggggagatgccccagtggacaaggtggaactttcagaagattctccaaattcggaacaggacttggaaaagctggggggaaagtcgccccctcctcctccgccacctcctcgtcgaagctacctgccaggatcgggactcaccaccacgaggtcaggcgatgtggtctacaccggcagaaaggagaacatcaccgctaaggcaagcagtgaagatgctggaccaagcccacagaccagagctacaaaatatccagcagaggagcctgcttcagcctggaccccatccccaccgcctgtcaccacctcctcctcaaaggatgaggaggaagaagaagaagaaggagacaaaataatggcagaactccaggcattccagaagtgttcctttatggatgtaaattcaaacagtcatgctgagccatcccgggctgacagtcacgttaaagacactaggtcgggcgccacagtgccacccaaggagaagaagggctccagcggggccccacagacgagcaggatgcctgtccccatgagtgccaagaacagacccggaaccctggacaaacccggcaagcagtccaaactgcaggatccccgccaatatcgtcaggtagttttaccttaaacccacttttggatggacgctatttcagttaagcaagtcactgacttagtttataccaaatattgtgctttctttgtaagataacggtttacatagacatcctggatctgggggcatgaagaaagtctaaataaacctttgttacacttttttaccacgcttttgcatgcttgcaataaaacatcttttactttgtgactccaaactccaaattttaactgttaacacacggtgccagaccaggtggcttttctttggtgaatgtagtgtttcatctgaacacctcgggaagcagagacaaaccaacctgtggttgaactgcccttaacgtcaccactactaacgtctatgttgactgtattgtgttagaagcacattaacactccgtcacaatgcccgacccccaccccagtaattatccagacgcatggcccacctggcacacaggaaatggtagagctggaatgatgggactcctctcacaaatgtattcttcctttcctcctttcccgtccatcctttgctatgtacatggggggtttctaccaggtccagtagagcacaacaagacttagctcaggccttgaactgtgtttggttggttttctttgattgaattattctcagaagggctgtgttgccaggccctgtgggttgatcatgtgaccgcctttctgacaaaatgtctcccgccatctttatttgcaggctaatggaagtgctaagaaatctggtggggactttaagcctacttccccctccttacctgcttctaagattccagccctttctcccagctctgggaaaagcagttctctgccctcttctagtggtgacagctctaacctccctaatccacctgctactaaaccatcgattgcttctaaccctctcagcccccaaacaggaccacctgctcactctgcctccctcatcccttctgtctctaatggctctttgaagtttcagagcctcactcatacaggtaaaggtcaccatctttcattctcaccgcagagtcaaaatggccgagcaccccctcctttgtcattttcctcctcccctccttctcctgcctcctccgtctcactgaatcaaggtgccaagggcaccaggaccatccatactcccagcctcaccagctacaaggcacagaatggaagttcaagcaaagccaccccatccacagcaaaagaaacctcttaaaggtcaaatcctattaggcacaagtcggagttacatttaaaaaaaattaacagtctacaacaactgttttcacaagagaatgtaacatattgctgtatcgtttgaggcttaatgctaaatatgtgctaaatactggattaatagatttcagtaaagctcgttcgttttgtttggttttctttttacctagttgctatagtgtctacagtctatactcaatacctataaaatgcagtaagcatgtgttacagaaagaggttctggtgggagagaaaggtgcgtgtgagacaggagaattgtcttaagcatataaaacatgtatgattccagaattttagtatgttttgtataaaactatttttcattacggagactagaagtgaacagagaattacacaagtgtgactatacaaattgtaaaacagatactataatatttccttttattttagtgttatttagctttattacagatttctatttttgtcaaaacttcatggttcctttcaagatcttttttgccaaaacattttgatactatagcattgtacatttgaaagtagtgttctagactataaaaccaatgaacttctacatgagccctacagacaggcatgtgtagaaggcaatttatcaaacctattgcactgccatgaaaagtgtgtataataatttgctagcccaagcaagctagttttctttgcttgcttcttttctttcttttttccttccttttttttttttttttcttttttaacatgttgagattctctagttgttttctttggcgtatctaaccccttcttttgttttctgagacctggtaacccacgctcttgcattgtggattttaaaatgtatactctgtacggttctgtaaaccgaaaaacttttgtaaatatataaatatacatagacataaaaatactgtatgtgacagcacatagagtagttttcccacaccaaagttaatttttatgcatgctttaaaagtatatatcgggaccggcagaaatggaagtatccatacatttttaaaaagcaacaagtttgcacagctagagtgtttttgtaaataaatgtatttgtataacacagtcatgtaatatacagaactataagcagagactttgcaaaactaaataaagggctgcatgcttatt

SEQ ID NO: 7942 - protein, 906 aa, Homo sapiens
MQRELVYARGDGPGAPRPGSTAHPPHAIPNSPPSTPVPHSMPPSPSRIPYGGTRSMVVPGNATIPRDRISSLPVSRPISPSPSAILERRDVKPDEDMSGKNIAMYRNEGFYADPYLYHEGRMSIASSHGGHPLDVPDHIIAYHRTAIRSASAYCNPSMQAEMHMEQSLYRQKSRKYPDSHLPTLGSKTPPASPHRVSDLRMIDMHAHYNAHGPPHTMQPDRASPSRQAFKKEPGTLVYIEKPRSAAGLSSLVDLGPPLMEKQVFAYSTATIPKDRETSEKMMKTTANRNHTDSAGTPHVSGGKMLSALESTVPPSQPPPVGTSAIHMSLLEMRRSVAELRLQLQQMRQLQLQNQELLRAMMKKAELEISGKVMETMKRLEDPVQRQRVLVEQERQKYLHEEEKIVKKLCELEDFVEDLKKDSTAASRLVTLKDVEDGAFLLRQVGEAVATLKGEFPTLQNKMRAILRIEVEAVRFLKEEPHKLDSLLKRVRSMTDVLTMLRRHVTDGLLKGTDAAQAAQYMAMEKATAAEVLKSQEEAAHTSGQPFHSTGAPGDAKSEVVPLSGMMVRHAQSSPVVIQPSQHSVALLNPAQNLPHVASSPAVPQEATSTLQMSQAPQSPQIPMNGSAMQSLFIEEIHSVSAKNRAVSIEKAEKKWEEKRQNLDHYNGKEFEKLLEEAQANIMKSIPNLEMPPATGPLPRGDAPVDKVELSEDSPNSEQDLEKLGGKSPPPPPPPPRRSYLPGSGLTTTRSGDVVYTGRKENITAKASSEDAGPSPQTRATKYPAEEPASAWTPSPPPVTTSSSKDEEEEEEEGDKIMAELQAFQKCSFMDVNSNSHAEPSRADSHVKDTRSGATVPPKEKKGSSGAPQTSRMPVPMSAKNRPGTLDKPGKQSKLQDPRQYRQVVLP

SEQ ID NO: 7943 - DNA, 7383 bp, Homo sapiens
atgccagtgtcagcttctctccgaaaactgggtaatacgaaatggtctttattggttgtgaacactcgagctgagaaacattttaggatctttgtgtcttttgtgatgattttgtttctgaagaggaagctgtctaaaatattcaagtgtgcaaccaaggatttagatgaagccagcaaacaaaggaatcatgtaatcaggacctgagcgaatgtgcttactcacggcgttagttacacaggtgatttccttaagaaaaaatgcagagagaacttgtttatgcaagaggagatggccctggggcccctcgccccggatctactgctcatccaccccatgcgattccaaattccccaccgtctactccagtgccccattccatgcccccctccccgtccagaattccttatgggggcacccgctccatggttgttcctggcaatgccaccatccccagggacagaatctccagcctgccagtctccagacccatctctccaagcccaagcgccattttagaaagaagagatgtcaagcctgatgaagacatgagtggcaaaaacattgcaatgtacagaaatgagggtttctatgctgatccttacctttatcacgagggacggatgagcatagcctcatcccatggtggacacccactggatgtccccgaccacatcattgcatatcaccgcaccgccatccggtcagcgagtgcttattgtaacccctcaatgcaagcggaaatgcatatggaacaatcactgtacagacagaaatcaaggaaatatccggatagccatttgcctacactgggctccaaaacaccccctgcctctcctcacagagtcagtgacctgaggatgatagacatgcacgctcactataatgcccacggcccccctcacaccatgcagccagaccgggcctctccgagccgccaggcctttaaaaaggagccaggcaccttggtgtatatagaaaagccacggagcgctgcaggattatccagccttgtagacctcggccctcctctaatggagaagcaagtttttgcctacagcacggcgacaatacccaaagacagagagaccagcgagaaaatgatgaaaaccacagccaacaggaaccacacagatagtgcaggaacgccccatgtgtctggtgggaagatgctcagtgctctggagtccacggtgcctcccagccagcctccacctgtgggcacctcagccatccacatgagcctgcttgagatgaggcggagcgtggcggaactcaggctccagctccagcagatgcggcagctccagctgcagaaccaggagttgctgagggcaatgatgaagaaggccgagctggaaatcagtggcaaagtgatggaaacaatgaagagactggaggatcccgtgcagcgacagcgcgtcctagtggagcaagagagacaaaaatatcttcatgaggaagagaagatcgtcaagaagttgtgcgagttggaagactttgttgaagacttgaagaaggactccacggcagccagccgattggttactctgaaagacgtggaagacggggctttcctcctgcgtcaagtgggagaggctgtagctaccctgaaaggagaatttccaaccttacaaaacaagatgcgagccatcctgcgcatagaagtggaggccgtgcggtttctgaaggaggagccacacaagctggacagtctcctgaagcgtgtgcgcagcatgacagacgtcctgaccatgctgcggagacatgtcactgatgggctcctgaaaggcacggacgcagcccaagccgcacagtacatggctatggaaaaggccacagccgcagaagtcctgaagagtcaggaggaggcagcccacacctccggccagcccttccacagcacaggtgcccctggcgatgcgaagtcggaagtggtgcctttgtccggcatgatggttcgccacgcgcagagctcccctgtggtcatccagccctcccagcactccgtggccctgctgaaccctgctcagaacttgcctcacgtggccagctccccagccgtcccccaggaagcaacctccactctgcagatgtcgcaggctccgcagtccccacagatacccatgaatgggtctgccatgcagagcttgttcattgaagaaatccacagtgtgagtgccaagaacagggcagtgtctatcgagaaagcagaaaagaaatgggaggaaaaaaggcaaaatctggatcactataatgggaaagagtttgagaagctcctagaagaagctcaggccaatatcatgaagtcaataccaaatctggagatgccgccagccacaggcccactgccaaggggagatgccccagtggacaaggtggaactttcagaagattctccaaattcggaacaggacttggaaaagctggggggaaagtcgccccctcctcctccgccacctcctcgtcgaagctacctgccaggatcgggactcaccaccacgaggtcaggcgatgtggtctacaccggcagaaaggagaacatcaccgctaaggcaagcagtgaagatgctggaccaagcccacagaccagagctacaaaatatccagcagaggagcctgcttcagcctggaccccatccccaccgcctgtcaccacctcctcctcaaaggatgaggaggaagaagaagaagaaggagacaaaataatggcagaactccaggcattccagaagtgttcctttatggatgtaaattcaaacagtcatgctgagccatcccgggctgacagtcacgttaaagacactaggtcgggcgccacagtgccacccaaggagaagaagaatttggaatttttccatgaagatgtacggaaatctgatgttgaatatgaaaatggcccccaaatggaattccaaaaggttaccacaggggctgtaagacctagtgaccctcctaagtgggaaagaggaatggagaatagtatttctgatgcatcaagaacatcagaatataaaactgagatcataatgaaggaaaattccatatccaatatgagtttactcagagacagtagaaactattcccaggaaactgtgcctaaggccagtttcggtttctctggcattagtccattagaagatgaaataaacaaagggtctaaaatctcaggcctgcaatactctatacctgacaccgagaaccagacgctgaattacggaaagacaaaggagatggaaaagcaaaatacggataagtgtcacgtttcctctcacactagactaacagaatcaagcgtgcatgattttaaaacagaagatcaagaggttatcacgacagattttggccaagttgttctaagacccaaggaggcaaggcatgctaacgtgaaccctaatgaggatggagaatcaagttcaagttctcccactgaagaaaatgcagccactgacaatattgccttcatgattaccgaaaccactgtccaggttctttccagtggggaggtgcatgatattgttagccaaaagggagaagacatacagacggttaatatcgatgccagaaaagagatgaccccccgacaagaagggactgacaatgaggatccagtcgtgtgcctggacaagaaaccagtgatcatcattttcgatgagcccatggacatccggtctgcctataagagactttcaactatctttgaggaatgtgatgaggaattagagagaatgatgatggaggaaaagatagaggaggaggaagaggaggaaaatggggattctgtagtccagaataataacacttcccagatgtctcataagaaggtggccccaggcaatcttagaaccggacaacaggtggaaacaaagtcacagccacactccctggccacagagaccagaaacccaggaggacaggaaatgaacagaacggagctgaacaagttcagccacgtggattctccaaattcggaatgcaagggtgaggacgcgaccgatgaccagtttgaaagccccaagaaaaagtttaaattcaaattccctaagaagcaactcgccgctctcactcaagccattcgcaccggaactaaaacagggaagaagactttgcaagtggtagtctatgaagaagaggaagaggatggcaccctgaaacagcacaaagaagccaagcgcttcgaaatcgctaggtctcaacctgaagacacccctgaaaacacagtgaggaggcaagagcagcccagcatcgagagtacatctccgatttcaagaactgatgaaattagaaaaaacacctacagaacattggatagcctggagcagaccattaaacagctcgaaaatacaatcagtgaaatgagtcccaaagccctagttgatacctcatgttcttccaacagagattctgttgcaagttcatcccacatagcccaagaggcctctccccgacccttgctagttccggatgaaggtcccactgccctagagccccctacgtcgataccttcagcttcacgtaagggctccagcggggccccacagacgagcaggatgcctgtccccatgagtgccaagaacagacccggaaccctggacaaacccggcaagcagtccaaactgcaggatccccgccaatatcgtcaggtagttttaccttaaacccacttttggatggacgctatttcagttaagcaagtcactgacttagtttataccaaatattgtgctttctttgtaagataacggtttacatagacatcctggatctgggggcatgaagaaagtctaaataaacctttgttacacttttttaccacgcttttgcatgcttgcaataaaacatcttttactttgtgactccaaactccaaattttaactgttaacacacggtgccagaccaggtggcttttctttggtgaatgtagtgtttcatctgaacacctcgggaagcagagacaaaccaacctgtggttgaactgcccttaacgtcaccactactaacgtctatgttgactgtattgtgttagaagcacattaacactccgtcacaatgcccgacccccaccccagtaattatccagacgcatggcccacctggcacacaggaaatggtagagctggaatgatgggactcctctcacaaatgtattcttcctttcctcctttcccgtccatcctttgctatgtacatggggggtttctaccaggtccagtagagcacaacaagacttagctcaggccttgaactgtgtttggttggttttctttgattgaattattctcagaagggctgtgttgccaggccctgtgggttgatcatgtgaccgcctttctgacaaaatgtctcccgccatctttatttgcaggctaatggaagtgctaagaaatctggtggggactttaagcctacttccccctccttacctgcttctaagattccagccctttctcccagctctgggaaaagcagttctctgccctcttctagtggtgacagctctaacctccctaatccacctgctactaaaccatcgattgcttctaaccctctcagcccccaaacaggaccacctgctcactctgcctccctcatcccttctgtctctaatggctctttgaagtttcagagcctcactcatacaggtaaaggtcaccatctttcattctcaccgcagagtcaaaatggccgagcaccccctcctttgtcattttcctcctcccctccttctcctgcctcctccgtctcactgaatcaaggtgccaagggcaccaggaccatccatactcccagcctcaccagctacaaggcacagaatggaagttcaagcaaagccaccccatccacagcaaaagaaacctcttaaaggtcaaatcctattaggcacaagtcggagttacatttaaaaaaaattaacagtctacaacaactgttttcacaagagaatgtaacatattgctgtatcgtttgaggcttaatgctaaatatgtgctaaatactggattaatagatttcagtaaagctcgttcgttttgtttggttttctttttacctagttgctatagtgtctacagtctatactcaatacctataaaatgcagtaagcatgtgttacagaaagaggttctggtgggagagaaaggtgcgtgtgagacaggagaattgtcttaagcatataaaacatgtatgattccagaattttagtatgttttgtataaaactatttttcattacggagactagaagtgaacagagaattacacaagtgtgactatacaaattgtaaaacagatactataatatttccttttattttagtgttatttagctttattacagatttctatttttgtcaaaacttcatggttcctttcaagatcttttttgccaaaacattttgatactatagcattgtacatttgaaagtagtgttctagactataaaaccaatgaacttctacatgagccctacagacaggcatgtgtagaaggcaatttatcaaacctattgcactgccatgaaaagtgtgtataataatttgctagcccaagcaagctagttttctttgcttgcttcttttctttcttttttccttccttttttttttttttttcttttttaacatgttgagattctctagttgttttctttggcgtatctaaccccttcttttgttttctgagacctggtaacccacgctcttgcattgtggattttaaaatgtatactctgtacggttctgtaaaccgaaaaacttttgtaaatatataaatatacatagacataaaaatactgtatgtgacagcacatagagtagttttcccacaccaaagttaatttttatgcatgctttaaaagtatatatcgggaccggcagaaatggaagtatccatacatttttaaaaagcaacaagtttgcacagctagagtgtttttgtaaataaatgtatttgtataacacagtcatgtaatatacagaactataagcagagactttgcaaaactaaataaagggctgcatgcttattattttttgtaccttgtcactataactacttcctagtcaaagaacgaaatgtaactgttaccgagttaaatgtttttccgctttgagggatgtaaccacatccactcagaggacactacttttctgaaagctctggggtgactaatgatgagttcctaataaattaattgcaagtgtggtgccttggatgtggcctgttggctcgctttcttctctgtggcttatcaaggtgtagatgacagaaagcaaacctggatacagagtttccaccctcagttcctggaggggctcttattattttctctctttttaaaaaacttccagtagaagtaaagtggaaataaaatgtctttatca

SEQ ID NO: 7944 - protein, 1465 aa, Homo sapiens
MQRELVYARGDGPGAPRPGSTAHPPHAIPNSPPSTPVPHSMPPSPSRIPYGGTRSMVVPGNATIPRDRISSLPVSRPISPSPSAILERRDVKPDEDMSGKNIAMYRNEGFYADPYLYHEGRMSIASSHGGHPLDVPDHIIAYHRTAIRSASAYCNPSMQAEMHMEQSLYRQKSRKYPDSHLPTLGSKTPPASPHRVSDLRMIDMHAHYNAHGPPHTMQPDRASPSRQAFKKEPGTLVYIEKPRSAAGLSSLVDLGPPLMEKQVFAYSTATIPKDRETSEKMMKTTANRNHTDSAGTPHVSGGKMLSALESTVPPSQPPPVGTSAIHMSLLEMRRSVAELRLQLQQMRQLQLQNQELLRAMMKKAELEISGKVMETMKRLEDPVQRQRVLVEQERQKYLHEEEKIVKKLCELEDFVEDLKKDSTAASRLVTLKDVEDGAFLLRQVGEAVATLKGEFPTLQNKMRAILRIEVEAVRFLKEEPHKLDSLLKRVRSMTDVLTMLRRHVTDGLLKGTDAAQAAQYMAMEKATAAEVLKSQEEAAHTSGQPFHSTGAPGDAKSEVVPLSGMMVRHAQSSPVVIQPSQHSVALLNPAQNLPHVASSPAVPQEATSTLQMSQAPQSPQIPMNGSAMQSLFIEEIHSVSAKNRAVSIEKAEKKWEEKRQNLDHYNGKEFEKLLEEAQANIMKSIPNLEMPPATGPLPRGDAPVDKVELSEDSPNSEQDLEKLGGKSPPPPPPPPRRSYLPGSGLTTTRSGDVVYTGRKENITAKASSEDAGPSPQTRATKYPAEEPASAWTPSPPPVTTSSSKDEEEEEEEGDKIMAELQAFQKCSFMDVNSNSHAEPSRADSHVKDTRSGATVPPKEKKNLEFFHEDVRKSDVEYENGPQMEFQKVTTGAVRPSDPPKWERGMENSISDASRTSEYKTEIIMKENSISNMSLLRDSRNYSQETVPKASFGFSGISPLEDEINKGSKISGLQYSIPDTENQTLNYGKTKEMEKQNTDKCHVSSHTRLTESSVHDFKTEDQEVITTDFGQVVLRPKEARHANVNPNEDGESSSSSPTEENAATDNIAFMITETTVQVLSSGEVHDIVSQKGEDIQTVNIDARKEMTPRQEGTDNEDPVVCLDKKPVIIIFDEPMDIRSAYKRLSTIFEECDEELERMMMEEKIEEEEEEENGDSVVQNNNTSQMSHKKVAPGNLRTGQQVETKSQPHSLATETRNPGGQEMNRTELNKFSHVDSPNSECKGEDATDDQFESPKKKFKFKFPKKQLAALTQAIRTGTKTGKKTLQVVVYEEEEEDGTLKQHKEAKRFEIARSQPEDTPENTVRRQEQPSIESTSPISRTDEIRKNTYRTLDSLEQTIKQLENTISEMSPKALVDTSCSSNRDSVASSSHIAQEASPRPLLVPDEGPTALEPPTSIPSASRKGSSGAPQTSRMPVPMSAKNRPGTLDKPGKQSKLQDPRQYRQVVLP

SEQ ID NO: 7945 - DNA, 434 bp, Homo sapiens
cctggaaaaccggggctttcctcctgcgtcaagtgggagaggctgtagctaccctgaaaggtaaactttctgctgggtcgggggaggagtctgagctgtctttcctgcggtgtttaaaaatctgccacatagaggattcattcatgtatgcaagtatttattaaacgtctacatgtgccaggcattgttctggacacttgggataccccacagcacaaagtaggtgcacatccccctcttcttggagctggtattagagtgggtgctgtaagatttcacactaaatgattccagtaacactttctatttgctaggctcttacagtgcaccgggatgcatgtgccaaacccgttaaaaacacaaggtgggaggatcacttgatcccaggagttcaagaccagcctgggcaatatagagagactcacatctctacc

SEQ ID NO: 7946 - protein, 46 aa, Homo sapiens [sequence omitted]

SEQ ID NO: 7947 - DNA, 556 bp, Homo sapiens
ggttatcagctgtgcctccctcttagaggtcctcggagtccagagtcctcgaagggaaatctgacacaaagaagcagcaggtaaatgaaggagaaaagaaaagaacaaaatccaccgggaaccagagacttccaggctccaaagacaggcaatctccaccaggaacatatgacctaggagcaggagtgaaggatgggagtgaagcaaggaaggaaagagagtcgattacagagctgtttcgttgagctggtcacagctcctgtgtccaatctcgtggggctgcctgagatgtcttgaagtcataagcccagagaaagaacagaggggatgcctttatccactggatccatttttccaatgatcaaagggctggagtgcagctgaggtctggctttagccaaggagagcaccttgaaacctggcagagaattacagtgaaccagaagactaagtgaagcatgaactggcataatatgctttcctggctgaaaaccatgaatgacccagaatagttcatatctttggaagatccttattttccttgtaaatgaaagtc

SEQ ID NO: 7948 - protein, 30 aa, Homo sapiens
MKEKRKEQNPPGTRDFQAPKTGNLHQEHMT

SEQ ID NO: 7949 - DNA, 3863 bp, Homo sapiens
atcttggaaacagtttttgaagttggtagagtctcgggcccgcttaactgctgaaagagtaggaaggggtccgtttcattagcgcgttcaaccaaagagcgctgttaggtgagcaaaaacaaaccagttgtgtctgagccaacacccgtttgtctatgggttgtagcagttggtccacctaatcaaggaagtgccgagagcacaggacatgaaaagacacagcgctaaggtttcctgcaccacaaggttcctttcacttaaaaaaatttttttttatattacaccatctttatttgtaccttaccgtctaaggctatcaatcaaacttcagtaagaacagtttcagcatcaactaacgaacagtagccaaaccagagagcagtcaaaagtgttttaaagggagcagcatcagctgatgttctgccaagtctctgggtgttcaggaccatggtcccccggcacttccaggcccctgtgggctgcaggtggatccccaggagccaaagggccgctcaggaaagggtggaacttggcctcgcaatcagctggcttctgcctattatggtcatcttctttccagaggtcttgctatctcagtggacgtggctgtcatccagccgtcctgggctgttttctcatagaagaggatctccctctgaaaactgtgtcatccttcaattcctgggccaagtctggggacacatcttttcttaaagcttgctggtatgacgagcagttcccattttcctgcactttacgaagtctctgaggtgcaagcagtagacatccttctccatggactccccctgaggctgcttcatgtgttttcagggcagttcaggcagatcggaaaccactggctgcagcttcgggatgtccctctccagctgtgcccttgaaccctgcagagagacctgctcgctgagcagaccttgggcttgtgctgtgagttctgtactcctttgggtttcttctcacaatcgtatgtctgctttaccagtctttccctcgggacattcgaaggaagcacctaaattaccattgtcatccatgctttcagagggacttgcggccacgatgctgggggaccaccctgttctgcttccctgttcccctccactgccaagtcctcattttccatgtcgtctttcctggtgcagatgaagggtgctcagcagagcgtgagccaccagggaagccactcgcctactccagttcgaatattggggacttgaggccatcttgtcttttttgtgtgtgtgtggcgtctgatttacaacttcttggtcgggcagctctgtgggttgctgatggtccatgctgtcattcacatcgtccgtggtgtgcactggaagatctccatgctgtgaagcgtgcaggatgtgcttcacatcagtcacttggggaagttcaggaggctgctttttcatgcttttttcagaagctcgcctaggttaggtcctgatcggaagacctgctcatttccattagaaccttcaagcagagtgtttggagcaatcaaggactggccccagcatggataacaggtagctaccactggtgtgggctgctggctgcatcttggcgcaggcctttctgtgggcctcaccttagactgaagccctttgggccagcccttccctccttctcactgcgtgtcgtctcctgaccagagaggccatcacagcggtgcacgcccagctcacccatagtatccctagggtcactggcactggtcccaggattctgtacatcactacttactgctgcccacaggtgggccagcagcagttgaggaggcatttcgtggtgagcagcaggtccttcatggctcttgagggctccacagctcttcctcttttctctactggtatgtgggtcacaactgaccactcagaaccctgcagagtgttccacctctaacacaaacaagggctcgccaaccagggcaaaccatccattatgctgggggaggaaaggcaccgcaaattctagaaaactgtgtccctgattttgctgtgcaaatataaagtgacattacttaacacagtgccttggaagaggggaaagagttcacggcagcccccagctcaggccactgcaggtcccacctggccttacagcatagctagagggtcaaagccagtcaaagccccgtgtccacgcatgatcctctcagggcagcgtgatggcccgtccctggtggggctcattaccctgatttcaagtttccttctgctgcagggaagcctggtcccgcctacaaagagactgtctaccttgctagattgaactataggactatgttttcttcatctctgtaaccccagaagctctccagagacccttatacactagggacatggtcattgcttgtcttgttttcttgttgactctactctgacttagggcacatcgctttcccctctagatctccatattcagatctgtgaatgacagtaagtgggtgaaggcccctctagctttaaaacccctccaatacagagagtacactgaaaccggaagcagaagctgagtgtggtgagtggagcattttccctggcatgatggaggggacctatggatctggctatgagggtggcatctggccacttgaatggctctgcagagctggaccctagttttcaaatcagactcaagaatgatctttagtgtgggtggttttgtggggcatatattttttgagaccttgttattgacacaacagcttctgggaagtctttttgacagagagtatgcacaggtgcgggctccatctgctcggcagccgctgtctggtgacggtgagcgctgagagctggatggtcctgttagaaaggcagcatgccagcctccggtgatgagcagagtgacccgaccttgtctctccttccccatggagcactgcaggctctttccccagacctgcttctaggcttcccttcacccgctcccaccaggcagctgaggccactttaggattccatttttagttgtactttttttttaattgatcattttgtgagcatttttctctctaatgcaacagaactagcacaagtccttaaagatgtaggatctctcagctcccacaaaaacaaagataatggcctatgtaattctctacatatttaaattgttagctctaaaaatagattcagagaaagggtggacacatgttccaattttctcataacagtcctgggttgtgcctgttatcctggcatagttattaatcctgtcccctttcactctcagactctcctggtttggaggataatttcattctattcaaagaggaaatctacaaaaaggtgtcatcatctaacctgtattcatataaacattttccagtctcacggttctgtgtacctctccaaacccctcaatcttctaatcattttgtgtattatttataggaaaagagcaccagctaaaatatcttgcccttggatttcttcagccagctgctgaagtaatttgtcttagtctttactgaagactgaattgtatcattaagactttcttctaagtcctgttattttgactttttgactcactctgtgccctctgatacataaagtagcaataatttgtacaatgagccattgtatttgttcacgagaaattcttcctgttcctcacatttctattcattttcctaaaggtatgtatttgaaaacttgaaaaattgcctggcccagttatagtttaatgggagcatttaaacatacttttcctacaaagcttatcagttagttacttaacctttatgaataggttaaatattttccacagtatttatataaatatgatacttggtttcaagttaaatctaataaaaaggaagttattcttgactt

SEQ ID NO: 7950 - protein, 41 aa, Homo sapiens
MKRHSAKVSCTTRFLSLKKIFFYITPSLFVPYRLRLSIKLQ

SEQ ID NO: 7951 - DNA, 538 bp, Homo sapiens
atttgtaccttaccgtctaaggctatcaatcaaacttcagtaagaacagtttcagcatcaactaacgaacagtagccaaaccagagagcagtcaaaagtgttttaaagggagcagcatcagctgatgttctgccaagtctctgggtgttcaggaccaccctgttctgcttccctgttcccctccactgccaagtcctcattttccatgtcgtctttcctggtgcagatgaagggtgctcagcagagcgtgagccaccagggaagccactcgcctactccagttcgaatattggggacttgaggccatcttgtcttttttgtgtgtgtgtggcgtctgatttacaacttcttggtcgggcagctctgtgggttgctgatggtccatgctgtcattcacatcgtccgtggtgtgcactggaagatctccatgctgtgaagcgtgcaggatgtgcttcacatcagtcacttggggaagttcaggaggctgctttttcatgcttttttcagaagctcgcctaggttaggtcctgatcggaag

SEQ ID NO: 7952 - protein, 58 aa, Homo sapiens
MFCQVSGCSGPPCSASLFPSTAKSSFSMSSFLVQMKGAQQSVSHQGSHSPTPVRILGT

SEQ ID NO: 7953 - DNA, 735 bp, Homo sapiens
agacggcaagggatgtgtagctttttcaatcctggccataacattcttcttcatgctcttctcaatgtcctttctcctttcattaggtaaaatggagatgatccccagggccatcttggaaacagtttttgaagttggtagagtctcgggcccgcttaactgctgaaagagtaggaaggggtccgtttcattagcgcgttcaaccaaagagcgctgttaggtttcctgcaccacaaggttcctttcacttaaaaaaatttttttttatattacaccatctttatttgtaccttaccgtctaaggctatcaatcaaacttcagtaagaacagtttcagcatcaactaacgaacagtagccaaaccagagagcagtcaaaagtgttttaaagggagcagcatcagctgatgttctgccaagtctctgggtgttcaggaccatggtcccccggcacttccaggcccctgtgggctgcaggtggatccccaggagccaaagggccgctcaggaaagggtggaacttggcctcgcaatcagctggcttctgcctattatggtcatcttctttccagaggtcttgctatctcagtggacgtggctgtcatccagccgtcctgggctgttttctcatagaagaggatctccctctgaaaactgtgtcatccttcaattcctgggccaagtctggggacacatcttttcttaaagcttgctggtatgacgagcagttcccatt

SEQ ID NO: 7954 - protein, 108 aa, Homo sapiens
MFCQVSGCSGPWSPGTSRPLWAAGGSPGAKGPLRKGWNLASQSAGFCLLWSSSFQRSCYLSGRGCHPAVLGCFLIEEDLPLKTVSSFNSWAKSGDTSFLKACWYDEQF

SEQ ID NO: 7955 - DNA, 555 bp, Homo sapiens
agtctcgggcccgcttaactgctgaaagagtaggaaggggtccgtttcattagcgcgttcaaccaaagagcgctgttaggtgagcaaaaacaaaccagttgtgtctgagccaacacccgtttgtctatgggttgtagcagttggtccacctaatcaaggaagtgccgagagcacaggacatgaaaagacacagcgctaagagtctcactctgttgcccaggctggagtgcagcagcaagatcataactcagggcaaacttgacctcccaggctcaagcgatcttctggcctcagcctcccaggtttcctgcaccacaaggttcctttcacttaaaaaaatttttttttatattacaccatctttatttgtaccttaccgtctaaggctatcaatcaaacttcagtaagaacagtttcagcatcaactaacgaacagtagccaaaccagagagcagtcaaaagtgttttaaagggagcagcatcagctgatgttctgccaagtctctgggtgttcaggaccatggtcccccggcacttccaggcccctgtgggctg

SEQ ID NO: 7956 - protein, 75 aa, Homo sapiens
MKRHSAKSLTLLPRLECSSKIITQGKLDLPGSSDLLASASQVSCTTRFLSLKKIFFYITPSLFVPYRLRLSIKLQ

SEQ ID NO: 7957 - DNA, 406 bp, Homo sapiens
ggaaactcctattgtgatcttaagggctgtaacccagagaatctggttcttcctggagtatttcagcagggatcagcttaaataggtctacttgaagttcacaactgccaaaaccgcgtgttcagactgaaaggctgggagcatttcagacgcatttatgaacttccaccaagatgatccggcaggctgaaatcgcagggagagcgtctgttcaacaaaccctttcttcttgattgaattagtgttacccactaacaggatgaggaattcccactccacaagctgactttttttcctctttccacctcccgcctccctccattaaaatgtaaacttgattcctgtgtcctttgccggagcctggcttccctgtaagcccatcataaacatcttggtagaaatgcaa

SEQ ID NO: 7958 - protein, 39 aa, Homo sapiens
QDEEFPLHKLTFFPLSTSRLPPLKCKLDSCVLCRSLASL

SEQ ID NO: 7959 - DNA, 253 bp, Homo sapiens
acagcctgcaagcagcagctggtgcccagcgtgcaaatgtatcactaccagcaccagaggttaacagatactacagctggagctgcagaaagagcctcctgaggagctggactctgcagatgagaatgaaagcagtgactttatggtgtacagtctggaccttcaaattggagggggtgaggagaaccctaaagcccaggcatcgatggggaattctggagacaaaagctaattaaagttcatttcaaacctg

SEQ ID NO: 7960 - protein, 38 aa, Homo sapiens
MRMKAVTLWCTVWTFKLEGVRRTLKPRHRWGILETKAN

SEQ ID NO: 7961 - DNA, 348 bp, Homo sapiens
accccgcatgaccctgttccccgggaggggcagcctggggagtgacaggcatgacctcgatggtgggccaggggcctcctcagaggagcaaagagaagcttggtggaagagaaagccgctagtattcagcgagaagatcactcaaatccttcaccagcatgctcagtgaagaatgcattaaaaaaattagactttttttcttcctggcaacaaaatcttgccaaaataagtaccaaaataagtgttccaatggttttatttggggaaagccaacgctttccccaaaaagactttttcttgtttctcatttggctgctacaaataaagctgcaatgaacatacatgtac

SEQ ID NO: 7962 - protein, 53 aa, Homo sapiens
MTLFPGRGSLGSDRHDLDGGPGASSEEQREAWWKRKPLVFSEKITQILHQHAQ

SEQ ID NO: 7963 - DNA, 1404 bp, Homo sapiens
ggaaccggctgcgcgggagcgcgcctgagggaggccgcggggggcagggccgggactgcgttgagacagtcgccgtgcctcagtttcctcctctgcgaagggcgggaggagtcggacgcgccctagagccccgcgcgttcctggtgtagcctgctgggcccgtgttctttaagttcctcttcctcggagccgcgcgttcgaccctcgctcccgtttgtccactgatgtcccgtttcgagcccgggagatcctgcatctcggaagccccctgagtcccgaggcaaatcgggaccgtgagcccccctaccctgcagggctccatggggccaaaaaccacgtggtccttctggaagggaactggctaagccaggactgcttttctggagtgataatgtgcttgcctgtgtctaagagaaagtaccctggctgataaatgggacttggattttaaataccattggataataaatgtatgtgatggctttggagcaaattgattgacaatggctaggagacagcttcccaaggctggaaagaggggagtgcggaacatgcctccaccataccactgcccacctcctgtgacctctgcagcaaaacctgaagccccaaagaggcagcttctcaaagtaaaagtggaatgaagttcctggtgacctgaattcccatggaggaaagaggaaaaggacattatgcaaggagatggcatctcgtgtccctggtgaaccaaattccattaggaagacggtgcagtgtgaggtggacctggacctggataaaatgggtgtttaacaagtatttgttgagtaggtggtggaggaggcacgactagatgcagggtctagctgagttgacaagagctaacaccaggtgtggaccaggacagggggaccttaagcgaagacaccctgccagatgtgtcttgttcccttgactgtggggaggcccttggtggtggggtgacggtcccccagtctgaggattttccctggatgtagcctctcagtgctaaaatgggacagtcccaggcaaaccaggtcagttggtcactctactcagtgagccccgtgctgtgttcaaattttcctcttaacagatgtggatggatttcggaaacttagaaaccaccatttctctgtgcctgggaggagagttaaatcttctcaccagaatccttttatgtgtgagagaaataaatatctatcctttttatatctcttttgttttggattctttgtcaccagcagccaaacccaattcttacataaacgtgatactaattaaattcatttgcataaactcaccagttttatccttaattactgtgatatacactcatgaagtatgtaccctaaaataccactgtaagttttatttgattacagcattaaacttaatttacag

SEQ ID NO: 7964 - protein, 46 aa, Homo sapiens
MARRQLPKAGKRGVRNMPPPYHCPPPVTSAAKPEAPKRQLLKVKVE

SEQ ID NO: 7965 - DNA, 1038 bp, Homo sapiens
acagaatctcactctgtagtcacccaggctggaatgcagtggtgcgatcttggctcactgcaacctccacctcccagatgcaagcgattcttgtgcctcagcctcccgagtagctgggattaaaggcatgcgccaccacgcccaggagacagcttcccaaggctggaaagaggggagtgcggaacatgcctccaccataccactgcccacctcctgtgacctctgcagcaaaacctgaagccccaaagaggcagcttctcaaagtaaaagtggaatgaagttcctggtgacctgaattcccatggaggaaagaggaaaaggacattatgcaaggagatggcatctcgtgtccctggtgaaccaaattccattaggaagacggtgcagtgtgaggtggacctggacctggataaaatgggtgtttaacaagtatttgttgagtaggtggtggaggaggcacgactagatgcagggtctagctgagttgacaagagctaacaccaggtgtggaccaggacagggggaccttaagcgaagacaccctgccagatgtgtcttgttcccttgactgtggggaggcccttggtggtggggtgacggtcccccagtctgaggattttccctggatgtagcctctcagtgctaaaatgggacagtcccaggcaaaccaggtcagttggtcactctactcagtgagccccgtgctgtgttcaaattttcctcttaacagatgtggatggatttcggaaacttagaaaccaccatttctctgtgcctgggaggagagttaaatcttctcaccagaatccttttatgtgtgagagaaataaatatctatcctttttatatctcttttgttttggattctttgtcaccagcagccaaacccaattcttacataaacgtgatactaattaaattcatttgcataaactcaccagttttatccttaattactgtgatatacactcatgaagtatgtaccctaaaataccactgtaagttttatttgattacagcattaaacttaatttacag

SEQ ID NO: 7966 - protein, 36 aa, Homo sapiens
MRHHAQETASQGWKEGSAEHASTIPLPTSCDLCSKT

SEQ ID NO: 7967 - DNA, 690 bp, Homo sapiens
gatgtttttcattcaaagctcgcaatgcaccgttctgaaaactctccagcgtagaattcaggaaccctgagttttctatctctgtctagttctggactgaatgggctcaagtcatctagttaacctctctggatttcagtcttctgaaaagtgaagctaagagatctagcattctgcagaaaagtactggagatgactcaggactgaaaatgatcatgaagcccctttgcaaatatcaaagtggtgatgaagcagtcatgaactttgaccagaagccgtgttttgtgggattgccactttaatcgctcctgttcatcattaggactgcagccagagtgtggaaggagtgacagcacagaggaagagatggtccaagaccaaagaggaaagaaatggcataagatgggacagtgttctatgatctctaactggccaaagaaaaatgagaaacaaatttaaaagaagacagttggatgacttaaacaccacccctgagaggcagctgtttccagaatattgcacaatttattgagttcatgagaatcgtgatcgttggcagcaccgaacttcacggagggaatcataggcactttaattccaatttgttgacttatggaggaagaaatttctcccagtggtgtcccttcatccaggaacaagagccatcaaagtgtcacagacttagagccg

SEQ ID NO: 7968 - protein, 50 aa, Homo sapiens
MRIVIVGSTELHGGNHRHFNSNLLTYGGRNFSQWCPFIQEQEPSKCHRLR

SEQ ID NO: 7969 - DNA, 563 bp, Homo sapiens
tgcagtgtgaggtggacctggacctggataaaatgggtgtttaacaagtatttgttgagtaggtggtggaggaggcacgactagatgcagggtctagctgagttgacaagagctaacaccaggtgtggaccagtctgaggattttccctggatgtagcctctcagtgctaaaatgggacagtcccaggcaaaccaggtcagttggtcactctactcagtgagccccgtgctgtgttcaaattttcctcttaacagatgtggatggatttcggaaacttagaaaccaccatttctctgtgcctgggaggagagttaaatcttctcaccagaatccttttatgtgtgagagaaataaatatctatcctttttatatctcttttgttttggattctttgtcaccagcagccaaacccaattcttacataaacgtgatactaattaaattcatttgcataaactcaccagttttatccttaattactgtgatatacactcatgaagtatgtaccctaaaataccactgtaagttttatttgattacagcattaaacttaatttacag

SEQ ID NO: 7970 - protein, 101 aa, Homo sapiens
MWMDFGNLETTISLCLGGELNLLTRILLCVREINIYPFYISFVLDSLSPAAKPNSYINVILIKFICINSPVLSLITVIYTHEVCTLKYHCKFYLITALNLI

SEQ ID NO: 7971 - DNA, 552 bp, Homo sapiens
gaaaagtgaagctaagagatctagcattctgcagaaaagtactggagatgactcaggactgaaaatgatcatgaagcccctttgcaaatatcaaagtggtgatgaagcagtcatgaactttgaccagaagccgtgttttgtgggattgccactttaatcgctcctgttcatcattaggactgcagccagagtgtggaaggagggactccaaatatataagaagatgctaccacaccctgggagattggattccccactgcgctggctttctcaagctctgtgaaatgtgatgttggctggaacttatcatgaagagctttgctgtaaaacagatctggggtaaagtgggtcttaaaaatcctttctctatacatccatgtagatagagaccatctccattaacagaagagggaatgatgccattcttataaagaagctgtactgtgggcacatttattcctaagttgatagtagctattttaactatgaaaaggatctgcccagatgaaagaggggctgcctgtggagcacagctggatgggggaagcaagg

SEQ ID NO: 7972 - protein, 30 aa, Homo sapiens
MIMKPLCKYQSGDEAVMNFDQKPCFVGLPL

SEQ ID NO: 7973 - DNA, 258 bp, Homo sapiens
atgaacattgactctggtgctgtggtcgccgtgcgggtctcagtaggagggttcactaggaaggcggcctgcgctcatggagatggcatctcagagatgatggcagagggagataatcgcagcaccaacctgctggctacagagactgcaagtctggaagaaacagctgcaaggatggggagaagtgatgctgatgctgataaagccctctgatgggaaacagcctggtttccacctgccgtcatgggtgtggtttct

SEQ ID NO: 7974 - protein, 70 aa, Homo sapiens [sequence omitted]

SEQ ID NO: 7975 - DNA, 2391 bp, Homo sapiens
gatgctccaaatatccctacaaagtactttattattcctgtttcacagacaaggaaactggggcacagacaggttgaacaatgttcctgtagctgagccaggatttgaacccagggatttatttctctacaagggacacaggtgactgaacttcctcctggccccgaggacccagggaagcacctctttgagatcagcccaggtggtgccggggagcgggagaaggtgccggccaaccccgaggcgctcctgctcatggccagctcccagcgtgacatggaggactgggtgcaggccatccgccgagtcatctgggccccgctgggcggaggtactgcccgtagatcgcatgcccaccctctagaacccttgcctccagggatctttgggcagcgcctagaggaaacagtccaccacgagcggaagtatggcccccgcctggcgcccctgctggtggagcagtgtgtggacttcatccgggagcgcgggctcactgaggaggggctgttccgcatgccaggccaggccaacctggtgagggacctgcaggattccttcgactgtggggagaagccactgtttgacagcacaacagacgtgcacacggtggcctccctgctgaagctgtacctgcgggagctccccgagcccgtggtccccttcgccaggtacgaggacttcctcagctgcgcccagctgctcaccaaggacgagggggagggcactctggagttggctaaacaagtgagcaaccttcctcaggcaaattacaacctgctcagatacatctgcaagtttctggatgaagttcaggcatactcaaatgtcaacaagatgagtgtccagaatctggcaaccgtttttggacctaacattctgcggccacaggtagaggacccagtaaccatcatggaaggcacttccctcgtccagcacctgatgaccgtcctcatccgcaaacacagccagctcttcacggcaccggtcccggaagggcccacctccccgcgcgggggcctgcaatgcgcagtggggtggggctccgaggaggtcaccagggacagccaaggagagcccggcggccccggcctgcccgcgcacaggacctcttccctggacggggcggccgtggcggtgctctccagaacagcccccacggggccggggagccggtgcagccctgggaagaaggtgcagaccctgcccagttggaagtcctccttccggcagccgaggtccctatcgggaagcccgaaggggggcggctcatccctggaggtgcccatcatctcctccggcgggaactggcttatgaacgggctgtcctccctgcgcggacaccgccgggcctcgtcgggagaccggctcaaggactcgggctccgtgcagagactctccacctacgacaatgtgcccgcgccgggcctggtccccggcatacccagcgtggccagtatggcgtggtccggggcctcgtccagcgagtcgtcggtggggggctcactcagcagctgcacggcctgccgcgccagcgactcgtctgcccgcagttccctgcacaccgactgggccctggagccctccccgctccccagcagcagcgaggaccccaagtccctggacctggaccacagcatggacgaggcgggcgcgggtgccagcaacagcgagcccagcgagccggacagccccacccgggaacacgcgcgccgctccgaggccttacaggggctggtcactgagctcagggccgagctgtgccgccagcggactgagtacgagaggagtgtgaaaagaatcgaagaagggagtgctgacctgagaaaacgaatgtcccggttagaagaagaactggaccaggaaaagaaaaaatacatcatgctggaaataaagctgcggaactctgaacgggcgcgggaggatgcggagaggaggaaccagctgttgcagagggaaatggaggagtttttttcgaccctaggaagcttgactgttggggcaaaaggtgccagggccccaaagtaaaaggaatggcagagctcacttctgtaccacgtctgctggtctccagccttgtatggagttagaagcgtctgtatctctggagcagccaggcgctctggagccagctggagagagagagatcctgatacctctgtggggactgtggggacttttgggaccccacacactccaggtgggatcagatgctgctccaaccatgcagttcctggtgagggtcagaaggggacggtaccaagagtagcgcttagcccttacccaggaaatatccttcatggccacagaaatggagggcgcccaggatccaggcagccaccgggaacagtcagctttctttattaaatgtgctcacaaagcatggtgccttgt

SEQ ID NO: 7976 - protein, 589 aa, Homo sapiens
MASSQRDMEDWVQAIRRVIWAPLGGGTARRSHAHPLEPLPPGIFGQRLEETVHHERKYGPRLAPLLVEQCVDFIRERGLTEEGLFRMPGQANLVRDLQDSFDCGEKPLFDSTTDVHTVASLLKLYLRELPEPVVPFARYEDFLSCAQLLTKDEGEGTLELAKQVSNLPQANYNLLRYICKFLDEVQAYSNVNKMSVQNLATVFGPNILRPQVEDPVTIMEGTSLVQHLMTVLIRKHSQLFTAPVPEGPTSPRGGLQCAVGWGSEEVTRDSQGEPGGPGLPAHRTSSLDGAAVAVLSRTAPTGPGSRCSPGKKVQTLPSWKSSFRQPRSLSGSPKGGGSSLEVPIISSGGNWLMNGLSSLRGHRRASSGDRLKDSGSVQRLSTYDNVPAPGLVPGIPSVASMAWSGASSSESSVGGSLSSCTACRASDSSARSSLHTDWALEPSPLPSSSEDPKSLDLDHSMDEAGAGASNSEPSEPDSPTREHARRSEALQGLVTELRAELCRQRTEYERSVKRIEEGSADLRKRMSRLEEELDQEKKKYIMLEIKLRNSERAREDAERRNQLLQREMEEFFSTLGSLTVGAKGARAPK

SEQ ID NO: 7977 - DNA, 2802 bp, Homo sapiens
gctcagcttggacagccacgcgtgcgcccaggccaggcggagggactgccccgccctggtccagtgattgatcagcagtgattactgaggctttaatggtccgcttggatgggaattaattctgggatggataaataatgcatcgaggtttatgtagtccaaggcgagccgtccgtccggagccaggagaggtagccgagggagcctgacgggtgacgccagcggccacggggccccgaacgagcaggacatgaggggcgactaggcgcgaggacgagcaaaagcaagtggatgacagcatgaacggccctgcggggctggccggacggctgcaagaacatgctgagcccaaagatcaggcaggccaggagggcccgctccaaaagcctagtgatgggggagcagagccggagccctgggcggatgccgtgccctcacaggctgggccccgtgctgaaggcgggctggctgaagaagcagaggagcatcatgaagaactggcagcagcgctggtttgtgctgcgtggggatcagcttttctactacaaggacaaagatgagatcaagccccagggatttatttctctacaagggacacaggtgactgaacttcctcctggccccgaggacccagggaagcacctctttgagatcagcccaggtggtgccggggagcgggagaaggtgccggccaaccccgaggcgctcctgctcatggccagctcccagcgtgacatggaggactgggtgcaggccatccgccgagtcatctgggccccgctgggcggagggatctttgggcagcgcctagaggaaacagtccaccacgagcggaagtatggcccccgcctggcgcccctgctggtggagcagtgtgtggacttcatccgggagcgcgggctcactgaggaggggctgttccgcatgccaggccaggccaacctggtgagggacctgcaggattccttcgactgtggggagaagccactgtttgacagcacaacagacgtgcacacggtggcctccctgctgaagctgtacctgcgggagctccccgagcccgtggtccccttcgccaggtacgaggacttcctcagctgcgcccagctgctcaccaaggacgagggggagggcactctggagttggctaaacaagtgagcaaccttcctcaggcaaattacaacctgctcagatacatctgcaagtttctggatgaagttcaggcatactcaaatgtcaacaagatgagtgtccagaatctggcaaccgtttttggacctaacattctgcggccacaggtagaggacccagtaaccatcatggaaggcacttccctcgtccagcacctgatgaccgtcctcatccgcaaacacagccagctcttcacggcaccggtcccggaagggcccacctccccgcgcgggggcctgcaatgcgcagtggggtggggctccgaggaggtcaccagggacagccaaggagagcccggcggccccggcctgcccgcgcacaggacctcttccctggacggggcggccgtggcggtgctctccagaacagcccccacggggccggggagccggtgcagccctgggaagaaggtgcagaccctgcccagttggaagtcctccttccggcagccgaggtccctatcgggaagcccgaaggggggcggctcatccctggaggtgcccatcatctcctccggcgggaactggcttatgaacgggctgtcctccctgcgcggacaccgccgggcctcgtcgggagaccggctcaaggactcgggctccgtgcagagactctccacctacgacaatgtgcccgcgccgggcctggtccccggcatacccagcgtggccagtatggcgtggtccggggcctcgtccagcgagtcgtcggtggggggctcactcagcagctgcacggcctgccgcgccagcgactcgtctgcccgcagttccctgcacaccgactgggccctggagccctccccgctccccagcagcagcgaggaccccaagtccctggacctggaccacagcatggacgaggcgggcgcgggtgccagcaacagcgagcccagcgagccggacagccccacccgggaacacgcgcgccgctccgaggccttacaggggctggtcactgagctcagggccgagctgtgccgccagcggactgagtacgagaggagtgtgaaaagaatcgaagaagggagtgctgacctgagaaaacgaatgtcccggttagaagaagaactggaccaggaaaagaaaaaatacatcatgctggaaataaagctgcggaactctgaacgggcgcgggaggatgcggagaggaggaaccagctgttgcagagggaaatggaggagtttttttcgaccctaggaagcttgactgttggggcaaaaggtgccagggccccaaagtaaaaggaatggcagagctcacttctgtaccacgtctgctggtctccagccttgtatggagttagaagcgtctgtatctctggagcagccaggcgctctggagccagctggagagagagagatcctgatacctctgtggggactgtggggacttttgggaccccacacactccaggtgggatcagatgctgctccaaccatgcagttcctggtgagggtcagaaggggacggtaccaagagtagcgcttagcccttacccaggaaatatccttcatggccacagaaatggagggcgcccaggatccaggcagccaccgggaacagtcagctttctttattaaatgtgctcacaaagcatggtgccttgt

SEQ ID NO: 7978 - protein, 698 aa, Homo sapiens; identical to SEQ ID NO: 1160

SEQ ID NO: 7979 - DNA, 3297 bp, Homo sapiens
agaggcgccgagcagccgggagctccgtcctgcctgaggatgcggggcccaggctgcatccccccggccctgctcgcctgctcatcacacggaggccggggacagggtcacggccagggagcctgcggggctaaaggagcgggccgggagctcaagagctgccgccgggcggcgaggaaggagccccaggcaggccccgggcggccgaggcaggggaggagacggctggccctggttccaggtgagcagccccgcccgctctgctggaggccccgcttaccaccggcgggagatgcgggtgcaagccctggggcgcacgtggccaggccactgccacgcccgagggacgggttttcgtcgccacctcggccctggtgaaccctgtgactggagtgcctcccaatcccaccgtgatgcccacctcggggcgctgccaggtgccaggctaatgcgtgtgatccacagtgtgctgagaagtgctgactgtcattgtgaatgtccgtggtggggtgacgcccgggcagggtgcactggcctggttccagaagacctggcctctccagctcccacggcgcgcccgtttgctgcgtggcccatgctgctggcggctgctcctggctgagtcattccaagacgagcgtccagtccgcgctctctgccgcccttcccagcgctgcccggcaggccccgggaactgtgcccagctgtgcccgcttagctggtgtatgacctgcctttgaacttgctgcaaagaaagatgtggatctcctgttactggaaaacaggaattagcttgtctgcttgaggatgtggttggttctttataaaaaggatacagaagaaatttgcacagactgccagcttcattatgctgccgacagcttccagcaaaaggaggacgtttgcagccagatatttcacccgctccaaaagcctagtgatgggggagcagagccggagccctgggcggatgccgtgccctcacaggctgggccccgtgctgaaggcgggctggctgaagaagcagaggagcatcatgaagaactggcagcagcgctggtttgtgctgcgtggggatcagcttttctactacaaggacaaagatgagatcaagccccagggatttatttctctacaagggacacaggtgactgaacttcctcctggccccgaggacccagggaagcacctctttgagatcagcccaggtggtgccggggagcgggagaaggtgccggccaaccccgaggcgctcctgctcatggccagctcccagcgtgacatggaggactgggtgcaggccatccgccgagtcatctgggccccgctgggcggagggatctttgggcagcgcctagaggaaacagtccaccacgagcggaagtatggcccccgcctggcgcccctgctggtggagcagtgtgtggacttcatccgggagcgcgggctcactgaggaggggctgttccgcatgccaggccaggccaacctggtgagggacctgcaggattccttcgactgtggggagaagccactgtttgacagcacaacagacgtgcacacggtggcctccctgctgaagctgtacctgcgggagctccccgagcccgtggtccccttcgccagggcactctggagttggctaaacaagtgagcaaccttcctcaggcaaattacaacctgctcagatacatctgcaagtttctggatgaagttcaggcatactcaaatgtcaacaagatgagtgtccagaatctggcaaccgtttttggacctaacattctgcggccacaggtagaggacccagtaaccatcatggaaggcacttccctcgtccagcacctgatgaccgtcctcatccgcaaacacagccagctcttcacggcaccggtcccggaagggcccacctccccgcgcgggggcctgcaatgcgcagtggggtggggctccgaggaggtcaccagggacagccaaggagagcccggcggccccggcctgcccgcgcacaggacctcttccctggacggggcggccgtggcggtgctctccagaacagcccccacggggccggggagccggtgcagccctgggaagaaggtgcagaccctgcccagttggaagtcctccttccggcagccgaggtccctatcgggaagcccgaaggggggcggctcatccctggaggtgcccatcatctcctccggcgggaactggcttatgaacgggctgtcctccctgcgcggacaccgccgggcctcgtcgggagaccggctcaaggactcgggctccgtgcagagactctccacctacgacaatgtgcccgcgccgggcctggtccccggcatacccagcgtggccagtatggcgtggtccggggcctcgtccagcgagtcgtcggtggggggctcactcagcagctgcacggcctgccgcgccagcgactcgtctgcccgcagttccctgcacaccgactgggccctggagccctccccgctccccagcagcagcgaggaccccaagtccctggacctggaccacagcatggacgaggcgggcgcgggtgccagcaacagcgagcccagcgagccggacagccccacccgggaacacgcgcgccgctccgaggccttacaggggctggtcactgagctcagggccgagctgtgccgccagcggactgagtacgagaggagtgtgaaaagaatcgaagaagggagtgctgacctgagaaaacgaatgtcccggttagaagaagaactggaccaggaaaagaaaaaatacatcatgctggaaataaagctgcggaactctgaacgggcgcgggaggatgcggagaggaggaaccagctgttgcagagggaaatggaggagtttttttcgaccctaggaagcttgactgttggggcaaaaggtgccagggccccaaagtaaaaggaatggcagagctcacttctgtaccacgtctgctggtctccagccttgtatggagttagaagcgtctgtatctctggagcagccaggcgctctggagccagctggagagagagagatcctgatacctctgtggggactgtggggacttttgggaccccacacactccaggtgggatcagatgctgctccaaccatgcagttcctggtgagggtcagaaggggacggtaccaagagtagcgcttagcccttacccaggaaatatccttcatggccacagaaatggagggcgcccaggatccaggcagccaccgggaacagtcagctttctttattaaatgtgctcacaaagcatggtgccttgt

SEQ ID NO: 7980 - protein, 396 aa, Homo sapiens
MSVQNLATVFGPNILRPQVEDPVTIMEGTSLVQHLMTVLIRKHSQLFTAPVPEGPTSPRGGLQCAVGWGSEEVTRDSQGEPGGPGLPAHRTSSLDGAAVAVLSRTAPTGPGSRCSPGKKVQTLPSWKSSFRQPRSLSGSPKGGGSSLEVPIISSGGNWLMNGLSSLRGHRRASSGDRLKDSGSVQRLSTYDNVPAPGLVPGIPSVASMAWSGASSSESSVGGSLSSCTACRASDSSARSSLHTDWALEPSPLPSSSEDPKSLDLDHSMDEAGAGASNSEPSEPDSPTREHARRSEALQGLVTELRAELCRQRTEYERSVKRIEEGSADLRKRMSRLEEELDQEKKKYIMLEIKLRNSERAREDAERRNQLLQREMEEFFSTLGSLTVGAKGARAPK

SEQ ID NO: 7981 - DNA, 790 bp, Homo sapiens
gctcagcttggacagccacgcgtgcgcccaggccaggcggagggactgccccgccctggtccagtgattgatcagcagtgattactgaggctttaatggtccgcttggatgggaattaattctgggatggataaataatgcatcgaggtttatgtagtccaaggcgagccgtccgtccggagccaggagaggtagccgagggagcctgacgggtgacgccagcggccacggggccccgaacgagcaggacatgaggggcgactaggcgcgaggacgagcaaaagcaagtggatgacagcatgaacggccctgcggggctggccggacggctgcaagaacatgctgagcccaaagatcaggcaggccaggagggcccgctccaaaagcctagtgatgggggagcagagccggagccctgggcggatgccgtgccctcacaggctgggccccgtgctgaaggcgggctggctgaagaagcagaggagcatcatgaagaactggcagcagcgctggtttgtgctgcgtggggatcagcttttctactacaaggacaaagatgagatcaagccccagggatttatttctctacaagggacacaggtgactgaacttcctcctggccccgaggacccagggaagcacctctttgagatcagcccaggtggtgccggggagcgggagaaggtgccggccaaccccgaggcgctcctgctcatggccagctcccagcgtgacatggaggactgggtgcaggccatccgccgagtcatctgggccccgctgggcggag

SEQ ID NO: 7982 - protein, 149 aa, Homo sapiens
MLSPKIRQARRARSKSLVMGEQSRSPGRMPCPHRLGPVLKAGWLKKQRSIMKNWQQRWFVLRGDQLFYYKDKDEIKPQGFISLQGTQVTELPPGPEDPGKHLFEISPGGAGEREKVPANPEALLLMASSQRDMEDWVQAIRRVIWAPLG

SEQ ID NO: 7983 - DNA, 845 bp, Homo sapiens
aggcggagggactgccccgccctggtccagtgattgatcagcagtgattactgaggctttaatggtccgcttggatgggaattaattctgggatggataaataatgcatcgaggtttatgtagtccaaggcgagccgtccgtccggagccaggagaggtagccgagggagcctgacgggtgacgccagcggccacggggccccgaacgagcaggacatgaggggcgactaggcgcgaggacgagcaaaagcaagtggatgacagcatgaacggccctgcggggctggccggacggctgcaagaacatgctgagcccaaagatcaggcagagccaaaccatatcacgctccttccctgagtccttgacctggagtagatgcctgggttgtctccatttctcaaatgaggaaactgaaggactgacatcaggccaagactaacaggtactcactctcagatagcgcctgaaagctgacacaagttcagtgagactgctaggacaaccccctgccgtgccattaatgtctgcccacaaaaacctcacacctttggctggctctatcttccatggccctcatctcagcaccacctgggggtacgatgaagatgccatcaggtgtcggagctcatcttgtgctcacagctcacaggaccgcccctgtgtcagatgcccttcacttctggacctcataacctccacccagctcaagttgacttagcaagccctaactgtgcatccttcataagctgtaaattgttactcaaaccagccaagaggatgtcactgctattattattgcattactgttttgatattgctgttgttatttataacacttcctcaa

SEQ ID NO: 7984 - protein, 44 aa, Homo sapiens [sequence omitted]

SEQ ID NO: 7985 - DNA, 1092 bp, Homo sapiens
gctcagcttggacagccacgcgtgcgcccaggccaggcggagggactgccccgccctggtccagtgattgatcagcagtgattactgaggctttaatggtccgcttggatgggaattaattctgggatggataaataatgcatcgaggtttatgtagtccaaggcgagccgtccgtccggagccaggagaggtagccgagggagcctgacgggtgacgccagcggccacggggccccgaacgagcaggacatgaggggcgactaggcgcgaggacgagcaaaagcaagtggatgacagcatgaacggccctgcggggctggccggacggctgcaagaacatgctgagcccaaagatcaggcaggccaggagggcccgctccaaaagcctagtgatgggggagcagagccggagccctgggcggatgccgtgccctcacaggctgggccccgtgctgaaggcgggctggctgaagaagcagaggagcatcatgaagaactggcagcagcgctggtttgtgctgcgtggggatcagcttttctactacaaggacaaagatgagatcaagccccaggaagcatgatgctgacctctgctcagcttctggagatgcctcaggaaacttagaatcatggcggaaggcaaagagggagcagtcatgtcacatggccagagcaggagcaaaagagagagcagggaggtgccacacacacttttaaaccaccagatttcgtgagaattcactctattttgaggacagcaccaagaagatggtgctaaccactcaagagaaaccgcccccatgatccaaataccttccgccaggccccacctccaacactggggattacaattaaacatgagatttggatggagacacagagccaaaccatatcacgctccttccctgagtccttgacctggagtagatgcctgggttgtctccatttctcaaatgaggaaactgaaggactgacatcaggccaagactaacaggtactcactctcagatagcgcctgaaagctgacacaagttcagtgagactgctaggacaaccccctgccgtgccattaatgtctgcccacaaaaacc

SEQ ID NO: 7986 - protein, 86 aa, Homo sapiens [sequence omitted]

SEQ ID NO: 7987 - DNA, 544 bp, Homo sapiens
tatagctgtggtaacagaggcacaaagagataaagtggctagtctgatccactcagccagtatatgatggtcagattttgatcccagggctgtctaattccaaaacccaagttccaaacacaaagaaatgcctatgggccagttcatctccccatgctggatttcagcttataccccagcatggctcctgagcagtacaaggtggtatagtcagagctttgggaggctgggaactgagcagaagagctggatagtttaggcaaggaatgatcaaggccccaactgaagcaaagtggaaatgatttccatggccagttgaaaacaaccctgtggcattgcacagtgggaatccatgaagataaagagccagaagatatgagtgtgactcctggctccgtcactcttgatctgagtgactcgagaaagtcccttaacatctctgagcctgcttctccatccaaccaatggataagataatgtatgccctacctatctgagatgggaagacagtgtatgaaaaacacttaagaaactgtccaacttt

SEQ ID NO: 7988 - protein, 43 aa, Homo sapiens [sequence omitted]

SEQ ID NO: 7989 - DNA, 597 bp, Homo sapiens
agtgaactggcagtgaaggatttacactcaggtctcttgggccccaaaatctaagtactgcacacgactctgcagacctccatggagtgactctttctaaaaagctttatgccaacagacaccagaggaggaaggtggtcaccaggcatcactgtccaccttacatagagtctcgctctgttgcccaggctaaagtgcagtgatgcaatcttggctcatggcacctctgcctcccaagttcaagcaattctcctgccttagcctcctgagtagctgggattacaagcacacccaccgcgtccagctagtttttttgtatttttagcagagacagggtttcaccatgttggtcagagtagtctcaaactcctgacctcaggtgatctgcactgcctcagcctcccaatgtgctgggattacaggcatgagccactgcgcccggcctaggccctctcttttgatgatctcaacaatccttgccagatggtgttcgtatccccattttaaagaagagaaaaaaagagacatggacagattaactgattcatcaagggtcaagccaagctcatcagtggccaagcaggcatgggaagccaa

SEQ ID NO: 7990 - protein, 56 aa, Homo sapiens
MSHCARPRPSLLMISTILARWCSYPHFKEEKKRDMDRLTDSSRVKPSSSVAKQAWE

SEQ ID NO: 7991 - DNA, 4227 bp, Homo sapiens
ttctccagaccacgccaccagccaacagaagcgagacttccagtccgaggtcctgctttctgctatggaactattccacatgacaagtggaggtgatgcagcgatgttcagagacggcaaagagcctcagccaagtgcagaagctgctgctgccccttctcttgccaacatctcctgcttcacccagaagctggtggagaagctgtacagtgggatgttctcggcagaccccaggcatatcctcctcttcatcctggagcacatcatggtggtcattgagactgcctcttctcaaagggacactgtcctcagcactttatacagcagtttaaataaagtcattctttattgcctatccaagccccagcagtccctctccgaatgcctcggccttctcagcatcctgggctttctgcaggagcactgggatgttgtctttgccacctacaattccaacatcagcttcctcctgtgtctcatgcattgccttttgctactcaatgagagaagttacccagaaggatttggattggagcccaagcctagaatgtctacttatcatcaagtcttcctttccccaaatgaagacgtgaaagaaaaaagagaagacttaccaagtttgagtgatgtccaacacaacatccagaagacagtgcagactctctggcagcagctggtggcacaaaggcagcagaccctggaggatgccttcaagatcgatctctctgtgaaacctggagagagggaagtgaagattgaagaggtcacaccgctctgggaggagacgatgctcaaggcctggcagcattacttagcatctgagaagaagtcactggcaagtcgttcaaatgttgcacaccacagcaaagtcactttgtggagtggaagcctgtcctcagccatgaagctgatgcccgggcggcaggccaaggaccctgagtgcaagacagaggattttgtgtcatgtatagagaactacagaagaagaggacaagagctatatgcatctttatacaaagaccatgtgcaaaggcgaaaatgtggcaacatcaaggcagccaacgcctgggccaggatccaggagcagctttttggggagctgggcttgtggagccagggggaagaaaccaagccctgttccccatgggaactcgactggagagaaggaccagctcgaatgaggaaacgcatcaaacgcttgtctcctttggaggccctgagctcaggaaggcacaaggaaagccaagacaaaaatgatcatatttctcaaacaaatgctgaaaaccaagatgaactgacactgagggaggctgagggcgagccggacgaggtgggggtggactgcacccagctgaccttcttcccagccttacacgaaagtctgcactcagaagacttcttggaactgtgtcgggaaagacaagttattttacaagagcttcttgataaagaaaaggtgacgcagaagttctccctggtgattgtgcagggccacctggtgtcagaaggggtcctgctttttggccaccaacacttctacatctgcgagaacttcacactgtctcccacgggtgatgtctactgtacccgtcactgcttatccaacatcagcgatccgttcattttcaacctgtgcagcaaagacaggtccactgaccattactcgtgccagtgccacagctacgctgacatgcgggagctacggcaggctcgcttcctcctgcaggacatcgccctggagatcttcttccacaatggatattccaagtttcttgtcttctacaacaatgatcggagtaaggcctttaaaagcttctgctctttccaacccagcctgaaggggaaagccacctcggaggacaccctcagtctaaggagataccccggctctgacaggatcatgctgcagaagtggcagaaaagggacatcagcaattttgagtatctcatgtacctcaacaccgcggctgggagaacctgcaatgactacatgcagtacccagtgttcccctgggtcctcgcagactacacctcagagacattgaacttggcaaatccgaagattttccgggatctttcaaagcccatgggggctcagaccaaggaaaggaagctgaaatttatccagaggtttaaagaagttgagaaaactgaaggagacatgactgtccagtgccactactacacccactactcctcggccatcatcgtggcctcctacctggtccggatgccacccttcacccaggccttctgcgctctgcagggcggaagcttcgacgtggcagacagaatgttccacagtgtgaagagcacgtgggagtcggcctccagagagaacatgagtgacgtcagggagctgaccccagagttcttctacctgcctgagttcttaaccaactgcaacggggtagagttcggctgcatgcaggacgggactgtgctaggagacgtgcagctccctccctgggctgatggggaccctcggaaattcatcagcctgcacagaaaggccctggaaagtgactttgtcagtgccaacctccaccattggatagaccttatttttgggtacaagcagcaggggccagccgcagtggatgctgttaatatcttccacccctacttctacggtgacagaatggacctcagcagcatcactgaccccctcatcaaaagcaccatcctggggtttgtcagcaactttggacaggtgcccaaacagctctttaccaaacctcacccagccaggactgcagcagggaagcctctgcctggaaaggatgtctccacccccgtgagcctgcctggccacccacagccctttttctacagcctgcagtcgctgaggccctcccaggtcacggtcaaagatatgtacctcttttctctaggctcagagtcccccaaaggggccattggccacattgtctctactgagaagaccattctggctgtagagaggaacaaagtgctgctgcctcctctctggaacaggaccttcagctggggctttgatgacttcagctgctgcttggggagctacggctccgacaaggtcctgatgacattcgagaacctggctgcctggggccgctgtctgtgcgccgtgtgcccatccccaacaacgattgtcacctctgggaccagcactgtggtgtgtgtgtgggagctcagcatgaccaaaggccgcccgaggggcttgcgcctccggcaggccttgtatggacacacacaggctgtcacgtgcctggcagcgtcagtcaccttcagcctcctggtgagcggctcccaggactgcacctgtatcctgtgggatctggaccacctcacccacgtgacccgcctgcccgcccatcgggaaggcatctcagccatcaccatcagtgacgtctcaggcaccattgtctcctgtgcgggagcacacttgtccctgtggaatgtcaatggacagcccctggccagcatcaccacagcctggggcccagaaggagccataacctgctgctgcctgatggagggcccagcatgggacacaagccagatcatcatcaccgggagtcaagacggcatggtccgggtttggaagactgaggatgtgaagatgtctgttcctggacggccagcaggagaggagcccccggctcagcctccaagcccaagaggccacaagtgggagaagaacctggccttgagtcgagagctggacgttagcattgctttgacagggaagcccagcaaaaccagccccgcagtgactgctctggccgtgtccagaaaccacaccaaactcctggttggtgatgagagggggagaatattctgctggtctgcagatgggtaggaagagagaggcagcagaggctctggcacaacagtgccaggctgagggtggcagaggtgactggggcctgagctctgcctacagaagaaacccccagggcctccttccccacagttctcaaggaagggcctctggcaatcacagctctgcagcccaaccctctccatggccgatgggacttctatgaaaaggatgagcacacacactcggagggctgagcagcacgctggaaactgtgacttggtgatgcccagctgcacacgaaattacacatgactcaccttattaagggctattgcactgaaaaaaaaaaagatgggtcgcttactggaaattattgtattgtctttattttattaaagcaactatgttttaaatgcaga

SEQ ID NO: 7992 - protein, 1259 aa, Homo sapiens
MELFHMTSGGDAAMFRDGKEPQPSAEAAAAPSLANISCFTQKLVEKLYSGMFSADPRHILLFILEHIMVVIETASSQRDTVLSTLYSSLNKVILYCLSKPQQSLSECLGLLSILGFLQEHWDVVFATYNSNISFLLCLMHCLLLLNERSYPEGFGLEPKPRMSTYHQVFLSPNEDVKEKREDLPSLSDVQHNIQKTVQTLWQQLVAQRQQTLEDAFKIDLSVKPGEREVKIEEVTPLWEETMLKAWQHYLASEKKSLASRSNVAHHSKVTLWSGSLSSAMKLMPGRQAKDPECKTEDFVSCIENYRRRGQELYASLYKDHVQRRKCGNIKAANAWARIQEQLFGELGLWSQGEETKPCSPWELDWREGPARMRKRIKRLSPLEALSSGRHKESQDKNDHISQTNAENQDELTLREAEGEPDEVGVDCTQLTFFPALHESLHSEDFLELCRERQVILQELLDKEKVTQKFSLVIVQGHLVSEGVLLFGHQHFYICENFTLSPTGDVYCTRHCLSNISDPFIFNLCSKDRSTDHYSCQCHSYADMRELRQARFLLQDIALEIFFHNGYSKFLVFYNNDRSKAFKSFCSFQPSLKGKATSEDTLSLRRYPGSDRIMLQKWQKRDISNFEYLMYLNTAAGRTCNDYMQYPVFPWVLADYTSETLNLANPKIFRDLSKPMGAQTKERKLKFIQRFKEVEKTEGDMTVQCHYYTHYSSAIIVASYLVRMPPFTQAFCALQGGSFDVADRMFHSVKSTWESASRENMSDVRELTPEFFYLPEFLTNCNGVEFGCMQDGTVLGDVQLPPWADGDPRKFISLHRKALESDFVSANLHHWIDLIFGYKQQGPAAVDAVNIFHPYFYGDRMDLSSITDPLIKSTILGFVSNFGQVPKQLFTKPHPARTAAGKPLPGKDVSTPVSLPGHPQPFFYSLQSLRPSQVTVKDMYLFSLGSESPKGAIGHIVSTEKTILAVERNKVLLPPLWNRTFSWGFDDFSCCLGSYGSDKVLMTFENLAAWGRCLCAVCPSPTTIVTSGTSTVVCVWELSMTKGRPRGLRLRQALYGHTQAVTCLAASVTFSLLVSGSQDCTCILWDLDHLTHVTRLPAHREGISAITISDVSGTIVSCAGAHLSLWNVNGQPLASITTAWGPEGAITCCCLMEGPAWDTSQIIITGSQDGMVRVWKTEDVKMSVPGRPAGEEPPAQPPSPRGHKWEKNLALSRELDVSIALTGKPSKTSPAVTALAVSRNHTKLLVGDERGRIFCWSADG

SEQ ID NO: 7993 - DNA, 624 bp, Homo sapiens
caggctggtgtcaagactgtgctaatgacctccaggtcctaagtctcttgttgcctggtgacaaagtttcacagttgaggaggagaagctgggactagcaggcttcacgagaaacacaaaggtatagccttgctcactgcatatccactgacctgacccatagtacaactccagtaggaactgttggacagatgactgaatgaggagactgaactgtagccagctctagagattaaaaaaagtcatggagattcagaaagacaggaagttactgcatataaaggttaacacccaccctcaccttctacaaacagcctcagctaaagatacctgggaggagcttgtagaagatgccactctctgcaatccagaggaaaatgtctttccctttgagcggatcatttctaccaaggtcaaactcatattttacattgagtttgtatgaaaaaaaaatcagatgtttaatttttcatgtaatcaaagaacaataacaaaagcaaaccttcacttgaggactgactctggactggttctggaagctgtacaagggacatccccagccacgtggtaactggcatgagcccacaattaatatgcattaaatcagtcactcctcaagtcaaa

SEQ ID NO: 7994 - protein, 66 aa, Homo sapiens [sequence omitted]

SEQ ID NO: 7995 - DNA, 6733 bp, Homo sapiens
caacgtgctgagctaatagcgacagatagagggcagacagattcctgctagcagcttagtgttagttgcttgtggtaactaaggcaggtggcatacatctcagaacgtggagaatgatggtatgctttctgagttaacatgttgaactgttttgcttttctaaaaattttcctagtaacattttcttgatgatatgagagtggatatcaatgcctcacagaaacaagaggtggaacatgtgaatgaatcgtcttggaactagattatgagcactggttctttttaaagggatgtgcaagaggcagccttggcaagaaaacttgctgcataatcttacatggactaaagatgaaactttaaaccgcaaatcagctttgagtgaactttgacagaagatgtttcgacagttttatctctggacatgtttagcttcagggatcatcctgggctctctctttgaaatctgcttgggccagtatgatgatggtacaattctggtggacaacatgctgatcaaagggactgctggaggaccagaccccaccatagaactttctttaaaggataatgtggattactgggtgttgatggatcctgttaagcaaatgcttttcctgaacagcaccggaagagttctggatagagatccaccgatgaacatacactccattgtggtgcaggtccagtgcatcaacaaaaaagtgggcactattatctaccatgaagtgcgaatagtggtgagagacaggaatgacaactcacccactttcaagcatgaaagctactatgccacagtgaatgagctcactccagttggtaccacaatattcacaggattttcaggagacaatggagctacagatatagatgatggaccaaatggacagatagagtatgttattcagtataatccagatgatccgacatccaatgacacctttgaaattcccctaatgttgactggaaatatagtgttaaggaagaggctcaactatgaagataagactcgctactttgtcataatccaagctaatgaccgtgcccaaaatctgaatgagaggcgaaccaccaccaccactctcacagtggatgttctggatggagatgacttgggtccaatgtttcttccttgtgtccttgtgccaaacactcgtgattgccgtccactcacttatcaagctgccatacctgagttgagaactccggaagaactgaaccccattattgttacgccaccaatccaagccattgatcaggaccggaatattcaaccgccatcagataggccaggaatcctctattccatccttgttgggactcctgaggattacccacgatttttccatatgcatcctaggacagcagaacttagtctcctggagccagtaaacagagactttcaccagaaatttgatttggttattaaggctgaacaagacaatggtcatcctcttcctgcctttgccggtctacacattgaaatactggatgaaaacaatcaaagtccatattttacaatgcccagttatcaaggctatatcctggaatctgccccagtgggagcaaccatttcggacagtctcaatttgacttcacctttaagaatagtagctctggacaaggacatagaagatacaaaagacccagagcttcacctttttctgaatgactacacctcagtcttcaccgtcacacagactggtattactcgctacctcaccttacttcaaccagtggacagggaagaacagcaaacttacaccttttcgataacagcatttgatggtgtacaagaaagtgagccagtcatcgtcaatattcaagtgatggatgcaaatgataacacgccaaccttccctgaaatatcctatgatgtgtatgtttatacagacatgagacctggggacagtgtcatacagctcactgcagtcgacgcagacgaagggtcaaatggggagatcacatatgaaatccttgttggggctcagggagacttcatcatcaataaaacaacagggcttatcaccatcgctccaggggtggaaatgatagtcgggcggacttacgcactcacggtccaagcagcggataatgctcctcctgcagagcgaaggaactccatctgcactgtgtatattgaagtgcttccaccaaataatcaaagccctcctcgcttcccacagctgatgtatagccttgaaattagtgaagccatgagggttggtgctgttttattaaatctacaggcaactgatcgagagggagactcaataacatatgccattgagaatggagatcctcagagagtttttaatctttcagaaaccacggggattctaaccttagggaaagcactggacagggaaagcactgatcgctacattctgatcatcacagcttcagatggcaggccagatgggacctcaactgccacagtaaacatagtggtgacagatgtcaatgacaatgctccagtgtttgatccttatctgccaagaaatttatctgtggtggaagaagaagccaatgcctttgtgggtcaagtaaaagcaacagaccctgatgctggaataaatggtcaagtgcactacagtttgggtaactttaataatctttttcgtatcacatccaatgggagcatttacacagcagtgaagcttaacagagaagtcagggactactatgaacttgttgttgtggcaacagatggagcagtacaccctcgtcattcaactctaaccttggccatcaaggttttggacattgatgataacagtcctgtgttcaccaattcaacatacactgtccttgttgaagagaatttgccagctgggactaccatccttcaaatagaggccaaagatgtcgaccttggagcaaatgtgtcttaccggataagaagcccagaagtgaagcacttttttgcactacatccatttacaggagaactatcgcttttaaggagtttagattatgaggcatttccagaccaagaagcaagtatcacttttctggtagaggcctttgatatttatggaacaatgccacctggtattgctactgtcacagtgattgtaaaggatatgaatgattatcctcctgtctttagtaaacgaatatacaaagggatggtggctccggatgcagtcaagggtacacctatcacaacagtttatgctgaagatgcagaccctcctggattacctgcaagtcgtgtgaggtatagagtagatgatgtacagtttccttaccctgccagtatttttgaagtggaagaagattctggaagagtaataacacgagtcaatcttaatgaagaacctacaacaatttttaagttggtggtggttgcttttgatgatggggagcctgtgatgtccagcagtgccacagtgaagattcttgtcttacatcctggtgagatcccacgcttcacacaggaggaatatagacctcctccagtaagtgaacttgccaccaaagggaccatggttggtgtaatttctgctgctgccattaatcaaagtattgtgtactccattgtttcaggaaatgaagaagatacatttggaattaataacatcacaggtgttatctatgtgaatggacctctggattatgagaccaggacaagctatgtacttcgagtccaagctgattccctggaagtggtccttgccaatctccgagttccttcaaaaagcaatacagctaaagtatacattgagattcaggatgaaaataatcatcccccagtgtttcagaaaaaattctacatcggaggtgtatctgaagatgcaagaatgtttacttctgtactcagagtgaaggctactgataaagatactggcaattatagtgtcatggcctacagactcataataccaccaattaaagagggaaaagaaggatttgtagtggaaacatatacagggcttatcaaaactgctatgctcttccataatatgaggagatcctacttcaagtttcaagttattgcaactgacgactatgggaagggactgagcggcaaagccgatgtactcgtctccgtggtcaatcagctggatatgcaagtcattgtttccaatgtgcctcctactctagtggaaaaaaagatagaagatcttacagagatcttggatcgctatgttcaggaacaaattcctggtgccaaggtcgtagtggagtccattggagctcgccggcatggagatgccttttccctagaagattacaccaaatgtgacttgactgtctatgcaattgacccccaaaccaacagagccatcgatagaaatgagctttttaaatttttggatggcaaactacttgatatcaataaagactttcagccgtattatggggaaggaggacgcattctggagatccggactccagaggcagtgaccagcattaaaaagagaggagaaagtctaggatacacagaaggggccttgttggctctggccttcatcatcatcctctgctgcattcctgccatcttggtggttttggtcagctacagacagtaagtacgtcaagctgagtgtacaaagactgcacgaattcaggccgcattacccgcggctaaaccagcagtgccggctcctgcaccagtggcagcgcccccgccgccgccgccgcctccgccaggtgcgcatctctatgaagaacttggagacagctcaattcttttccttctctaccattttcaacaaagcaggggaaataactcagtctcagaagacaggaaacatcaacaagttgtgatgcccttttcttccaatactattgaggctcacaagtcagctcatgtagacggatcacttaagagcaacaaactgaagtctgcaagaaaattcacatttctatctgatgaggatgacttaagtgcccataatcccctttataaggaaaacataagtcaagtatcaacaaattcagacatttcacagagaacagattttgtagacccattttcacccaaaatacaagccaagagtaagtctctgaggggcccaagagaaaagattcagaggctgtggagtcagtcagtcagcttacccaggaggctgatgaggaaagttccaaatagaccagagatcatagatctgcagcagtggcaaggcaccaggcagaaagctgaaaatgaaaacactggaatctgtacaaacaaaagaggtagcagcaatccattgcttacaactgaagaggcaaatttgacagagaaagaggaaataaggcaaggtgaaacactgatgatagaaggaacagaacagttgaaatctctctcttcagactcttcattttgctttcccaggcctcacttctcattctccactttgccaactgtttcaagaactgtggaactcaaatcagaacctaatgtcatcagttctcctgctgagtgttccttggaactttctccttcaaggccttgtgttttacattcttcactctctaggagagagacacctatttgtatgttacctattgaaaccgaaagaaatatttttgaaaattttgcccatccaccaaacatctctccttctgcctgacattttttccactttccgtttcaacgtctggtcccccaacaagcttcatttctgtccacagagtgtgtctgtataacaggtgttaaatgcacgaccaacttgatgcctgccgagaaaattaagtcctctatgacacagctatcaacaacgacagtgtgtaaaacagaccctcagagagaaccaaaaggcatcctcagacacgttaaaaacttagcagaacttgaaaaatcagtagctaacatgtacagtcaaatagaaaaaaactatctacgcacaaatgtttcagaacttcaaactatgtgcccttcagaagtaacaaatatggaaatcacatctgaacaaaacaaggggagtttgaacaatattgtcgagggaactgaaaaacaatctcacagtcaatctacttcactgtaatgttgcttttcttattttagtcgggcaaacctcttgttgatcatagtcttcaagttgaacatcaaatttgaacgtcaaagaagactctattattttaccccaaattcaatgaaatgcagttttttttctcgtttttaatttaaaaagatattaacctcatcactactaactcactcatataatagatttaccttactttttaaaaactacaaagtagcataatttgttctacatttatttgaaaagtaagtaattttaatctcttttttagtgggaatatgtgggcatgaaaattagatacccaacttaaaccaaaggcatgtctatcatgtggatgcagtaacatttacatttagtttttgatcgtagttttatatgaatgttccaagaaaaaagcagactgttacaaataagttaaaactgatatgattgataggttctgttttttcttgaagcctatgtatttggtaagaagaaatactaccgaagtaaaatataatgtacctagattgtaggagatgacagacataaggtatttcaaaataaatctcaggtgctataacatgtagtcatctgttttctgataagaacatcttttactctgacttgcttttatcttagtagtatgcttatggatttagtagtatgcttatggatttgataaatcttatactttttcagttgctgtcttattctctttatttctcattgtgctttcccttcccttctttataatgaaaataaatcttgagtcgttg

SEQ ID NO: 7996 - protein, 1379 aa, Homo sapiens
MFRQFYLWTCLASGIILGSLFEICLGQYDDGTILVDNMLIKGTAGGPDPTIELSLKDNVDYWVLMDPVKQMLFLNSTGRVLDRDPPMNIHSIVVQVQCINKKVGTIIYHEVRIVVRDRNDNSPTFKHESYYATVNELTPVGTTIFTGFSGDNGATDIDDGPNGQIEYVIQYNPDDPTSNDTFEIPLMLTGNIVLRKRLNYEDKTRYFVIIQANDRAQNLNERRTTTTTLTVDVLDGDDLGPMFLPCVLVPNTRDCRPLTYQAAIPELRTPEELNPIIVTPPIQAIDQDRNIQPPSDRPGILYSILVGTPEDYPRFFHMHPRTAELSLLEPVNRDFHQKFDLVIKAEQDNGHPLPAFAGLHIEILDENNQSPYFTMPSYQGYILESAPVGATISDSLNLTSPLRIVALDKDIEDTKDPELHLFLNDYTSVFTVTQTGITRYLTLLQPVDREEQQTYTFSITAFDGVQESEPVIVNIQVMDANDNTPTFPEISYDVYVYTDMRPGDSVIQLTAVDADEGSNGEITYEILVGAQGDFIINKTTGLITIAPGVEMIVGRTYALTVQAADNAPPAERRNSICTVYIEVLPPNNQSPPRFPQLMYSLEISEAMRVGAVLLNLQATDREGDSITYAIENGDPQRVFNLSETTGILTLGKALDRESTDRYILIITASDGRPDGTSTATVNIVVTDVNDNAPVFDPYLPRNLSVVEEEANAFVGQVKATDPDAGINGQVHYSLGNFNNLFRITSNGSIYTAVKLNREVRDYYELVVVATDGAVHPRHSTLTLAIKVLDIDDNSPVFTNSTYTVLVEENLPAGTTILQIEAKDVDLGANVSYRIRSPEVKHFFALHPFTGELSLLRSLDYEAFPDQEASITFLVEAFDIYGTMPPGIATVTVIVKDMNDYPPVFSKRIYKGMVAPDAVKGTPITTVYAEDADPPGLPASRVRYRVDDVQFPYPASIFEVEEDSGRVITRVNLNEEPTTIFKLVVVAFDDGEPVMSSSATVKILVLHPGEIPRFTQEEYRPPPVSELATKGTMVGVISAAAINQSIVYSIVSGNEEDTFGINNITGVIYVNGPLDYETRTSYVLRVQADSLEVVLANLRVPSKSNTAKVYIEIQDENNHPPVFQKKFYIGGVSEDARMFTSVLRVKATDKDTGNYSVMAYRLIIPPIKEGKEGFVVETYTGLIKTAMLFHNMRRSYFKFQVIATDDYGKGLSGKADVLVSVVNQLDMQVIVSNVPPTLVEKKIEDLTEILDRYVQEQIPGAKVVVESIGARRHGDAFSLEDYTKCDLTVYAIDPQTNRAIDRNELFKFLDGKLLDINKDFQPYYGEGGRILEIRTPEAVTSIKKRGESLGYTEGALLALAFIIILCCIPAILVVLVSYRQ

SEQ ID NO: 7997 - DNA, 3426 bp, Homo sapiens
gctatcaggaggagcaaaagggaaggatctgctgctgggggctcgctgggtgaccctttgccagacgaaaagagctggtcgagagagaagcgcttggcaggagctctctgcgggacctaagctccgtggctgctcgggatccctacgtccgctgctgctgaaggagcagaggggaggacgccagcggttgcttactggagcctggaggagatcagctttgagtgaactttgacagaagatgtttcgacagttttatctctggacatgtttagcttcagggatcatcctgggctctctctttgaaatctgcttgggccagtatgatgatggtacaattctggtggacaacatgctgatcaaagggactgctggaggaccagaccccaccatagaactttctttaaaggataatgtggattactgggtgttgatggatcctgttaagcaaatgcttttcctgaacagcaccggaagagttctggatagagatccaccgatgaacatacactccattgtggtgcaggtccagtgcatcaacaaaaaagtgggcactattatctaccatgaagtgcgaatagtggtgagagacaggaatgacaactcacccactttcaagcatgaaagctactatgccacagtgaatgagctcactccagttggtaccacaatattcacaggattttcaggagacaatggagctacagatatagatgatggaccaaatggacagatagagtatgttattcagtataatccagatgatccgacatccaatgacacctttgaaattcccctaatgttgactggaaatatagtgttaaggaagaggctcaactatgaagataagactcgctactttgtcataatccaagctaatgaccgtgcccaaaatctgaatgagaggcgaaccaccaccaccactctcacagtggatgttctggatggagatgacttgggtccaatgtttcttccttgtgtccttgtgccaaacactcgtgattgccgtccactcacttatcaagctgccatacctgagttgagaactccggaagaactgaaccccattattgttacgccaccaatccaagccattgatcaggaccggaatattcaaccgccatcagataggccaggaatcctctattccatccttgttgggactcctgaggattacccacgatttttccatatgcatcctaggacagcagaacttagtctcctggagccagtaaacagagactttcaccagaaatttgatttggttattaaggctgaacaagacaatggtcatcctcttcctgcctttgccggtctacacattgaaatactggatgaaaacaatcaaagtccatattttacaatgcccagttatcaaggctatatcctggaatctgccccagtgggagcaaccatttcggacagtctcaatttgacttcacctttaagaatagtagctctggacaaggacatagaagatacaaaagacccagagcttcacctttttctgaatgactacacctcagtcttcaccgtcacacagactggtattactcgctacctcaccttacttcaaccagtggacagggaagaacagcaaacttacaccttttcgataacagcatttgatggtgtacaagaaagtgagccagtcatcgtcaatattcaagtgatggatgcaaatgataacacgccaaccttccctgaaatatcctatgatgtgtatgtttatacagacatgagacctggggacagtgtcatacagctcactgcagtcgacgcagacgaagggtcaaatggggagatcacatatgaaatccttgttggggctcagggagacttcatcatcaataaaacaacagggcttatcaccatcgctccaggggtggaaatgatagtcgggcggacttacgcactcacggtccaagcagcggataatgctcctcctgcagagcgaaggaactccatctgcactgtgtatattgaagtgcttccaccaaataatcaaagccctcctcgcttcccacagctgatgtatagccttgaaattagtgaagccatgagggttggtgctgttttattaaatctacaggcaactgatcgagagggagactcaataacatatgccattgagaatggagatcctcagagagtttttaatctttcagaaaccacggggattctaaccttagggaaagcactggacagggaaagcactgatcgctacattctgatcatcacagcttcagatggcaggccagatgggacctcaactgccacagtaaacatagtggtgacagatgtcaatgacaatgctccagtgtttgatccttatctgccaagaaatttatctgtggtggaagaagaagccaatgcctttgtgggtcaagtaaaactatcaacaacgacagtgtgtaaaacagaccctcagagagaaccaaaaggcatcctcagacacgttaaaaacttagcagaacttgaaaaatcagtagctaacatgtacagtcaaatagaaaaaaactatctacgcacaaatgtttcagaacttcaaactatgtgcccttcagaagtaacaaatatggaaatcacatctgaacaaaacaaggggagtttgaacaatattgtcgagggaactgaaaaacaatctcacagtcaatctacttcactgtaatgttgcttttcttattttagtcgggcaaacctcttgttgatcatagtcttcaagttgaacatcaaatttgaacgtcaaagaagactctattattttaccccaaattcaatgaaatgcagttttttttctcgtttttaatttaaaaagatattaacctcatcactactaactcactcatataatagatttaccttactttttaaaaactacaaagtagcataatttgttctacatttatttgaaaagtaagtaattttaatctcttttttagtgggaatatgtgggcatgaaaattagatacccaacttaaaccaaaggcatgtctatcatgtggatgcagtaacatttacatttagtttttgatcgtagttttatatgaatgttccaagaaaaaagcagactgttacaaataagttaaaactgatatgattgataggttctgttttttcttgaagcctatgtatttggtaagaagaaatactaccgaagtaaaatataatgtacctagattgtaggagatgacagacataaggtatttcaaaataaatctcaggtgctataacatgtagtcatctgttttctgataagaacatcttttactctgacttgcttttatcttagtagtatgcttatggatttagtagtatgcttatggatttgataaatcttatactttttcagttgctgtcttattctctttatttctcattgtgctttcccttcccttctttataatgaaaataaatcttgagtcgttg

SEQ ID NO: 7998 - protein, 809 aa, Homo sapiens
MFRQFYLWTCLASGIILGSLFEICLGQYDDGTILVDNMLIKGTAGGPDPTIELSLKDNVDYWVLMDPVKQMLFLNSTGRVLDRDPPMNIHSIVVQVQCINKKVGTIIYHEVRIVVRDRNDNSPTFKHESYYATVNELTPVGTTIFTGFSGDNGATDIDDGPNGQIEYVIQYNPDDPTSNDTFEIPLMLTGNIVLRKRLNYEDKTRYFVIIQANDRAQNLNERRTTTTTLTVDVLDGDDLGPMFLPCVLVPNTRDCRPLTYQAAIPELRTPEELNPIIVTPPIQAIDQDRNIQPPSDRPGILYSILVGTPEDYPRFFHMHPRTAELSLLEPVNRDFHQKFDLVIKAEQDNGHPLPAFAGLHIEILDENNQSPYFTMPSYQGYILESAPVGATISDSLNLTSPLRIVALDKDIEDTKDPELHLFLNDYTSVFTVTQTGITRYLTLLQPVDREEQQTYTFSITAFDGVQESEPVIVNIQVMDANDNTPTFPEISYDVYVYTDMRPGDSVIQLTAVDADEGSNGEITYEILVGAQGDFIINKTTGLITIAPGVEMIVGRTYALTVQAADNAPPAERRNSICTVYIEVLPPNNQSPPRFPQLMYSLEISEAMRVGAVLLNLQATDREGDSITYAIENGDPQRVFNLSETTGILTLGKALDRESTDRYILIITASDGRPDGTSTATVNIVVTDVNDNAPVFDPYLPRNLSVVEEEANAFVGQVKLSTTTVCKTDPQREPKGILRHVKNLAELEKSVANMYSQIEKNYLRTNVSELQTMCPSEVTNMEITSEQNKGSLNNIVEGTEKQSHSQSTSL

SEQ ID NO: 7999 - DNA, 6528 bp, Homo sapiens
ctaatagcgacagatagagggcagacagattcctgctagcagcttagtgttagttgcttgtggtaactaaggcaggtggcatacatctcagaacgtggagaatgatggtatgctttctgagttaacatgttgaactgttttgcttttctaaaaattttcctagtaacattttcttgatgatatgagagtggatatcaatgcctcacagaaacaagaggtggaacatgtgaatgaatcgtcttggaactagattatgagcactggttctttttaaagggatgtgcaagaggcagccttggcaagaaaacttgctgcataatcttacatggactaaagatgaaactttaaaccgcaaatcagctttgagtgaactttgacagaagatgtttcgacagttttatctctggacatgtttagcttcagggatcatcctgggctctctctttgaaatctgcttgggccagtatgatgatggtacaattctggtggacaacatgctgatcaaagggactgctggaggaccagaccccaccatagaactttctttaaaggataatgtggattactgggtgttgatggatcctgttaagcaaatgcttttcctgaacagcaccggaagagttctggatagagatccaccgatgaacatacactccattgtggtgcaggtccagtgcatcaacaaaaaagtgggcactattatctaccatgaagtgcgaatagtggtgagagacaggaatgacaactcacccactttcaagcatgaaagctactatgccacagtgaatgagctcactccagttggtaccacaatattcacaggattttcaggagacaatggagctacagatatagatgatggaccaaatggacagatagagtatgttattcagtataatccagatgatccgacatccaatgacacctttgaaattcccctaatgttgactggaaatatagtgttaaggaagaggctcaactatgaagataagactcgctactttgtcataatccaagctaatgaccgtgcccaaaatctgaatgagaggcgaaccaccaccaccactctcacagtggatgttctggatggagatgacttgggtccaatgtttcttccttgtgtccttgtgccaaacactcgtgattgccgtccactcacttatcaagctgccatacctgagttgagaactccggaagaactgaaccccattattgttacgccaccaatccaagccattgatcaggaccggaatattcaaccgccatcagataggccaggaatcctctattccatccttgttgggactcctgaggattacccacgatttttccatatgcatcctaggacagcagaacttagtctcctggagccagtaaacagagactttcaccagaaatttgatttggttattaaggctgaacaagacaatggtcatcctcttcctgcctttgccggtctacacattgaaatactggatgaaaacaatcaaagtccatattttacaatgcccagttatcaaggctatatcctggaatctgccccagtgggagcaaccatttcggacagtctcaatttgacttcacctttaagaatagtagctctggacaaggacatagaagatacaaaagacccagagcttcacctttttctgaatgactacacctcagtcttcaccgtcacacagactggtattactcgctacctcaccttacttcaaccagtggacagggaagaacagcaaacttacaccttttcgataacagcatttgatggtgtacaagaaagtgagccagtcatcgtcaatattcaagtgatggatgcaaatgataacacgccaaccttccctgaaatatcctatgatgtgtatgtttatacagacatgagacctggggacagtgtcatacagctcactgcagtcgacgcagacgaagggtcaaatggggagatcacatatgaaatccttgttggggctcagggagacttcatcatcaataaaacaacagggcttatcaccatcgctccaggggtggaaatgatagtcgggcggacttacgcactcacggtccaagcagcggataatgctcctcctgcagagcgaaggaactccatctgcactgtgtatattgaagtgcttccaccaaataatcaaagccctcctcgcttcccacagctgatgtatagccttgaaattagtgaagccatgagggttggtgctgttttattaaatctacaggcaactgatcgagagggagactcaataacatatgccattgagaatggagatcctcagagagtttttaatctttcagaaaccacggggattctaaccttagggaaagcactggacagggaaagcactgatcgctacattctgatcatcacagcttcagatggcaggccagatgggacctcaactgccacagtaaacatagtggtgacagatgtcaatgacaatgctccagtgtttgatccttatctgccaagaaatttatctgtggtggaagaagaagccaatgcctttgtgggtcaagtaaaagcaacagaccctgatgctggaataaatggtcaagtgcactacagtttgggtaactttaataatctttttcgtatcacatccaatgggagcatttacacagcagtgaagcttaacagagaagtcagggactactatgaacttgttgttgtggcaacagatggagcagtacaccctcgtcattcaactctaaccttggccatcaaggttttggacattgatgataacagtcctgtgttcaccaattcaacatacactgtccttgttgaagagaatttgccagctgggactaccatccttcaaatagaggccaaagatgtcgaccttggagcaaatgtgtcttaccggataagaagcccagaagtgaagcacttttttgcactacatccatttacaggagaactatcgcttttaaggagtttagattatgaggcatttccagaccaagaagcaagtatcacttttctggtagaggcctttgatatttatggaacaatgccacctggtattgctactgtcacagtgattgtaaaggatatgaatgattatcctcctgtctttagtaaacgaatatacaaagggatggtggctccggatgcagtcaagggtacacctatcacaacagtttatgctgaagatgcagaccctcctggattacctgcaagtcgtgtgaggtatagagtagatgatgtacagtttccttaccctgccagtatttttgaagtggaagaagattctggaagagtaataacacgagtcaatcttaatgaagaacctacaacaatttttaagttggtggtggttgcttttgatgatggggagcctgtgatgtccagcagtgccacagtgaagattcttgtcttacatcctggtgagatcccacgcttcacacaggaggaatatagacctcctccagtaagtgaacttgccaccaaagggaccatggttggtgtaatttctgctgctgccattaatcaaagtattgtgtactccattgtttcaggaaatgaagaagatacatttggaattaataacatcacaggtgttatctatgtgaatggacctctggattatgagaccaggacaagctatgtacttcgagtccaagctgattccctggaagtggtccttgccaatctccgagttccttcaaaaagcaatacagctaaagtatacattgagattcaggatgaaaataatcatcccccagtgtttcagaaaaaattctacatcggaggtgtatctgaagatgcaagaatgtttacttctgtactcagagtgaaggctactgataaagatactggcaattatagtgtcatggcctacagactcataataccaccaattaaagagggaaaagaaggatttgtagtggaaacatatacagggcttatcaaaactgctatgctcttccataatatgaggagatcctacttcaagtttcaagttattgcaactgacgactatgggaagggactgagcggcaaagccgatgtactcgtctccgtggtcaatcagctggatatgcaagtcattgtttccaatgtgcctcctactctagtggaaaaaaagatagaagatcttacagagatcttggatcgctatgttcaggaacaaattcctggtgccaaggtcgtagtggagtccattggagctcgccggcatggagatgccttttccctagaagattacaccaaatgtgacttgactgtctatgcaattgacccccaaaccaacagagccatcgatagaaatgagctttttaaatttttggatggcaaactacttgatatcaataaagactttcagccgtattatggggaaggaggacgcattctggagatccggactccagaggcagtgaccagcattaaaaagagaggagaaagtctaggatacacagaaggggccttgttggctctggccttcatcatcatcctctgctgcattcctgccatcttggtggttttggtcagctacagacagtaagtacgtcaagctgagtgtacaaagactgcacgaattcaggccgcattacccgcggctaaaccagcagtgccggctcctgcaccagtggcagcgcccccgccgccgccgccgcctccgccaggtgcgcatctctatgaagaacttggagacagctcaattcttttccttctctaccattttcaacaaagcaggggaaataactcagtctcagaagacaggaaacatcaacaagttgtgatgcccttttcttccaatactattgaggctcacaagtcagctcatgtagacggatcacttaagagcaacaaactgaagtctgcaagaaaattcacatttctatctgatgaggatgacttaagtgcccataatcccctttataaggaaaacataagtcaagtatcaacaaattcagacatttcacagagaacagattttgtagacccattttcacccaaaatacaagccaagagtaagtctctgaggggcccaagagaaaagattcagaggctgtggagtcagtcagtcagcttacccaggaggctgatgaggaaagttccaaatagaccagagatcatagatctgcagcagtggcaaggcaccaggcagaaagctgaaaatgaaaacactggaatctgtacaaacaaaagaggtagcagcaatccattgcttacaactgaagaggcaaatttgacagagaaagaggaaataaggcaaggtgaaacactgatgatagaaggaacagaacagttgaaatctctctcttcagactcttcattttgctttcccaggcctcacttctcattctccactttgccaactgtttcaagaactgtggaactcaaatcagaacctaatgtcatcagttctcctgctgagtgttccttggaactttctccttcaaggccttgtgttttacattcttcactctctaggagagagacacctatttgtatgttacctattgaaaccgaaagaaatatttttgaaaattttgcccatccaccaaacatctctccttctgcctgacattttttccactttccgtttcaacgtctggtcccccaacaagcttcatttctgtccacagagtgtgtctgtataacaggtgttaaatgcacgaccaacttgatgcctgccgagaaaattaagtcctctatgacacagctatcaacaacgacagtgtgtaaaacagaccctcagagagaaccaaaaggcatcctcagacacgttaaaaacttagcagaacttgaaaaatcagtagctaacatgtacagtcaaatagaaaaaaactatctacgcacaaatgtttcagaacttcaaactatgtgcccttcagaagtaacaaatatggaaatcacatctgaacaaaacaaggggagtttgaacaatattgtcgagggaactgaaaaacaatctcacagtcaatctacttcactgtaatgttgcttttcttattttagtcgggcaaacctcttgttgatcatagtcttcaagttgaacatcaaatttgaacgtcaaagaagactctattattttaccccaaattcaatgaaatgcagttttttttctcgtttttaatttaaaaagatattaacctcatcactactaactcactcatataatagatttaccttactttttaaaaactacaaagtagcataatttgttctacatttatttgaaaagtaagtaattttaatctcttttttagtgggaatatgtgggcatgaaaattagatacccaacttaaaccaaaggcatgtctatcatgtggatgcagtaacatttacatttagtttttgatcgtagttttatatgaatgttccaagaaaaaagcagactgttacaaataagttaaaactgatatgattgataggttctgttttttcttgaagcctatgtatttggtaagaagaaatactaccgaagtaaaatataatgtacctagattgtaggagatgacagacataaggtatttcaaaataaatctcaggtgctataacat

SEQ ID NO: 8000 - protein, 1379 aa, Homo sapiens; identical to SEQ ID NO: 7996

SEQ ID NO: 8001 - DNA, 4161 bp, Homo sapiens
aacgtggagaatgatggtatgctttctgagttaacatgttgaactgttttgcttttctaaaaattttcctagtaacattttcttgatgatatgagagtggatatcaatgcctcacagaaacaagaggtggaacatgtgaatgaatcgtcttggaactagattatgagcactggttctttttaaagggatgtgcaagaggcagccttggcaagaaaacttgctgcataatcttacatggactaaagatgaaactttaaaccgcaaatcagctttgagtgaactttgacagaagatgtttcgacagttttatctctggacatgtttagcttcagggatcatcctgggctctctctttgaaatctgcttgggccagtatgatgatggtacaattctggtggacaacatgctgatcaaagggactgctggaggaccagaccccaccatagaactttctttaaaggataatgtggattactgggtgttgatggatcctgttaagcaaatgcttttcctgaacagcaccggaagagttctggatagagatccaccgatgaacatacactccattgtggtgcaggtccagtgcatcaacaaaaaagtgggcactattatctaccatgaagtgcgaatagtggtgagagacaggaatgacaactcacccactttcaagcatgaaagctactatgccacagtgaatgagctcactccagttggtaccacaatattcacaggattttcaggagacaatggagctacagatatagatgatggaccaaatggacagatagagtatgttattcagtataatccagatgatccgacatccaatgacacctttgaaattcccctaatgttgactggaaatatagtgttaaggaagaggctcaactatgaagataagactcgctactttgtcataatccaagctaatgaccgtgcccaaaatctgaatgagaggcgaaccaccaccaccactctcacagtggatgttctggatggagatgacttgggtccaatgtttcttccttgtgtccttgtgccaaacactcgtgattgccgtccactcacttatcaagctgccatacctgagttgagaactccggaagaactgaaccccattattgttacgccaccaatccaagccattgatcaggaccggaatattcaaccgccatcagataggccaggaatcctctattccatccttgttgggactcctgaggattacccacgatttttccatatgcatcctaggacagcagaacttagtctcctggagccagtaaacagagactttcaccagaaatttgatttggttattaaggctgaacaagacaatggtcatcctcttcctgcctttgccggtctacacattgaaatactggatgaaaacaatcaaagtccatattttacaatgcccagttatcaaggctatatcctggaatctgccccagtgggagcaaccatttcggacagtctcaatttgacttcacctttaagaatagtagctctggacaaggacatagaagatacaaaagacccagagcttcacctttttctgaatgactacacctcagtcttcaccgtcacacagactggtattactcgctacctcaccttacttcaaccagtggacagggaagaacagcaaacttacaccttttcgataacagcatttgatggtgtacaagaaagtgagccagtcatcgtcaatattcaagtgatggatgcaaatgataacacgccaaccttccctgaaatatcctatgatgtgtatgtttatacagacatgagacctggggacagtgtcatacagctcactgcagtcgacgcagacgaagggtcaaatggggagatcacatatgaaatccttgttggggctcagggagacttcatcatcaataaaacaacagggcttatcaccatcgctccaggggtggaaatgatagtcgggcggacttacgcactcacggtccaagcagcggataatgctcctcctgcagagcgaaggaactccatctgcactgtgtatattgaagtgcttccaccaaataatcaaagccctcctcgcttcccacagctgatgtatagccttgaaattagtgaagccatgagggttggtgctgttttattaaatctacaggcaactgatcgagagggagactcaataacatatgccattgagaatggagatcctcagagagtttttaatctttcagaaaccacggggattctaaccttagggaaagcactggacagggaaagcactgatcgctacattctgatcatcacagcttcagatggcaggccagatgggacctcaactgccacagtaaacatagtggtgacagatgtcaatgacaatgctccagtgtttgatccttatctgccaagaaatttatctgtggtggaagaagaagccaatgcctttgtgggtcaagtaaaagcaacagaccctgatgctggaataaatggtcaagtgcactacagtttgggtaactttaataatctttttcgtatcacatccaatgggagcatttacacagcagtgaagcttaacagagaagtcagggactactatgaacttgttgttgtggcaacagatggagcagtacaccctcgtcattcaactctaaccttggccatcaaggttttggacattgatgataacagtcctgtgttcaccaattcaacatacactgtccttgttgaagagaatttgccagctgggactaccatccttcaaatagaggccaaagatgtcgaccttggagcaaatgtgtcttaccggataagaagcccagaagtgaagcacttttttgcactacatccatttacaggagaactatcgcttttaaggagtttagattatgaggcatttccagaccaagaagcaagtatcacttttctggtagaggcctttgatatttatggaacaatgccacctggtattgctactgtcacagtgattgtaaaggatatgaatgattatcctcctgtctttagtaaacgaatatacaaagggatggtggctccggatgcagtcaagggtacacctatcacaacagtttatgctgaagatgcagaccctcctgtaagtagaaggcattgattaatattctgaactgtactgagaaaaatccttaacactcataaatgaccgaatcacaagacagcaaaagtagtctctgtaaatttcaccctatttattcatacattttatgttcttttacttatttcatccacaggtacagagcatatttcagatgactattattgaacctagacaaagaatatgctttttgtttttctagaatgcacaatgtactaattactaatttatctaacaatgataaatatatatgaattgtctccatttgtaagcttcacttaatctggatatgttttaaatttatgtattttccactgtatgcatatatgactattttgttagcaaactccaaatcaacatatcacatgaaacttatattgaatgtgtttattttggtaaattaaaaagcttaagattgcttacagaaaatagttaacattcttttatcatatagaactttacttttttgagatatcccaaattatctttcaaggcaaggttttaattaaaatattattatagtgagagtgataaaataccatgtataattaatagtatacatataaaaaagctttctataaataccttgttttataaatattaattattatcctgatgatttaaatttttctctgagtgggctcacactgtaagttggtggctgataaattttagaaaaatacaaataaaagttaaatgaactattttagaagagtaagaaaataaaatcctgaatcttataagtgatttagaagttctgttttctattgctaatataaatagtatttcttttaatgcttgtatttaattaaaagtgaatggccatcataacatttttcagcttcgatttggacaagtcttataaactctattgtgactatatggaatcaaaatgtattaatgttaatatgaaagtggtgggctttaattcagaagctccttttcttaagtgtgttaaaatgtctttgaaactgctttattgtgctttgggatatatgataggcaaaaatttcatagacttgaacccatcaataaagatagtgaatgtg

SEQ ID NO: 8002 - protein, 939 aa, Homo sapiens
MFRQFYLWTCLASGIILGSLFEICLGQYDDGTILVDNMLIKGTAGGPDPTIELSLKDNVDYWVLMDPVKQMLFLNSTGRVLDRDPPMNIHSIVVQVQCINKKVGTIIYHEVRIVVRDRNDNSPTFKHESYYATVNELTPVGTTIFTGFSGDNGATDIDDGPNGQIEYVIQYNPDDPTSNDTFEIPLMLTGNIVLRKRLNYEDKTRYFVIIQANDRAQNLNERRTTTTTLTVDVLDGDDLGPMFLPCVLVPNTRDCRPLTYQAAIPELRTPEELNPIIVTPPIQAIDQDRNIQPPSDRPGILYSILVGTPEDYPRFFHMHPRTAELSLLEPVNRDFHQKFDLVIKAEQDNGHPLPAFAGLHIEILDENNQSPYFTMPSYQGYILESAPVGATISDSLNLTSPLRIVALDKDIEDTKDPELHLFLNDYTSVFTVTQTGITRYLTLLQPVDREEQQTYTFSITAFDGVQESEPVIVNIQVMDANDNTPTFPEISYDVYVYTDMRPGDSVIQLTAVDADEGSNGEITYEILVGAQGDFIINKTTGLITIAPGVEMIVGRTYALTVQAADNAPPAERRNSICTVYIEVLPPNNQSPPRFPQLMYSLEISEAMRVGAVLLNLQATDREGDSITYAIENGDPQRVFNLSETTGILTLGKALDRESTDRYILIITASDGRPDGTSTATVNIVVTDVNDNAPVFDPYLPRNLSVVEEEANAFVGQVKATDPDAGINGQVHYSLGNFNNLFRITSNGSIYTAVKLNREVRDYYELVVVATDGAVHPRHSTLTLAIKVLDIDDNSPVFTNSTYTVLVEENLPAGTTILQIEAKDVDLGANVSYRIRSPEVKHFFALHPFTGELSLLRSLDYEAFPDQEASITFLVEAFDIYGTMPPGIATVTVIVKDMNDYPPVFSKRIYKGMVAPDAVKGTPITTVYAEDADPPVSRRH

SEQ ID NO: 8003 - DNA, 582 bp, Homo sapiens
agttgcttgtggtaactaaggcaggtggcatacatctcagaacgtggagaatgatggtatgctttctgagttaacatgttgaactgttttgcttttctaaaaattttcctagtaacattttcttgatgatatgagagtggatatcaatgcctcacagaaacaagaggtggaacatgtgaatgaatcgtcttggaactagattatgagcactggttctttttaaagggatgtgcaagaggcagccttggcaagaaaacttgctgcataatcttacatggactaaagatgaaactttaaaccgcaaatcagctttgagtgaactttgacagaagatgtttcgacagttttatctctggacatgtttagcttcagggatcatcctgggctctctctttgaaatctgcttgggccagtatgatgatgattgcaaactagctaggggaggaccaccagctaccatagttgctattgatgaagaaagtcggaatggtacaattctggtggacaacatgctgatcaaagggactgctggaggaccagaccccaccatagaactttctttaaaggataatgtggattact

SEQ ID NO: 8004 - protein, 82 aa, Homo sapiens
MFRQFYLWTCLASGIILGSLFEICLGQYDDDCKLARGGPPATIVAIDEESRNGTILVDNMLIKGTAGGPDPTIELSLKDNVD

SEQ ID NO: 8005 - DNA, 7331 bp, Homo sapiens
accggcccgcgcgggcacctggcggtcgcagcggacacagcaggaggaggataggccgcgctgggcgggcgtcgcggggccgcgcttggtgttcctgagccgcggccgaactttttcccaagaagtcccacgtttggaggcccgaggagcgggacggggaggagagactggagttcctggaaggagcagcagcagcagccccacaacatggcctcctccgcctcctcctctcccgcgggcaccgaggactccgctcctgcccagggtggctttggatcagattattcacgaagctctagaaagtctgatgccaatgcaagttacttaagagcagctcgagctggacaccttgaaaaggccctcgactacataaaaaatggagttgacatcaacatttgcaatcagaatgggttgaacgctctccaccttgcttccaaagaaggccatgtagaggttgtttctgagctgctgcagagagaagccaatgtggatgcagctacaaagaaaggaaacacagcattgcacatcgcatctttggctgggcaagcagaggtggtaaaagtcttggttacaaatggagccaatgtcaatgcacaatctcagaatggtttcacgccattgtatatggcagcccaggaaaatcacctggaagttgtcaagtttcttcttgacaatggtgcaagccagagcctagccacagaggatggcttcacaccattggcagtggctttgcaacaaggtcacgaccaagtcgtttcgctcctgctagagaatgacaccaaaggaaaagtgcgtctcccagctcttcatatcgcggcccgaaaagacgacacgaaagccgccgccctgctgctgcagaatgacaacaatgcagatgtggaatcaaagagtggcttcactccgctccacatagctgctcactatggaaatatcaatgtagccacgttgctgttaaaccgagcggctgctgtggatttcaccgcaaggaatgacatcactcctttacatgttgcatcaaaaagaggaaatgcaaatatggtaaaactattgctcgatcgaggagctaaaatcgatgccaaaaccagggatggtctgacaccactgcactgtggagcaaggagtggccacgagcaggtggtagaaatgttgcttgatcgagctgcccccattctttcaaaaaccaagaatggattatctccattgcacatggccacacaaggggatcatttaaactgcgtccagcttctcctccagcataatgtacccgtggatgatgtcaccaatgactacctgactgccctacacgtggctgcccactgtggccattacaaagttgccaaggttctcttggataagaaagctaaccccaatgccaaagccctgaatggctttacccctcttcatattgcctgcaagaagaatcgaattaaagtaatggaactccttctgaaacacggtgcatccatccaagctgtaaccgagtcgggccttaccccaatccatgttgctgccttcatggggcatgtaaatattgtatcacaactaatgcatcatggagcctcaccaaacaccaccaatgtgagaggagaaacagcactgcacatggcagctcgctccggccaagctgaagttgtgcggtatctggtacaagacggagctcaggtagaagctaaagctaaggatgaccaaacaccactccacatttcagcccgactggggaaagcagacatagtacaacagctgttgcagcaaggggcatctccaaatgcagccacaacttctgggtacaccccacttcacctttccgcccgagaggggcatgaggatgtggccgcgttccttttggatcatggagcgtctttatctataacaacaaagaaaggatttactcctcttcatgtggcagcaaaatatggaaagcttgaagtcgccaatctcctgctacagaaaagtgcatctccagatgctgctgggaagagcgggctaacaccactgcatgtagctgcacattacgataatcagaaagtggcccttctgcttttggaccaaggagcctcacctcacgcagccgcaaagaatggttatacgccactgcacatcgctgccaaaaagaaccagatggacatagcgacaactctgctggaatatggtgctgatgccaacgcagttacccggcaaggaattgcttccgtccatctcgcagctcaggaagggcacgtggacatggtgtcgctgctcctcggtagaaatgcgaatgtgaacctgagcaataagagcggcctgaccccactccatttggctgctcaagaagatcgagtgaatgtggcagaagtcctcgtaaaccaaggggctcatgtggacgcccagacaaagatgggatacacaccactgcatgtgggctgccactatggaaatatcaagattgttaatttcctgctccagcattctgcaaaagttaatgccaaaacaaagaatgggtatacgccattacatcaagcagcacagcaggggcatacgcatataataaatgtcttacttcagaacaacgcctcccccaatgaactcactgtgaatgggaatactgcccttggcattgcccggcgcctcggctacatctcagtagtggacaccctgaagatagtgaccgaagagaccatgaccacaactactgtcacagagaagcacaaaatgaatgttccagaaacgatgaatgaagttcttgatatgtctgatgatgaagttcgtaaagccaatgcccctgaaatgctcagtgatggcgaatatatctcagatgttgaagaaggtgaagatgcaatgaccggggacacagacaaatatcttgggccacaggaccttaaggaattgggtgatgattccctgcctgcagagggttacatgggctttagtctcggagcgcgttctgccagcctccgctccttcagttcggataggtcttacaccttgaacagaagctcctatgcacgggacagcatgatgattgaagaactccttgtgccatccaaagagcagcatctaacattcacaagggaatttgattcagattctcttagacattacagctgggctgcagacaccttagacaatgtcaatcttgtttcaagccccattcattctgggtttctggttagctttatggtggacgcgagagggggctccatgagaggaagccgtcatcacgggatgagaatcatcattcctccacgcaagtgtacggcccccactcgaatcacctgccgtttggtaaagagacataaactggccaacccaccccccatggtggaaggagagggattagccagtaggctggtagaaatgggtcctgcaggggcacaatttttaggccctgtcatagtggaaatccctcactttgggtccatgagaggaaaagagagagaactcattgttcttcgaagtgaaaatggtgaaacttggaaggagcatcagtttgacagcaaaaatgaagatttaaccgagttacttaatggcatggatgaagaacttgatagcccagaagagttagggaaaaagcgtatctgcaggattatcacgaaagatttcccccagtattttgcagtggtttcccggattaagcaggaaagcaaccagattggtcctgaaggtggaattctgagcagcaccacagtgccccttgttcaagcatctttcccagagggtgccctaactaaaagaattcgagtgggcctccaggcccagcctgttccagatgaaattgtgaaaaagatccttggaaacaaagcaacttttagcccaattgtcactgtggaaccaagaagacggaaattccataaaccaatcacaatgaccattccggtgcccccgccctcaggagaaggtgtatccaatggatacaaaggggacactacacccaatctgcgtcttctctgtagcattacagggggcacttcgcctgctcagtgggaagacatcacaggaacaactcctttgacgtttataaaagattgtgtctcctttacaaccaatgtttcagccagattttggcttgcagactgccatcaagttttagaaactgtggggttagccacgcaactgtacagagaattgatatgtgttccatatatggccaagtttgttgtttttgccaaaatgaatgatcccgtagaatcttccttgcgatgtttctgcatgacagatgacaaagtggacaaaactttagagcaacaagagaattttgaggaagtcgcaagaagcaaagatattgaggttctggaaggaaaacctatttatgttgattgttatggaaatttggccccacttaccaaaggaggacagcaacttgtttttaacttttattctttcaaagaaaatagactgccattttccatcaagattagagacaccagccaagagccctgtggtcgtctgtcttttctgaaagaaccaaagacaacaaaaggactgcctcaaacagcggtttgcaacttaaatatcactctgccagcacataaaaagattgagaaaacagatagacgacagagcttcgcatccttagctttacgtaagcgctacagctacttgactgagcctggaatgagtccacagagtccatgtgaacggacagatatcaggatggcaatagtagccgatcacctgggacttagttggacagaactggcaagggaactgaatttttcagtggatgaaatcaatcaaatacgtgtggaaaatccaaattctttaatttctcagagcttcatgttattaaaaaaatgggttaccagagacggaaaaaatgccacaactgatgccttaacttcggtcttgacaaaaattaatcgaatagatatagtgacactgctagaaggaccaatatttgattatggaaatatttcaggcaccagaagttttgcagatgagaacaatgttttccatgaccctgttgatggttatccttcccttcaagtggaactggaaacccccacagggttgcactacacaccacctacccctttccagcaagatgattattttagtgatatctctagcatagaatctccccttagaacccctagtagactgagtgatgggctagtgccttcccaggggaacatagagcattccgcagatggacctccagtcgtaactgcagaagacgcttccttagaagacagcaaactggaagactcagtgcctttaacagaaatgcctgaagcagtggatgtagatgagagccagttggagaatgtatgtctgagttggcagaatgagacatcaagtggaaacctagagtcctgcgctcaagctcgaagagtaactggtgggttactagatcgactggatgacagccctgaccagtgtagagattccattacctcatatctcaaaggagaagctggcaaatttgaagcaaatggaagccatacagaaatcactccagaagcaaagacaaaatcttactttccagaatcccaaaatgatgtaggaaaacagagtaccaaggaaactctgaaaccaaaaatacatggatctggtcatgttgaagaaccagcatcaccactagcagcatatcagaaatctctagaagaaaccagcaagcttataatagaagagactaaaccctgtgtgcctgtcagtatgaaaaagatgagtaggacttctccagcagatggcaagccaaggcttagcctccatgaagaagaggggtccagtgggtctgagcaaaagcagggagaaggttttaaggtgaaaacgaagaaagaaatccggcatgtggaaaagaagagccactcgtaacagcgaacggtcagtcaaggatcataagtttttactgccagtattgagaaattcgtggaagaaatgtcagcaggaagtaaaaattcaccgagaagtgtgtgtgtgttcgctgcttccacacattaatggcatgattttttttatgcaaaaagaaaagaaaagaaaaccacccacattttaatttagcatgagccaatttacagagcatggaaatcactttcatttccggattggcgcgtgtgcaattagcaatgcagtgtatatacaagaagccatgctgttaacagtttatctcaagtaatttggtgtcatttacaaaaggaagaaattcctgccatcagaagggacagaaggagatggaatgatcaaatcacagagaaacactaaaattactaaatctacaacagctcgccttatttttcttggacccaaactgtcagggtataaacactatttgtttcttttttaaaacatcgatagttttgctgtaaataataacactgtataaattctaacagaaaaatagaataaaatgttgataaggcactgcctcttagaacacaaacagaatattgcaaatgcatttaacaaataggggtctcaagtgacttcaccctagaagaggagggagggattctgggtgggggtgactcttcactgattcttgtatattagcaattataatgtttgtatatgcaaaactgctagcttgattttaaaaaaaaacaaatctttaaaatctgctgcaaatttaaataattcccaaaatgaggaattctgtagttctgtgaaaaatttttttcttcagaatactaatattttgatgcatgtgtatcaccttattttgattaaatcttttccaattttgcaaacactacagtatactgcaacacaaaagattttatctgtaaacacaaagcccttcatctaatatttgttgctattgccaatttttcaatgaaatgacctaaaaacaacaaaaaaaaataacctatacggtagttgctttagggggtggggggatgctatctgttagtgcttaaaagggggtaaatgcttgccgctttagaggtggatggtgctcataaaaggccccagtcgggggtatttaaaaaggactgaacagaaatccttagctagtagaatggcagcacgctgtaaaattattactgtattgtgtactggctataagatgtagacacctttcagtaagccaatcatttgtaaccattctagcagtgtcatattaggttaataaggctgctgtgttttaaagggcatttttatttgggttttggtgaaattctttaatttgttgattatattcacataaaatcagcattcattgacacatagctctaatgacatatgtatgaaaaaccatacactggatgacctagtcgattatttaagcataaaataaattgtgttaaactcttcacctatctgtgctctacagtctccttgtgttttctggcaaaaggtagttgtctaatcccttgtcatatgagtcctggccaatccaccccattggtcct

SEQ ID NO: 8006 - protein, 1861 aa, Homo sapiens
MASSASSSPAGTEDSAPAQGGFGSDYSRSSRKSDANASYLRAARAGHLEKALDYIKNGVDINICNQNGLNALHLASKEGHVEVVSELLQREANVDAATKKGNTALHIASLAGQAEVVKVLVTNGANVNAQSQNGFTPLYMAAQENHLEVVKFLLDNGASQSLATEDGFTPLAVALQQGHDQVVSLLLENDTKGKVRLPALHIAARKDDTKAAALLLQNDNNADVESKSGFTPLHIAAHYGNINVATLLLNRAAAVDFTARNDITPLHVASKRGNANMVKLLLDRGAKIDAKTRDGLTPLHCGARSGHEQVVEMLLDRAAPILSKTKNGLSPLHMATQGDHLNCVQLLLQHNVPVDDVTNDYLTALHVAAHCGHYKVAKVLLDKKANPNAKALNGFTPLHIACKKNRIKVMELLLKHGASIQAVTESGLTPIHVAAFMGHVNIVSQLMHHGASPNTTNVRGETALHMAARSGQAEVVRYLVQDGAQVEAKAKDDQTPLHISARLGKADIVQQLLQQGASPNAATTSGYTPLHLSAREGHEDVAAFLLDHGASLSITTKKGFTPLHVAAKYGKLEVANLLLQKSASPDAAGKSGLTPLHVAAHYDNQKVALLLLDQGASPHAAAKNGYTPLHIAAKKNQMDIATTLLEYGADANAVTRQGIASVHLAAQEGHVDMVSLLLGRNANVNLSNKSGLTPLHLAAQEDRVNVAEVLVNQGAHVDAQTKMGYTPLHVGCHYGNIKIVNFLLQHSAKVNAKTKNGYTPLHQAAQQGHTHIINVLLQNNASPNELTVNGNTALGIARRLGYISVVDTLKIVTEETMTTTTVTEKHKMNVPETMNEVLDMSDDEVRKANAPEMLSDGEYISDVEEGEDAMTGDTDKYLGPQDLKELGDDSLPAEGYMGFSLGARSASLRSFSSDRSYTLNRSSYARDSMMIEELLVPSKEQHLTFTREFDSDSLRHYSWAADTLDNVNLVSSPIHSGFLVSFMVDARGGSMRGSRHHGMRIIIPPRKCTAPTRITCRLVKRHKLANPPPMVEGEGLASRLVEMGPAGAQFLGPVIVEIPHFGSMRGKERELIVLRSENGETWKEHQFDSKNEDLTELLNGMDEELDSPEELGKKRICRIITKDFPQYFAVVSRIKQESNQIGPEGGILSSTTVPLVQASFPEGALTKRIRVGLQAQPVPDEIVKKILGNKATFSPIVTVEPRRRKFHKPITMTIPVPPPSGEGVSNGYKGDTTPNLRLLCSITGGTSPAQWEDITGTTPLTFIKDCVSFTTNVSARFWLADCHQVLETVGLATQLYRELICVPYMAKFVVFAKMNDPVESSLRCFCMTDDKVDKTLEQQENFEEVARSKDIEVLEGKPIYVDCYGNLAPLTKGGQQLVFNFYSFKENRLPFSIKIRDTSQEPCGRLSFLKEPKTTKGLPQTAVCNLNITLPAHKKIEKTDRRQSFASLALRKRYSYLTEPGMSPQSPCERTDIRMAIVADHLGLSWTELARELNFSVDEINQIRVENPNSLISQSFMLLKKWVTRDGKNATTDALTSVLTKINRIDIVTLLEGPIFDYGNISGTRSFADENNVFHDPVDGYPSLQVELETPTGLHYTPPTPFQQDDYFSDISSIESPLRTPSRLSDGLVPSQGNIEHSADGPPVVTAEDASLEDSKLEDSVPLTEMPEAVDVDESQLENVCLSWQNETSSGNLESCAQARRVTGGLLDRLDDSPDQCRDSITSYLKGEAGKFEANGSHTEITPEAKTKSYFPESQNDVGKQSTKETLKPKIHGSGHVEEPASPLAAYQKSLEETSKLIIEETKPCVPVSMKKMSRTSPADGKPRLSLHEEEGSSGSEQKQGEGFKVKTKKEIRHVEKKSHS

SEQ ID NO: 8007 - DNA, 7240 bp, Homo sapiens
accggcccgcgcgggcacctggcggtcgcagcggacacagcaggaggaggataggccgcgctgggcgggcgtcgcggggccgcgcttggtgttcctgagccgcggccgaactttttcccaagaagtcccacgtttggaggcccgaggagcgggacggggaggagagactggagttcctggaaggagcagcagcagcagccccacaacatggcctcctccgcctcctcctctcccgcgggcaccgaggactccgctcctgcccagggtggctttggatcagattattcacgaagctctagaaagtctgatgccaatgcaagttacttaagagcagctcgagctggacaccttgaaaaggccctcgactacataaaaaatggagttgacatcaacatttgcaatcagaatgggttgaacgctctccaccttgcttccaaagaaggccatgtagaggttgtttctgagctgctgcagagagaagccaatgtggatgcagctacaaagaaaggaaacacagcattgcacatcgcatctttggctgggcaagcagaggtggtaaaagtcttggttacaaatggagccaatgtcaatgcacaatctcagaatggtttcacgccattgtatatggcagcccaggaaaatcacctggaagttgtcaagtttcttcttgacaatggtgcaagccagagcctagccacagaggatggcttcacaccattggcagtggctttgcaacaaggtcacgaccaagtcgtttcgctcctgctagagaatgacaccaaaggaaaagtgcgtctcccagctcttcatatcgcggcccgaaaagacgacacgaaagccgccgccctgctgctgcagaatgacaacaatgcagatgtggaatcaaagagtggcttcactccgctccacatagctgctcactatggaaatatcaatgtagccacgttgctgttaaaccgagcggctgctgtggatttcaccgcaaggaatgacatcactcctttacatgttgcatcaaaaagaggaaatgcaaatatggtaaaactattgctcgatcgaggagctaaaatcgatgccaaaaccagggatggtctgacaccactgcactgtggagcaaggagtggccacgagcaggtggtagaaatgttgcttgatcgagctgcccccattctttcaaaaaccaagaatggattatctccattgcacatggccacacaaggggatcatttaaactgcgtccagcttctcctccagcataatgtacccgtggatgatgtcaccaatgactacctgactgccctacacgtggctgcccactgtggccattacaaagttgccaaggttctcttggataagaaagctaaccccaatgccaaagccctgaatggctttacccctcttcatattgcctgcaagaagaatcgaattaaagtaatggaactccttctgaaacacggtgcatccatccaagctgtaaccgagtcgggccttaccccaatccatgttgctgccttcatggggcatgtaaatattgtatcacaactaatgcatcatggagcctcaccaaacaccaccaatgtgagaggagaaacagcactgcacatggcagctcgctccggccaagctgaagttgtgcggtatctggtacaagacggagctcaggtagaagctaaagctaaggatgaccaaacaccactccacatttcagcccgactggggaaagcagacatagtacaacagctgttgcagcaaggggcatctccaaatgcagccacaacttctgggtacaccccacttcacctttccgcccgagaggggcatgaggatgtggccgcgttccttttggatcatggagcgtctttatctataacaacaaagaaaggatttactcctcttcatgtggcagcaaaatatggaaagcttgaagtcgccaatctcctgctacagaaaagtgcatctccagatgctgctgggaagagcgggctaacaccactgcatgtagctgcacattacgataatcagaaagtggcccttctgcttttggaccaaggagcctcacctcacgcagccgcaaagaatggttatacgccactgcacatcgctgccaaaaagaaccagatggacatagcgacaactctgctggaatatggtgctgatgccaacgcagttacccggcaaggaattgcttccgtccatctcgcagctcaggaagggcacgtggacatggtgtcgctgctcctcggtagaaatgcgaatgtgaacctgagcaataagagcggcctgaccccactccatttggctgctcaagaagatcgagtgaatgtggcagaagtcctcgtaaaccaaggggctcatgtggacgcccagacaaagatgggatacacaccactgcatgtgggctgccactatggaaatatcaagattgttaatttcctgctccagcattctgcaaaagttaatgccaaaacaaagaatgggtatacgccattacatcaagcagcacagcaggggcatacgcatataataaatgtcttacttcagaacaacgcctcccccaatgaactcactgtgaatgggaatactgcccttggcattgcccggcgcctcggctacatctcagtagtggacaccctgaagatagtgaccgaagagaccatgaccacaactactgtcacagagaagcacaaaatgaatgttccagaaacgatgaatgaagttcttgatatgtctgatgatgaagttcgtaaagccaatgcccctgaaatgctcagtgatggcgaatatatctcagatgttgaagaaggtgaagatgcaatgaccggggacacagacaaatatcttgggccacaggaccttaaggaattgggtgatgattccctgcctgcagagggttacatgggctttagtctcggagcgcgttctgccagcctccgctccttcagttcggataggtcttacaccttgaacagaagctcctatgcacgggacagcatgatgattgaagaactccttgtgccatccaaagagcagcatctaacattcacaagggaatttgattcagattctcttagacattacagctgggctgcagacaccttagacaatgtcaatcttgtttcaagccccattcattctgggtttctggttagctttatggtggacgcgagagggggctccatgagaggaagccgtcatcacgggatgagaatcatcattcctccacgcaagtgtacggcccccactcgaatcacctgccgtttggtaaagagacataaactggccaacccaccccccatggtggaaggagagggattagccagtaggctggtagaaatgggtcctgcaggggcacaatttttaggccctgtcatagtggaaatccctcactttgggtccatgagaggaaaagagagagaactcattgttcttcgaagtgaaaatggtgaaacttggaaggagcatcagtttgacagcaaaaatgaagatttaaccgagttacttaatggcatggatgaagaacttgatagcccagaagagttagggaaaaagcgtatctgcaggattatcacgaaagatttcccccagtattttgcagtggtttcccggattaagcaggaaagcaaccagattggtcctgaaggtggaattctgagcagcaccacagtgccccttgttcaagcatctttcccagagggtgccctaactaaaagaattcgagtgggcctccaggcccagcctgttccagatgaaattgtgaaaaagatccttggaaacaaagcaacttttagcccaattgtcactgtggaaccaagaagacggaaattccataaaccaatcacaatgaccattccggtgcccccgccctcaggagaaggtgtatccaatggatacaaaggggacactacacccaatctgcgtcttctctgtagcattacagggggcacttcgcctgctcagtgggaagacatcacaggaacaactcctttgacgtttataaaagattgtgtctcctttacaaccaatgtttcagccagattttggcttgcagactgccatcaagttttagaaactgtggggttagccacgcaactgtacagagaattgatatgtgttccatatatggccaagtttgttgtttttgccaaaatgaatgatcccgtagaatcttccttgcgatgtttctgcatgacagatgacaaagtggacaaaactttagagcaacaagagaattttgaggaagtcgcaagaagcaaagatattgaggttctggaaggaaaacctatttatgttgattgttatggaaatttggccccacttaccaaaggaggacagcaacttgtttttaacttttattctttcaaagaaaatagactgccattttccatcaagattagagacaccagccaagagccctgtggtcgtctgtcttttctgaaagaaccaaagacaacaaaaggactgcctcaaacagcggtttgcaacttaaatatcactctgccagcacataaaaagattgagaaaacagatagacgacagagcttcgcatccttagctttacgtaagcgctacagctacttgactgagcctggaatgagtccacagagtccatgtgaacggacagatatcaggatggcaatagtagccgatcacctgggacttagttggacagaactggcaagggaactgaatttttcagtggatgaaatcaatcaaatacgtgtggaaaatccaaattctttaatttctcagagcttcatgttattaaaaaaatgggttaccagagacggaaaaaatgccacaactgatgccttaacttcggtcttgacaaaaattaatcgaatagatatagtgacactgctagaaggaccaatatttgattatggaaatatttcaggcaccagaagttttgcagatgagaacaatgttttccatgaccctgttgatggttatccttcccttcaagtggaactggaaacccccacagggttgcactacacaccacctacccctttccagcaagatgattattttagtgatatctctagcatagaatctccccttagaacccctagtagactgagtgatgggctagtgccttcccaggggaacatagagcattccgcagatggacctccagtcgtaactgcagaagacgcttccttagaagacagcaaactggaagactcagtgcctttaacagaaatgcctgaagcagtggatgtagatgagagccagttggagaatgtatgtctgagttggcagaatgagacatcaagtggaaacctagagtcctgcgctcaagctcgaagagtaactggtgggttactagatcgactggatgacagccctgaccagtgtagagattccattacctcatatctcaaaggagaagctggcaaatttgaagcaaatggaagccatacagaaatcactccagaagcaaagacaaaatcttactttccagaatcccaaaatgatgtaggaaaacagagtaccaaggaaactctgaaaccaaaaatacatggatctggtcatgttgaagaaccagcatcaccactagcagcatatcagaaatctctagaagaaaccagcaagcttataatagaagagactaaaccctgtgtgcctgtcagtatgaaaaagatgagtaggacttctccagcagatggcaagccaaggcttagcctccatgaagaagaggggtccagtgggtctgagcaaaagcagggagaaggttttaaggtgaaaacgaagaaagaaatccggcatgtggaaaagaagagccactcgtaacagcgaacggtcagtcaaggatcataagtttttactgccagtattgagaaattcgtggaagaaatgtcagcaggaagtaaaaattcaccgagaagtgtgtgtgtgttcgctgcttccacacattaatggcatgattttttttatgcaaaaagaaaagaaaagaaaaccacccacattttaatttagcatgagccaatttacagagcatggaaatcactttcatttccggattggcgcgtgtgcaattagcaatgcagtgtatatacaagaagccatgctgttaacagtttatctcaagtaatttggtgtcatttacaaaaggaagaaattcctgccatcagaagggacagaaggagatggaatgatcaaatcacagagaaacactaaaattactaaatctacaacagctcgccttatttttcttggacccaaactgtcagggtataaacactatttgtttcttttttaaaacatcgatagttttgctgtaaataataacactgtataaattctaacagaaaaatagaataaaatgttgataaggcactgcctcttagaacacaaacagaatattgcaaatgcatttaacaaataggggtctcaagtgacttcaccctagaagaggagggagggattctgggtgggggtgactcttcactgattcttgtatattagcaattataatgtttgtatatgcaaaactgctagcttgattttaaaaaaaaacaaatctttaaaatctgctgcaaatttaaataattcccaaaatgaggaattctgtagttctgtgaaaaatttttttcttcagaatactaatattttgatgcatgtgtatcaccttattttgattaaatcttttccaattttgcaaacactacagtatactgcaacacaaaagattttatctgtaaacacaaagcccttcatctaatatttgttgctattgccaatttttcaatgaaatgacctaaaaacaacaaaaaaaaataacctatacggtagttgctttagggggtggggggatgctatctgttagtgcttaaaagggggtaaatgcttgccgctttagaggtggatggtgctcataaaaggccccagtcgggggtatttaaaaaggactgaacagaaatccttagctagtagaatggcagcacgctgtaaaattattactgtattgtgtactggctataagatgtagacacctttcagtaagccaatcatttgtaaccattctagcagtgtcatattaggttaataaggctgctgtgttttaaagggcatttttatttgggttttggtgaaattctttaatttgttgattatattcacataaaatcagcattcattgacacatagctctaatgacatatgtatgaaaaaccatacactggatgacctagtcgattatttaagcataaaataaattgtgttaaactcttcacctatc

SEQ ID NO: 8008 - protein, 1861 aa, Homo sapiens; identical to SEQ ID NO: 8006

SEQ ID NO: 8009 - DNA, 1228 bp, Homo sapiens
acaacatggcctcctccgcctcctcctctcccgcgggcaccgaggactccgctcctgcccagggtggctttggatcagattattcacgaagctctagaaaggtaagtgaacttggcattggccattgcttattatgcttcctgtctggctcttactcatgttgccattttgtggactaaaactcaaggcagttcaaaaatactgatatgcaggtgccatggatgctgttggagtgtgtgtcctaagagagagggtaagtgctggttttccattttaaacatagctcgtgatatcaagttgccccctcccttcattccctgactcccgtcttcctccaaaagcggctctcttggtttagtaagcatctctaccctgcaaagcggaaataatgaaaaatgagattcactttgcaagcttgttgggtgagcttctggagaataatttttaccaaaagcctgaaatcatttggcattgttggtgttttcaatgcatctgcatcacagcacattgcatttcacatctggccagtttggaatgaaacttagaaaatcaccagactatagtgatgtaattgtcatgaagtggtttttgtagcttagagaaaagaaaaacacttggctgaaagaatggtctgaagtcccacccaaagtaaaacattctaaattaatagttgcctaaagactacagtattattagacttctatttaaaaaaattcacagttctaatcaaagaagtgtaattggagtttcctttttaaatatttgaagactgtatttactattttgatgttcaaatattagatctatatttagaaggaagtccagaggcattttaagctaaataggaatgtggattcctattcaacttactattggaaaaatacattgtcattatagactttttaaagtattaagtagcttttaaaaaacattataggactgttatagctaaatccttttaatatcttcattactcttaattctctaggagtttagtaacattttgctttttttggtaaaatttgaagtctaatttactagttggctatttctttacattgagaatggttattactttttcactctgaacaattgaaaattaagaaaaattacacttaaatataaattcttgatggttttctttgctgttcttttcatttattattggaaaacagatactgcattaaagtatttgttgaaatatgcctaagtgtgttttcagattggc

SEQ ID NO: 8010 - protein, 57 aa, Homo sapiens
MASSASSSPAGTEDSAPAQGGFGSDYSRSSRKVSELGIGHCLLCFLSGSYSCCHFVD

SEQ ID NO: 8011 - DNA, 1163 bp, Homo sapiens
agcgcggtgagtttgaaactgctcgcacttggcttcaaagctggctcttggaaattgagcggagagcgacgcggttgttgtagctgccgctgcggccgccgcggaataataagccgggatctaccatacccattgactaactatggaagattataccaaaatagagaaaattggagaaggtacctatggagttgtgtataagggtagacacaaaactacaggtcaagtggtagccatgaaaaaaatcagactagaaagtgaagaggaaggggttcctagtactgcaattcgggaaatttctctattaaaggaacttcgtcatccaaatatagtcagtcttcaggatgtgcttatgcaggattccaggttatatctcatctttgagtttctttccatggatctgaagaaatacttggattctatccctcctggtcagtacatggattcttcacttgttaagagttatttataccaaatcctacaggggattgtgttttgtcactctagaagagttcttcacagagacttaaaacctcaaaatctcttgattgatgacaaaggaacaattaaactggctgattttggccttgccagagcttttggaatacctatcagagtatatacacatgaggcaataacactctggtacagatctccagaagtattgctggggtcagctcgttactcaactccagttgacatttggagtataggcaccatatttgctgaactagcaactaagaaaccacttttccatggggattcagaaattgatcaactcttcaggattttcagagctttgggcactcccaataatgaagtgtggccagaagtggaatctttacaggactataagaatacatttcccaaatggaaaccaggaagcctagcatcccatgtcaaaaacttggatgaaaatggcttggatttgctctcgaaaatgttaatctatgatccagccaaacgaatttctggcaaaatggcactgaatcatccatattttaatgatttggacaatcagattaagaagatgtagctttctgacaaaaagtttccatatgttatatcaacagatagttgtgtttttattgttaactcttgtctatttttgtcttatatatatttctttgttatcaaacttcagctgtacttcgtcttctaat

SEQ ID NO: 8012 - protein, 297 aa, Homo sapiens
MEDYTKIEKIGEGTYGVVYKGRHKTTGQVVAMKKIRLESEEEGVPSTAIREISLLKELRHPNIVSLQDVLMQDSRLYLIFEFLSMDLKKYLDSIPPGQYMDSSLVKSYLYQILQGIVFCHSRRVLHRDLKPQNLLIDDKGTIKLADFGLARAFGIPIRVYTHEAITLWYRSPEVLLGSARYSTPVDIWSIGTIFAELATKKPLFHGDSEIDQLFRIFRALGTPNNEVWPEVESLQDYKNTFPKWKPGSLASHVKNLDENGLDLLSKMLIYDPAKRISGKMALNHPYFNDLDNQIKKM

SEQ ID NO: 8013 - DNA, 1294 bp, Homo sapiens
agcgcggtgagtttgaaactgctcgcacttggcttcaaagctggctcttggaaattgagcggagagcgacgcggttgttgtagctgccgctgcggccgccgcggaataataagccgggatctaccatacccattgactaactatggaagattataccaaaatagagaaaattggagaaggtacctatggagttgtgtataagggtagacacaaaactacaggtcaagtggtagccatgaaaaaaatcagactagaaagtgaagaggaaggggttcctagtactgcaattcgggaaatttctctattaaaggaacttcgtcatccaaatatagtcagtcttcaggatgtgcttatgcaggattccaggttatatctcatctttgagtttctttccatggatctgaagaaatacttggattctatccctcctggtcagtacatggattcttcacttgttaagagttatttataccaaatcctacaggggattgtgttttgtcactctagaagagttcttcacagagacttaaaacctcaaaatctcttgattgatgacaaaggaacaattaaactggctgattttggccttgccagagcttttggaatacctatcagagtatatacacatgaggcaataacactctggtacagatctccagaagtattgctggggtcagctcgttactcaactccagttgacatttggagtataggcaccatatttgctgaactagcaactaagaaaccacttttccatggggattcagaaattgatcaactcttcaggattttcagagctttgggcactcccaataatgaagtgtggccagaagtggaatctttacaggactataagaatacatttcccaaatggaaaccaggaagcctagcatcccatgtcaaaaacttggatgaaaatggcttggatttgctctcgaaaatgttaatctatgatccagccaaacgaatttctggcaaaatggcactgaatcatccatattttaatgatttggacaatcagattaagaagatgtagctttctgacaaaaagtttccatatgttatatcaacagatagttgtgtttttattgttaactcttgtctatttttgtcttatatatatttctttgttatcaaacttcagctgtacttcgtcttctaatttcaaaaatataacttaaaaatgtaaatattctatatgaatttaaatataattctgtaaatgtgtgtaggtctcactgtaacaactatttgttactataataaaactataatattgatgtcaggaatcagg

SEQ ID NO: 8014 - protein, 297 aa, Homo sapiens; identical to SEQ ID NO: 8012

SEQ ID NO: 8015 - DNA, 1911 bp, Homo sapiens
agcgcggtgagtttgaaactgctcgcacttggcttcaaagctggctcttggaaattgagcggagagcgacgcggttgttgtagctgccgctgcggccgccgcggaataataagccgggatctaccatacccattgactaactatggaagattataccaaaatagagaaaattggagaaggtacctatggagttgtgtataagggtagacacaaaactacaggtcaagtggtagccatgaaaaaaatcagactagaaagtgaagaggaaggggttcctagtactgcaattcgggaaatttctctattaaaggaacttcgtcatccaaatatagtcagtcttcaggatgtgcttatgcaggattccaggttatatctcatctttgagtttctttccatggatctgaagaaatacttggattctatccctcctggtcagtacatggattcttcacttgttaagagttatttataccaaatcctacaggggattgtgttttgtcactctagaagagttcttcacagagacttaaaacctcaaaatctcttgattgatgacaaaggaacaattaaactggctgattttggccttgccagagcttttggaatacctatcagagtatatacacatgaggcaataacactctggtacagatctccagaagtattgctggggtcagctcgttactcaactccagttgacatttggagtataggcaccatatttgctgaactagcaactaagaaaccacttttccatggggattcagaaattgatcaactcttcaggattttcagagctttgggcactcccaataatgaagtgtggccagaagtggaatctttacaggactataagaatacatttcccaaatggaaaccaggaagcctagcatcccatgtcaaaaacttggatgaaaatggcttggatttgctctcgaaaatgttaatctatgatccagccaaacgaatttctggcaaaatggcactgaatcatccatattttaatgatttggacaatcagattaagaagatgtagctttctgacaaaaagtttccatatgttatatcaacagatagttgtgtttttattgttaactcttgtctatttttgtcttatatatatttctttgttatcaaacttcagctgtacttcgtcttctaatttcaaaaatataacttaaaaatgtaaatattctatatgaatttaaatataattctgtaaatgtgtgtaggtctcactgtaacaactatttgttactataataaaactataatattgatgtcaggaatcaggaaaaaatttgagttggcttaaatcatctcagtccttatggcagttttattttcctgtagttggaactactaaaatttaggaaaatgctaagttcaagtttcgtaatgctttgaagtatttttatgctctgaatgtttaaatgttctcatcagtttcttgccatgttgttaactatacaacctggctaaagatgaatatttttctactggtattttaatttttgacctaaatgtttaagcattcggaatgagaaaactatacagatttgagaaatgatgctaaatttataggagttttcagtaacttaaaaagctaacatgagagcatgccaaaatttgctaagtcttacaaagatcaagggctgtccgcaacagggaagaacagttttgaaaatttatgaactatcttatttttaggtaggttttgaaagctttttgtctaagtgaattcttatgccttggtcagagtaataactgaaggagttgcttatcttggctttcgagtctgagtttaaaactacacattttgacatagtgtttattagcagccatctaaaaaggctctaatgtatatttaactaaaattactagctttgggaattaaactgtttaacaaat

SEQ ID NO: 8016 - protein, 297 aa, Homo sapiens; identical to SEQ ID NO: 8012

SEQ ID NO: 8017 - DNA, 2520 bp, Homo sapiens
agcgcggtgagtttgaaactgctcgcacttggcttcaaagctggctcttggaaattgagcggagagcgacgcggttgttgtagctgccgctgcggccgccgcggaataataagccgggatctaccatacccattgactaactatggaagattataccaaaatagagaaaattggagaaggtacctatggagttgtgtataagggtagacacaaaactacaggtcaagtggtagccatgaaaaaaatcagactagaaagtgaagaggaaggggttcctagtactgcaattcgggaaatttctctattaaaggaacttcgtcatccaaatatagtcagtcttcaggatgtgcttatgcaggattccaggttatatctcatctttgagtttctttccatggatctgaagaaatacttggattctatccctcctggtcagtacatggattcttcacttgttaagagttatttataccaaatcctacaggggattgtgttttgtcactctagaagagttcttcacagagacttaaaacctcaaaatctcttgattgatgacaaaggaacaattaaactggctgattttggccttgccagagcttttggaatacctatcagagtatatacacatgaggcaataacactctggtacagatctccagaagtattgctggggtcagctcgttactcaactccagttgacatttggagtataggcaccatatttgctgaactagcaactaagaaaccacttttccatggggattcagaaattgatcaactcttcaggattttcagagctttgggcactcccaataatgaagtgtggccagaagtggaatctttacaggactataagaatacatttcccaaatggaaaccaggaagcctagcatcccatgtcaaaaacttggatgaaaatggcttggatttgctctcgaaaatgttaatctatgatccagccaaacgaatttctggcaaaatggcactgaatcatccatattttaatgatttggacaatcagattaagaagatgtagctttctgacaaaaagtttccatatgttatatcaacagatagttgtgtttttattgttaactcttgtctatttttgtcttatatatatttctttgttatcaaacttcagctgtacttcgtcttctaatttcaaaaatataacttaaaaatgtaaatattctatatgaatttaaatataattctgtaaatgtgtgtaggtctcactgtaacaactatttgttactataataaaactataatattgatgtcaggaatcaggaaaaaatttgagttggcttaaatcatctcagtccttatggcagttttattttcctgtagttggaactactaaaatttaggaaaatgctaagttcaagtttcgtaatgctttgaagtatttttatgctctgaatgtttaaatgttctcatcagtttcttgccatgttgttaactatacaacctggctaaagatgaatatttttctactggtattttaatttttgacctaaatgtttaagcattcggaatgagaaaactatacagatttgagaaatgatgctaaatttataggagttttcagtaacttaaaaagctaacatgagagcatgccaaaatttgctaagtcttacaaagatcaagggctgtccgcaacagggaagaacagttttgaaaatttatgaactatcttatttttaggtaggttttgaaagctttttgtctaagtgaattcttatgccttggtcagagtaataactgaaggagttgcttatcttggctttcgagtctgagtttaaaactacacattttgacatagtgtttattagcagccatctaaaaaggctctaatgtatatttaactaaaattactagctttgggaattaaactgtttaacaaataatgctgctcattgtgattcttacctataagcagcctaatttgaattatttgctgcaatcaagagaagtgtacaatagttttattacttttttagtgtacttctatcctttttccaactatatctcctctatttttcctcctcgttaacaggctagaatgtgcattcctgggttaccgatttttacactcaattggatgtgtaatgagggatctatctaatccatcttgtcttggaaattttgcactctagaagaaagtgtgtcactttcttcagcagcgagaccttttaagattggtggtttggttgtcctgttctgtggtctttggtggaagccagtttgttgtaagagaatgtagagcttattaatgtaagtcatttggggttatattgtggagggttgtttaggattgcatggcaggaattgggtaaatgaaaggtaacactaaagattggagatggtataatggcatatctacaggtctgtgtttccttatctgcgaagtgagacattgaaatagatctgttttgcaaattgtggattgcaaccctttagtgatttacgaccagcattaatcactaacccctttcctaccccagtgtaaaacag

SEQ ID NO: 8018 - protein, 297 aa, Homo sapiens; identical to SEQ ID NO: 8012

SEQ ID NO: 8019 - DNA, 1032 bp, Homo sapiens
gcacttggcttcaaagctggctcttggaaattgagcggagagcgacgcggttgttgtagctgccgctgcggccgccgcggaataataagccgggatctaccatacccattgactaactatggaagattataccaaaatagagaaaattggagaaggtacctatggagttgtgtataagggtagacacaaaactacaggtcaagtggtagccatgaaaaaaatcagactagaaagtgaagaggaaggggttcctagtactgcaattcgggaaatttctctattaaaggaacttcgtcatccaaatatagtcagtcttcaggatgtgcttatgcaggattccaggttatatctcatctttgagtttctttccatggatctgaagaaatacttggattctatccctcctggtcagtacatggattcttcacttgttaaggtagtaacactctggtacagatctccagaagtattgctggggtcagctcgttactcaactccagttgacatttggagtataggcaccatatttgctgaactagcaactaagaaaccacttttccatggggattcagaaattgatcaactcttcaggattttcagagctttgggcactcccaataatgaagtgtggccagaagtggaatctttacaggactataagaatacatttcccaaatggaaaccaggaagcctagcatcccatgtcaaaaacttggatgaaaatggcttggatttgctctcgaaaatgttaatctatgatccagccaaacgaatttctggcaaaatggcactgaatcatccatattttaatgatttggacaatcagattaagaagatgtagctttctgacaaaaagtttccatatgttatatcaacagatagttgtgtttttattgttaactcttgtctatttttgtcttatatatatttctttgttatcaaacttcagctgtacttcgtcttctaatttcaaaaatataacttaaaaatgtaaatattctatatgaatttaaatataattctgtaaatgtg

SEQ ID NO: 8020 - protein, 240 aa, Homo sapiens; identical to SEQ ID NO: 1168

SEQ ID NO: 8021 - DNA, 1099 bp, Homo sapiens
gcacttggcttcaaagctggctcttggaaattgagcggagagcgacgcggttgttgtagctgccgctgcggccgccgcggaataataagccgggatctaccatacccattgactaactatggaagattataccaaaatagagaaaattggagaaggtacctatggagttgtgtataagggtagacacaaaactacaggtcaagtggtagccatgaaaaaaatcagactagaaagtgaagaggaaggggttcctagtactgcaattcgggaaatttctctattaaaggaacttcgtcatccaaatatagtcagtcttcaggatgtgcttatgcaggattccaggttatatctcatctttgagtttctttccatggatctgaagaaatacttggattctatccctcctggtcagtacatggattcttcacttgttaaggtagtaacactctggtacagatctccagaagtattgctggggtcagctcgttactcaactccagttgacatttggagtataggcaccatatttgctgaactagcaactaagaaaccacttttccatggggattcagaaattgatcaactcttcaggattttcagagctttgggcactcccaataatgaagtgtggccagaagtggaatctttacaggactataagaatacatttcccaaatggaaaccaggaagcctagcatcccatgtcaaaaacttggatgaaaatggcttggatttgctctcgaaaatgttaatctatgatccagccaaacgaatttctggcaaaatggcactgaatcatccatattttaatgatttggacaatcagattaagaagatgtagctttctgacaaaaagtttccatatgttatatcaacagatagttgtgtttttattgttaactcttgtctatttttgtcttatatatatttctttgttatcaaacttcagctgtacttcgtcttctaatttcaaaaatataacttaaaaatgtaaatattctatatgaatttaaatataattctgtaaatgtgtgtaggtctcactgtaacaactatttgttactataataaaactataatattgatgtcaggaatcagg

SEQ ID NO: 8022 - protein, 240 aa, Homo sapiens; identical to SEQ ID NO: 1168

SEQ ID NO: 8023 - DNA, 2980 bp, Homo sapiens
gcacttggcttcaaagctggctcttggaaattgagcggagagcgacgcggttgttgtagctgccgctgcggccgccgcggaataataagccgggatctaccatacccattgactaactatggaagattataccaaaatagagaaaattggagaaggtacctatggagttgtgtataagggtagacacaaaactacaggtcaagtggtagccatgaaaaaaatcagactagaaagtgaagaggaaggggttcctagtactgcaattcgggaaatttctctattaaaggaacttcgtcatccaaatatagtcagtcttcaggatgtgcttatgcaggattccaggttatatctcatctttgagtttctttccatggatctgaagaaatacttggattctatccctcctggtcagtacatggattcttcacttgttaaggtaaaagcttaactaattttattaatatttatgcactgtggatataaagggactatatatagaagtccctgcattttgtgggaatatgcttggaaaaagtgttagaataagaaaaagtatttcatttttctccctcatggttagtttatacaggttagagatacccatgttattaccagatagtgtttctagtaagtaaaaattagtgcctgagataacatagaactggtaggtattgttggaagctagggtagtctggtctttctttggctgtcagatacatgtaaaacaaagtaatgaaagcctagggcagagtggtggttgtaggtgttttattccagttttgaacatgttttggtcaatttattgtagacatttattatatttcaggtaaattataaaattgtatagttttaagtactgaagtatataaaagtgtcttattcttgcaccagttctaccaaaccactctgcagaggtagcgctgttagttttatttgtaatcttacacttgtatgtatgttcactttgtatgtatataaagatttttttttttacacaaggtggacttatttgcatatgtatatatacatattttcccttttttgtgtaaaacattatcaagacgtagatctacctatgtctatttacatttttgatataaatctgttaactatgtgaaaaaggcatattaagattgttttaattttatatttcatgacaatttaacacttcatatttagctattataaaccgcctatattttcgttaggatacgttctttaacaatcttgcatgacttttggactttctgcttttatgtcttgcttaagtcttcctcactcaaagatcgaatgtattagaataatacatgtcagtatttttctggtagttttagtaagtcctgtcttccacacatactttttttgtcttaaattctgtattaagatttattttgacttaaaaactgggatacagattctgctttatctttttccaaatggctagccagttgttctaactggttttatgtacaggcagatcatccgttttgttttgttttttgaacaccacttgtccctctaagatggagcatctgtattactttccaatttcaaactgtaagtcatttttctgtgtactttgtttttgtaatatccatgctacttcagatgtcaatgacattgtctttggcaacaaatgtcttgtaaagcacttttctctgaactaagcagcattttatgataattttatccattgaaatatataatcataatatctttgccatcacttttagaatctaattttttcaagaaggaaatgaatatgtaaaaatgaaagatagaaaaggccaactgtattgaagatacaaaatagagttggtagcggtatatagaagaaaaatcaagaggcttctgtgtagaaaaccaatttgtaatttaaggatcggggaccaaaaatgtttaaagactaaatgtgttcacattactatagatatgtctataaggtgaagattcttttcttaggtatacaaatgtgatgttgtatataaatgggcttcccacccacaaatgcttattagcctaaaatggcctgaaagctctagtaattaaattatttctctgcgtcctaattttttgtctttgaaacagattatttagaaaatcatgtacttcgcttaagtttctaacttttacttgctttttccagagttatttataccaaatcctacaggggattgtgttttgtcactctagaagagttcttcacagagacttaaaacctcaaaatctcttgattgatgacaaaggaacaattaaactggctgattttggccttgccagagcttttggaatacctatcagagtatatacacatgaggcaataacactctggtacagatctccagaagtattgctggggtcagctcgttactcaactccagttgacatttggagtataggcaccatatttgctgaactagcaactaagaaaccacttttccatggggattcagaaattgatcaactcttcaggattttcagagctttgggcactcccaataatgaagtgtggccagaagtggaatctttacaggactataagaatacatttcccaaatggaaaccaggaagcctagcatcccatgtcaaaaacttggatgaaaatggcttggatttgctctcgaaaatgttaatctatgatccagccaaacgaatttctggcaaaatggcactgaatcatccatattttaatgatttggacaatcagattaagaagatgtagctttctgacaaaaagtttccatatgttatatcaacagatagttgtgtttttattgttaactcttgtctatttttgtcttatatatatttctttgttatcaaacttcagctgtacttcgtcttctaatttcaaaaatataacttaaaaatgtaaatattctatatgaatttaaatataattctgtaaatgtgtgtaggtctcactgtaacaactatttgttactataataaaactataatattgatgtcaggaatcagg

SEQ ID NO: 8024 - protein, 109 aa, Homo sapiens
MEDYTKIEKIGEGTYGVVYKGRHKTTGQVVAMKKIRLESEEEGVPSTAIREISLLKELRHPNIVSLQDVLMQDSRLYLIFEFLSMDLKKYLDSIPPGQYMDSSLVKVKA

SEQ ID NO: 8025 - DNA, 1716 bp, Homo sapiens
gcacttggcttcaaagctggctcttggaaattgagcggagagcgacgcggttgttgtagctgccgctgcggccgccgcggaataataagccgggatctaccatacccattgactaactatggaagattataccaaaatagagaaaattggagaaggtacctatggagttgtgtataagggtagacacaaaactacaggtcaagtggtagccatgaaaaaaatcagactagaaagtgaagaggaaggggttcctagtactgcaattcgggaaatttctctattaaaggaacttcgtcatccaaatatagtcagtcttcaggatgtgcttatgcaggattccaggttatatctcatctttgagtttctttccatggatctgaagaaatacttggattctatccctcctggtcagtacatggattcttcacttgttaaggtagtaacactctggtacagatctccagaagtattgctggggtcagctcgttactcaactccagttgacatttggagtataggcaccatatttgctgaactagcaactaagaaaccacttttccatggggattcagaaattgatcaactcttcaggattttcagagctttgggcactcccaataatgaagtgtggccagaagtggaatctttacaggactataagaatacatttcccaaatggaaaccaggaagcctagcatcccatgtcaaaaacttggatgaaaatggcttggatttgctctcgaaaatgttaatctatgatccagccaaacgaatttctggcaaaatggcactgaatcatccatattttaatgatttggacaatcagattaagaagatgtagctttctgacaaaaagtttccatatgttatatcaacagatagttgtgtttttattgttaactcttgtctatttttgtcttatatatatttctttgttatcaaacttcagctgtacttcgtcttctaatttcaaaaatataacttaaaaatgtaaatattctatatgaatttaaatataattctgtaaatgtgtgtaggtctcactgtaacaactatttgttactataataaaactataatattgatgtcaggaatcaggaaaaaatttgagttggcttaaatcatctcagtccttatggcagttttattttcctgtagttggaactactaaaatttaggaaaatgctaagttcaagtttcgtaatgctttgaagtatttttatgctctgaatgtttaaatgttctcatcagtttcttgccatgttgttaactatacaacctggctaaagatgaatatttttctactggtattttaatttttgacctaaatgtttaagcattcggaatgagaaaactatacagatttgagaaatgatgctaaatttataggagttttcagtaacttaaaaagctaacatgagagcatgccaaaatttgctaagtcttacaaagatcaagggctgtccgcaacagggaagaacagttttgaaaatttatgaactatcttatttttaggtaggttttgaaagctttttgtctaagtgaattcttatgccttggtcagagtaataactgaaggagttgcttatcttggctttcgagtctgagtttaaaactacacattttgacatagtgtttattagcagccatctaaaaaggctctaatgtatatttaactaaaattactagctttgggaattaaactgtttaacaaat

SEQ ID NO: 8026 - protein, 240 aa, Homo sapiens; identical to SEQ ID NO: 1168

SEQ ID NO: 8027 - DNA, 2325 bp, Homo sapiens
gcacttggcttcaaagctggctcttggaaattgagcggagagcgacgcggttgttgtagctgccgctgcggccgccgcggaataataagccgggatctaccatacccattgactaactatggaagattataccaaaatagagaaaattggagaaggtacctatggagttgtgtataagggtagacacaaaactacaggtcaagtggtagccatgaaaaaaatcagactagaaagtgaagaggaaggggttcctagtactgcaattcgggaaatttctctattaaaggaacttcgtcatccaaatatagtcagtcttcaggatgtgcttatgcaggattccaggttatatctcatctttgagtttctttccatggatctgaagaaatacttggattctatccctcctggtcagtacatggattcttcacttgttaaggtagtaacactctggtacagatctccagaagtattgctggggtcagctcgttactcaactccagttgacatttggagtataggcaccatatttgctgaactagcaactaagaaaccacttttccatggggattcagaaattgatcaactcttcaggattttcagagctttgggcactcccaataatgaagtgtggccagaagtggaatctttacaggactataagaatacatttcccaaatggaaaccaggaagcctagcatcccatgtcaaaaacttggatgaaaatggcttggatttgctctcgaaaatgttaatctatgatccagccaaacgaatttctggcaaaatggcactgaatcatccatattttaatgatttggacaatcagattaagaagatgtagctttctgacaaaaagtttccatatgttatatcaacagatagttgtgtttttattgttaactcttgtctatttttgtcttatatatatttctttgttatcaaacttcagctgtacttcgtcttctaatttcaaaaatataacttaaaaatgtaaatattctatatgaatttaaatataattctgtaaatgtgtgtaggtctcactgtaacaactatttgttactataataaaactataatattgatgtcaggaatcaggaaaaaatttgagttggcttaaatcatctcagtccttatggcagttttattttcctgtagttggaactactaaaatttaggaaaatgctaagttcaagtttcgtaatgctttgaagtatttttatgctctgaatgtttaaatgttctcatcagtttcttgccatgttgttaactatacaacctggctaaagatgaatatttttctactggtattttaatttttgacctaaatgtttaagcattcggaatgagaaaactatacagatttgagaaatgatgctaaatttataggagttttcagtaacttaaaaagctaacatgagagcatgccaaaatttgctaagtcttacaaagatcaagggctgtccgcaacagggaagaacagttttgaaaatttatgaactatcttatttttaggtaggttttgaaagctttttgtctaagtgaattcttatgccttggtcagagtaataactgaaggagttgcttatcttggctttcgagtctgagtttaaaactacacattttgacatagtgtttattagcagccatctaaaaaggctctaatgtatatttaactaaaattactagctttgggaattaaactgtttaacaaataatgctgctcattgtgattcttacctataagcagcctaatttgaattatttgctgcaatcaagagaagtgtacaatagttttattacttttttagtgtacttctatcctttttccaactatatctcctctatttttcctcctcgttaacaggctagaatgtgcattcctgggttaccgatttttacactcaattggatgtgtaatgagggatctatctaatccatcttgtcttggaaattttgcactctagaagaaagtgtgtcactttcttcagcagcgagaccttttaagattggtggtttggttgtcctgttctgtggtctttggtggaagccagtttgttgtaagagaatgtagagcttattaatgtaagtcatttggggttatattgtggagggttgtttaggattgcatggcaggaattgggtaaatgaaaggtaacactaaagattggagatggtataatggcatatctacaggtctgtgtttccttatctgcgaagtgagacattgaaatagatctgttttgcaaattgtggattgcaaccctttagtgatttacgaccagcattaatcactaacccctttcctaccccagtgtaaaacag

SEQ ID NO: 8028 - protein, 240 aa, Homo sapiens; identical to SEQ ID NO: 1168

SEQ ID NO: 8029 - DNA, 1970 bp, Homo sapiens
gctggctcttggaaattgagcggagagcgacgcggttgttgtagctgccgctgcggccgccgcggaataataagccgggtacagtggctggggtcagggtcgtgtctaggggacggccgagggcctcggagggcgagtattgaggaacggggtcctctaagaaggccggactggaggatctaccatacccattgactaactatggaagattataccaaaatagagaaaattggagaaggtacctatggagttgtgtataagggtagacacaaaactacaggtcaagtggtagccatgaaaaaaatcagactagaaagtgaagaggaaggggttcctagtactgcaattcgggaaatttctctattaaaggaacttcgtcatccaaatatagtcagtcttcaggatgtgcttatgcaggattccaggttatatctcatctttgagtttctttccatggatctgaagaaatacttggattctatccctcctggtcagtacatggattcttcacttgttaagagttatttataccaaatcctacaggggattgtgttttgtcactctagaagagttcttcacagagacttaaaacctcaaaatctcttgattgatgacaaaggaacaattaaactggctgattttggccttgccagagcttttggaatacctatcagagtatatacacatgaggcaataacactctggtacagatctccagaagtattgctggggtcagctcgttactcaactccagttgacatttggagtataggcaccatatttgctgaactagcaactaagaaaccacttttccatggggattcagaaattgatcaactcttcaggattttcagagctttgggcactcccaataatgaagtgtggccagaagtggaatctttacaggactataagaatacatttcccaaatggaaaccaggaagcctagcatcccatgtcaaaaacttggatgaaaatggcttggatttgctctcgaaaatgttaatctatgatccagccaaacgaatttctggcaaaatggcactgaatcatccatattttaatgatttggacaatcagattaagaagatgtagctttctgacaaaaagtttccatatgttatatcaacagatagttgtgtttttattgttaactcttgtctatttttgtcttatatatatttctttgttatcaaacttcagctgtacttcgtcttctaatttcaaaaatataacttaaaaatgtaaatattctatatgaatttaaatataattctgtaaatgtgtgtaggtctcactgtaacaactatttgttactataataaaactataatattgatgtcaggaatcaggaaaaaatttgagttggcttaaatcatctcagtccttatggcagttttattttcctgtagttggaactactaaaatttaggaaaatgctaagttcaagtttcgtaatgctttgaagtatttttatgctctgaatgtttaaatgttctcatcagtttcttgccatgttgttaactatacaacctggctaaagatgaatatttttctactggtattttaatttttgacctaaatgtttaagcattcggaatgagaaaactatacagatttgagaaatgatgctaaatttataggagttttcagtaacttaaaaagctaacatgagagcatgccaaaatttgctaagtcttacaaagatcaagggctgtccgcaacagggaagaacagttttgaaaatttatgaactatcttatttttaggtaggttttgaaagctttttgtctaagtgaattcttatgccttggtcagagtaataactgaaggagttgcttatcttggctttcgagtctgagtttaaaactacacattttgacatagtgtttattagcagccatctaaaaaggctctaatgtatatttaactaaaattactagctttgggaattaaactgtttaacaaat

SEQ ID NO: 8030 - protein, 297 aa, Homo sapiens; identical to SEQ ID NO: 8012

SEQ ID NO: 8031 - DNA, 2579 bp, Homo sapiens
gctggctcttggaaattgagcggagagcgacgcggttgttgtagctgccgctgcggccgccgcggaataataagccgggtacagtggctggggtcagggtcgtgtctaggggacggccgagggcctcggagggcgagtattgaggaacggggtcctctaagaaggccggactggaggatctaccatacccattgactaactatggaagattataccaaaatagagaaaattggagaaggtacctatggagttgtgtataagggtagacacaaaactacaggtcaagtggtagccatgaaaaaaatcagactagaaagtgaagaggaaggggttcctagtactgcaattcgggaaatttctctattaaaggaacttcgtcatccaaatatagtcagtcttcaggatgtgcttatgcaggattccaggttatatctcatctttgagtttctttccatggatctgaagaaatacttggattctatccctcctggtcagtacatggattcttcacttgttaagagttatttataccaaatcctacaggggattgtgttttgtcactctagaagagttcttcacagagacttaaaacctcaaaatctcttgattgatgacaaaggaacaattaaactggctgattttggccttgccagagcttttggaatacctatcagagtatatacacatgaggcaataacactctggtacagatctccagaagtattgctggggtcagctcgttactcaactccagttgacatttggagtataggcaccatatttgctgaactagcaactaagaaaccacttttccatggggattcagaaattgatcaactcttcaggattttcagagctttgggcactcccaataatgaagtgtggccagaagtggaatctttacaggactataagaatacatttcccaaatggaaaccaggaagcctagcatcccatgtcaaaaacttggatgaaaatggcttggatttgctctcgaaaatgttaatctatgatccagccaaacgaatttctggcaaaatggcactgaatcatccatattttaatgatttggacaatcagattaagaagatgtagctttctgacaaaaagtttccatatgttatatcaacagatagttgtgtttttattgttaactcttgtctatttttgtcttatatatatttctttgttatcaaacttcagctgtacttcgtcttctaatttcaaaaatataacttaaaaatgtaaatattctatatgaatttaaatataattctgtaaatgtgtgtaggtctcactgtaacaactatttgttactataataaaactataatattgatgtcaggaatcaggaaaaaatttgagttggcttaaatcatctcagtccttatggcagttttattttcctgtagttggaactactaaaatttaggaaaatgctaagttcaagtttcgtaatgctttgaagtatttttatgctctgaatgtttaaatgttctcatcagtttcttgccatgttgttaactatacaacctggctaaagatgaatatttttctactggtattttaatttttgacctaaatgtttaagcattcggaatgagaaaactatacagatttgagaaatgatgctaaatttataggagttttcagtaacttaaaaagctaacatgagagcatgccaaaatttgctaagtcttacaaagatcaagggctgtccgcaacagggaagaacagttttgaaaatttatgaactatcttatttttaggtaggttttgaaagctttttgtctaagtgaattcttatgccttggtcagagtaataactgaaggagttgcttatcttggctttcgagtctgagtttaaaactacacattttgacatagtgtttattagcagccatctaaaaaggctctaatgtatatttaactaaaattactagctttgggaattaaactgtttaacaaataatgctgctcattgtgattcttacctataagcagcctaatttgaattatttgctgcaatcaagagaagtgtacaatagttttattacttttttagtgtacttctatcctttttccaactatatctcctctatttttcctcctcgttaacaggctagaatgtgcattcctgggttaccgatttttacactcaattggatgtgtaatgagggatctatctaatccatcttgtcttggaaattttgcactctagaagaaagtgtgtcactttcttcagcagcgagaccttttaagattggtggtttggttgtcctgttctgtggtctttggtggaagccagtttgttgtaagagaatgtagagcttattaatgtaagtcatttggggttatattgtggagggttgtttaggattgcatggcaggaattgggtaaatgaaaggtaacactaaagattggagatggtataatggcatatctacaggtctgtgtttccttatctgcgaagtgagacattgaaatagatctgttttgcaaattgtggattgcaaccctttagtgatttacgaccagcattaatcactaacccctttcctaccccagtgtaaaacag

SEQ ID NO: 8032 - protein, 297 aa, Homo sapiens; identical to SEQ ID NO: 8012

SEQ ID NO: 8033 - DNA, 1840 bp, Homo sapiens
tgaatatgtaaaaatgaaagatagaaaaggccaactgtattgaagatacaaaatagagttggtagcggtatatagaagaaaaatcaagaggcttctgtgtagaaaaccaatttgtaatttaaggatcggggaccaaaaatgtttaaagactaaatgtgttcacattactatagatatgtctataaggtgaagattcttttcttaggtatacaaatgtgatgttgtatataaatgggcttcccacccacaaatgcttattagcctaaaatggcctgaaagctctagtaattaaattatttctctgcgtcctaattttttgtctttgaaacagattatttagaaaatcatgtacttcgcttaagtttctaacttttacttgctttttccagagttatttataccaaatcctacaggggattgtgttttgtcactctagaagagttcttcacagagacttaaaacctcaaaatctcttgattgatgacaaaggaacaattaaactggctgattttggccttgccagagcttttggaatacctatcagagtatatacacatgaggcaataacactctggtacagatctccagaagtattgctggggtcagctcgttactcaactccagttgacatttggagtataggcaccatatttgctgaactagcaactaagaaaccacttttccatggggattcagaaattgatcaactcttcaggattttcagagctttgggcactcccaataatgaagtgtggccagaagtggaatctttacaggactataagaatacatttcccaaatggaaaccaggaagcctagcatcccatgtcaaaaacttggatgaaaatggcttggatttgctctcgaaaatgttaatctatgatccagccaaacgaatttctggcaaaatggcactgaatcatccatattttaatgatttggacaatcagattaagaagatgtagctttctgacaaaaagtttccatatgttatatcaacagatagttgtgtttttattgttaactcttgtctatttttgtcttatatatatttctttgttatcaaacttcagctgtacttcgtcttctaatttcaaaaatataacttaaaaatgtaaatattctatatgaatttaaatataattctgtaaatgtgtgtaggtctcactgtaacaactatttgttactataataaaactataatattgatgtcaggaatcaggaaaaaatttgagttggcttaaatcatctcagtccttatggcagttttattttcctgtagttggaactactaaaatttaggaaaatgctaagttcaagtttcgtaatgctttgaagtatttttatgctctgaatgtttaaatgttctcatcagtttcttgccatgttgttaactatacaacctggctaaagatgaatatttttctactggtattttaatttttgacctaaatgtttaagcattcggaatgagaaaactatacagatttgagaaatgatgctaaatttataggagttttcagtaacttaaaaagctaacatgagagcatgccaaaatttgctaagtcttacaaagatcaagggctgtccgcaacagggaagaacagttttgaaaatttatgaactatcttatttttaggtaggttttgaaagctttttgtctaagtgaattcttatgccttggtcagagtaataactgaaggagttgcttatcttggctttcgagtctgagtttaaaactacacattttgacatagtgtttattagcagccatctaaaaaggctctaatgtatatttaactaaaattactagctttgggaattaaactgtttaacaaat

SEQ ID NO: 8034 - protein, 44 aa, Homo sapiens
MGIQKLINSSGFSELWALPIMKCGQKWNLYRTIRIHFPNGNQEA

SEQ ID NO: 8035 - DNA, 2449 bp, Homo sapiens
tgaatatgtaaaaatgaaagatagaaaaggccaactgtattgaagatacaaaatagagttggtagcggtatatagaagaaaaatcaagaggcttctgtgtagaaaaccaatttgtaatttaaggatcggggaccaaaaatgtttaaagactaaatgtgttcacattactatagatatgtctataaggtgaagattcttttcttaggtatacaaatgtgatgttgtatataaatgggcttcccacccacaaatgcttattagcctaaaatggcctgaaagctctagtaattaaattatttctctgcgtcctaattttttgtctttgaaacagattatttagaaaatcatgtacttcgcttaagtttctaacttttacttgctttttccagagttatttataccaaatcctacaggggattgtgttttgtcactctagaagagttcttcacagagacttaaaacctcaaaatctcttgattgatgacaaaggaacaattaaactggctgattttggccttgccagagcttttggaatacctatcagagtatatacacatgaggcaataacactctggtacagatctccagaagtattgctggggtcagctcgttactcaactccagttgacatttggagtataggcaccatatttgctgaactagcaactaagaaaccacttttccatggggattcagaaattgatcaactcttcaggattttcagagctttgggcactcccaataatgaagtgtggccagaagtggaatctttacaggactataagaatacatttcccaaatggaaaccaggaagcctagcatcccatgtcaaaaacttggatgaaaatggcttggatttgctctcgaaaatgttaatctatgatccagccaaacgaatttctggcaaaatggcactgaatcatccatattttaatgatttggacaatcagattaagaagatgtagctttctgacaaaaagtttccatatgttatatcaacagatagttgtgtttttattgttaactcttgtctatttttgtcttatatatatttctttgttatcaaacttcagctgtacttcgtcttctaatttcaaaaatataacttaaaaatgtaaatattctatatgaatttaaatataattctgtaaatgtgtgtaggtctcactgtaacaactatttgttactataataaaactataatattgatgtcaggaatcaggaaaaaatttgagttggcttaaatcatctcagtccttatggcagttttattttcctgtagttggaactactaaaatttaggaaaatgctaagttcaagtttcgtaatgctttgaagtatttttatgctctgaatgtttaaatgttctcatcagtttcttgccatgttgttaactatacaacctggctaaagatgaatatttttctactggtattttaatttttgacctaaatgtttaagcattcggaatgagaaaactatacagatttgagaaatgatgctaaatttataggagttttcagtaacttaaaaagctaacatgagagcatgccaaaatttgctaagtcttacaaagatcaagggctgtccgcaacagggaagaacagttttgaaaatttatgaactatcttatttttaggtaggttttgaaagctttttgtctaagtgaattcttatgccttggtcagagtaataactgaaggagttgcttatcttggctttcgagtctgagtttaaaactacacattttgacatagtgtttattagcagccatctaaaaaggctctaatgtatatttaactaaaattactagctttgggaattaaactgtttaacaaataatgctgctcattgtgattcttacctataagcagcctaatttgaattatttgctgcaatcaagagaagtgtacaatagttttattacttttttagtgtacttctatcctttttccaactatatctcctctatttttcctcctcgttaacaggctagaatgtgcattcctgggttaccgatttttacactcaattggatgtgtaatgagggatctatctaatccatcttgtcttggaaattttgcactctagaagaaagtgtgtcactttcttcagcagcgagaccttttaagattggtggtttggttgtcctgttctgtggtctttggtggaagccagtttgttgtaagagaatgtagagcttattaatgtaagtcatttggggttatattgtggagggttgtttaggattgcatggcaggaattgggtaaatgaaaggtaacactaaagattggagatggtataatggcatatctacaggtctgtgtttccttatctgcgaagtgagacattgaaatagatctgttttgcaaattgtggattgcaaccctttagtgatttacgaccagcattaatcactaacccctttcctaccccagtgtaaaacag

SEQ ID NO: 8036 - protein, 44 aa, Homo sapiens; identical to SEQ ID NO: 8034

SEQ ID NO: 8037 - DNA, 4627 bp, Homo sapiens
gggtccgcccctcggcgttgggtagcggggcgctggggagcagcgcggcgcgcacgggccggggcgcgcaggtcccgtcgccggtgagcacgggctccctctcgcgtggcctcgccgggtccgcctggcctgcccacctccggagccacctctgcccccgcatgggctggcgaagttgggaggagcgagctggagccagagcgcgcgccgggcgcgccccgtcgctgcctgactcggcgcccgcagttcgggcgcagcacgccggccgcaggagcacggatgccccccggagccgcgggctggcaggtctggggtcctgaggctgctggcagactatgggtacaacggccagcacagcccagcagacggtctcggcaggcaccccatttgagggcctacagggcagtggcacgatggacagtcggcactccgtcagcatccactccttccagagcactagcttgcataacagcaaggccaagtccatcatccccaacaaggtggcccctgttgtgatcacgtacaactgcaaggaggagttccagatccatgatgagctgctcaaggctcattacacgttgggccggctctcggacaacacccctgagcactacctggtgcaaggccgctacttcctggtgcgggatgtcactgagaagatggatgtgctgggcaccgtgggaagctgtggggcccccaacttccggcaggtgcagggtgggctcactgtgttcggcatgggacagcccagcctctcagggttcaggcgggtcctccagaaactccagaaggacggacatagggagtgtgtcatcttctgtgtgcgggaggaacctgtgcttttcctgcgtgcagatgaggactttgtgtcctacacacctcgagacaagcagaaccttcatgagaacctccagggccttggacccggggtccgggtggagagcctggagctggccatccggaaagagatccacgactttgcccagctgagcgagaacacataccatgtgtaccataacaccgaggacctgtggggggagccccatgctgtggccatccatggtgaggacgacttgcatgtgacggaggaggtgtacaagcggcccctcttcctgcagcccacctacaggtaccaccgcctgcccctgcccgagcaagggagtcccctggaggcccagttggacgcctttgtcagtgttctccgggagacccccagcctgctgcagctccgtgatgcccacgggcctcccccagccctcgtcttcagctgccagatgggcgtgggcaggaccaacctgggcatggtcctgggcaccctcatcctgcttcaccgcagtgggaccacctcccagccagaggctgcccccacgcaggccaagcccctgcctatggagcagttccaggtgatccagagctttctccgcatggtgccccagggaaggaggatggtggaagaggtggacagagccatcactgcctgtgccgagttgcatgacctgaaagaagtggtcttggaaaaccagaagaagttagaaggtatccgaccggagagcccagcccagggaagcggcagccgacacagcgtctggcagagggcgctgtggagcctggagcgatacttctacctgatcctgtttaactactaccttcatgagcagtacccgctggcctttgccctcagtttcagccgctggctgtgtgcccaccctgagctgtaccgcctgcccgtgacgctgagctcagcaggccctgtggctccgagggacctcatcgccaggggctccctacgggaggacgatctggtctccccggacgcgctcagcactgtcagagagatggatgtggccaacttccggcgggtgccccgcatgcccatctacggcacggcccagcccagcgccaaggccctggggagcatcctggcctacctgacggacgccaagaggaggctgcggaaggttgtctgggtgagccttcgggaggaggccgtgttggagtgtgacgggcacacctacagcctgcggtggcctgggccccctgtggctcctgaccagctggagaccctggaggcccagctgaaggcccatctaagcgagcctcccccaggcaaggagggccccctgacctacaggttccagacctgccttaccatgcaggaggtcttcagccagcaccgcagggcctgtcctggcctcacctaccaccgcatccccatgccggacttctgtgccccccgagaggaggactttgaccagctgctggaggccctgcgggccgccctctccaaggacccaggcactggcttcgtgttcagctgcctcagcggccagggccgtaccacaactgcgatggtggtggctgtcctggccttctggcacatccaaggcttccccgaggtgggtgaggaggagctcgtgagtgtgcctgatgccaagttcactaagggtgaatttcaggtagtaatgaaggtggtgcagctgctacccgatgggcaccgtgtgaagaaggaggtggacgcagcgctggacactgtcagcgagaccatgacgcccatgcactaccacctgcgggagatcatcatctgcacctaccgccaggcgaaggcagcgaaagaggcgcaagaaatgcggaggctgcagctgcggagcctgcagtacttggagcgctatgtctgcctgattctcttcaacgcgtacctccacctggagaaggccgactcctggcagaggcccttcagcacctggatgcaggaggtggcatcgaaggctggcatctacgagatccttaacgagctgggcttccccgagctggagagcggggaggaccagcccttctccaggctgcgctaccggtggcaggagcagagctgcagcctcgagccctctgcccccgaggacttgctgtagggggccttactccctgtccccccacccacagggccccacgcaggcctggggtgtctgaggtgctcttggctgggagcggccctgaggggtgctggccttgaaatgattcccccacttcctggagagactgagcggagttgggagcctttttagaaagaactttttataggacagggagacagcacagccatcccttgcaaaccaccaaggtgtgtggctgacctccagggaggagcactcactggagtgctcacaaggtgcacactgctgtgtgtaccttgcagacaggccggcgttcagcctccaaggggctcactcccccagttgccaaacactgtggatctctctgtcctcttctcccctctctcagattggcctggcagcccctggcacagagcagacccggccactggtagctccccacttccttactcctgctgctctgccattgccgctccccttgttgctgcccaagcactgccctcgggcgtctggcagcctgaggtgggtggaggggacagtgttctggatagatctattatgtgaaaggcagcttcacccagttttctggactctcatgcccccatctccgacctgggagacttcaggaatgacaacctacccagcctggtggggctggcaggatggtggaggtttctcaaggagctggagacttcagggagcccctctcatggggaggaaagagcttccagggggcgaacgcagcacagaggaagaggcctgctccacttgtctgggaacctgggcaggaggcacagaggaagccaaggcctggagctgcaggtcccccggcatctctctctgtcccggcagcccaggatggcctggtgcccccacctgctgcagcaggagccccaaggagtgctagctgagggtggttgctggggtggtcctcatggacagtgaggtgtgcaagggtgcactgagggtggtgggaggggatcacctgggttccaggccatccttgctgagcatctttgagcctgccttccggtgggagcagaaaaggccagaccctgctgagttagaggctgctgggatccactgtttccacacagcgggaaggctgctgggaacaggtggcagagaagtgccatgtttgcgttgagccttgcagctcttccagctggggactggtgcttgctgaaacccaggagctgaacagtgaggaggctgtccaccttgcttggctcactgggaccaggaaagcctgtctttggttaggctcgtgtacttctgcaggaaaaaaaaaaaaggatgtgtcattggtcatgatatttgaaaaggggaggaggccgaagttgttcccatttatccagtattggaaaatatttgacccccttggctgaattcttttgcagaactactgtgtgtctgttcactaccttttcaggtttattgtttttatttttgcatgaattaagacgttttaatttctttgcagacaaggtctagatgcggagtcagagatgggactgaatggggagggatcctttgtgttctcatggttggctctgactttcagctgtgttgggaccactggctgatcacatcacctctctgcctcagtttccccatctgtaaaatgggagaataatacttgcctacctacctcacaggggtgttgtgaggattcatttgtgattttttttttttttgtacagagcttttaagcattaaaaacagctaaatgtgagtgc

SEQ ID NO: 8038 - protein, 856 aa, Homo sapiens
MGTTASTAQQTVSAGTPFEGLQGSGTMDSRHSVSIHSFQSTSLHNSKAKSIIPNKVAPVVITYNCKEEFQIHDELLKAHYTLGRLSDNTPEHYLVQGRYFLVRDVTEKMDVLGTVGSCGAPNFRQVQGGLTVFGMGQPSLSGFRRVLQKLQKDGHRECVIFCVREEPVLFLRADEDFVSYTPRDKQNLHENLQGLGPGVRVESLELAIRKEIHDFAQLSENTYHVYHNTEDLWGEPHAVAIHGEDDLHVTEEVYKRPLFLQPTYRYHRLPLPEQGSPLEAQLDAFVSVLRETPSLLQLRDAHGPPPALVFSCQMGVGRTNLGMVLGTLILLHRSGTTSQPEAAPTQAKPLPMEQFQVIQSFLRMVPQGRRMVEEVDRAITACAELHDLKEVVLENQKKLEGIRPESPAQGSGSRHSVWQRALWSLERYFYLILFNYYLHEQYPLAFALSFSRWLCAHPELYRLPVTLSSAGPVAPRDLIARGSLREDDLVSPDALSTVREMDVANFRRVPRMPIYGTAQPSAKALGSILAYLTDAKRRLRKVVWVSLREEAVLECDGHTYSLRWPGPPVAPDQLETLEAQLKAHLSEPPPGKEGPLTYRFQTCLTMQEVFSQHRRACPGLTYHRIPMPDFCAPREEDFDQLLEALRAALSKDPGTGFVFSCLSGQGRTTTAMVVAVLAFWHIQGFPEVGEEELVSVPDAKFTKGEFQVVMKVVQLLPDGHRVKKEVDAALDTVSETMTPMHYHLREIIICTYRQAKAAKEAQEMRRLQLRSLQYLERYVCLILFNAYLHLEKADSWQRPFSTWMQEVASKAGIYEILNELGFPELESGEDQPFSRLRYRWQEQSCSLEPSAPEDLL

SEQ ID NO: 8039 - DNA, 1820 bp, Homo sapiens
ctgtgcttttcctgcgtgcagatgaggactttgtgtcctacacacctcgagacaagcagaaccttcatgagaacctccagggccttggacccggggtccgggtggagagcctggagctggccatccggaaagagatccacgactttgcccagctgagcgagaacacataccatgtgtaccataacaccgaggacctgtggggggagccccatgctgtggccatccatggtgaggacgacttgcatgtgacggaggaggtgtacaagcggcccctcttcctgcagcccacctacaggtaccaccgcctgcccctgcccgagcaagggagtcccctggaggcccagttggacgcctttgtcagtgttctccgggagacccccagcctgctgcagctccgtgatgcccacgggcctcccccagccctcgtcttcagctgccagatgggcgtgggcaggaccaacctgggcatggtcctgggcaccctcatcctgcttcaccgcagtgggaccacctcccagccagaggctgcccccacgcaggccaagcccctgcctatggagcagttccaggtgatccagagctttctccgcatggtgccccagggaaggaggatggtggaagaggtgagatagatctattatgtgaaaggcagcttcacccagttttctggactctcatgcccccatctccgacctgggagacttcaggaatgacaacctacccagcctggtggggctggcaggatggtggaggtttctcaaggagctggagacttcagggagcccctctcatggggaggaaagagcttccagggggcgaacgcagcacagaggaagaggcctgctccacttgtctgggaacctgggcaggaggcacagaggaagccaaggcctggagctgcaggtcccccggcatctctctctgtcccggcagcccaggatggcctggtgcccccacctgctgcagcaggagccccaaggagtgctagctgagggtggttgctggggtggtcctcatggacagtgaggtgtgcaagggtgcactgagggtggtgggaggggatcacctgggttccaggccatccttgctgagcatctttgagcctgccttccggtgggagcagaaaaggccagaccctgctgagttagaggctgctgggatccactgtttccacacagcgggaaggctgctgggaacaggtggcagagaagtgccatgtttgcgttgagccttgcagctcttccagctggggactggtgcttgctgaaacccaggagctgaacagtgaggaggctgtccaccttgcttggctcactgggaccaggaaagcctgtctttggttaggctcgtgtacttctgcaggaaaaaaaaaaaaggatgtgtcattggtcatgatatttgaaaaggggaggaggccgaagttgttcccatttatccagtattggaaaatatttgacccccttggctgaattcttttgcagaactactgtgtgtctgttcactaccttttcaggtttattgtttttatttttgcatgaattaagacgttttaatttctttgcagacaaggtctagatgcggagtcagagatgggactgaatggggagggatcctttgtgttctcatggttggctctgactttcagctgtgttgggaccactggctgatcacatcacctctctgcctcagtttccccatctgtaaaatgggagaataatacttgcctacctacctcacaggggtgttgtgaggattcatttgtgattttttttttttttgtacagagcttttaagcattaaaaacagctaaatgtgagtgc

SEQ ID NO: 8040 - protein, 63 aa, Homo sapiens
MGVGRTNLGMVLGTLILLHRSGTTSQPEAAPTQAKPLPMEQFQVIQSFLRMVPQGRRMVEEVR

SEQ ID NO: 8041 - DNA, 1013 bp, Homo sapiens
catgcaggaggtcttcagccagcaccgcagggcctgtcctggcctcacctaccaccgcatccccatgccggacttctgtgccccccgagaggaggtgagggtgctgctcaggctgaggcctctggggagggacaggaggcctccctgtctcccctctggtctgggctctgggagaatgaaacgaccccagcttctctacggggcccgggaatggtctcacgaggttttccgatttggcccaagtggtttattcacattccttccaagctttgtgtgtgtgtacgtgtgtttattatgtgttatagggtatatgtgtgtgtattgttataggtgtgtgtgtattggagtgtgtattctgttacgtatgtgcatatgtgttataagatgtgtgtacatgtgtttattatgttgtagggtgtatgtgtgtgtattgtgttatgggtgtgtgttataggtgtgtgtgtgttatcggggtgtgtgtgtattctgttacaggtgcctgtaatcccagctactcgggaggctgaggcgggagaatttcttgaacctaagaggcagaggttgcagtgagccgagatctcaccactacactccagactgggtgacagggcgagactccatctcaagcaaaacaaaacaaaacaaaacaaaaataagcaccttagatcagcttaacattccatgggtgcattggggtggtttttgtatcatgtaatacaaagcatacaaaatggcaatttggagtcacagtcgtgcatttaatatgtcttgaacatcttaaatgacttatattcccatggttttttttgtagaattatttctaatgtaaaccacttcttgattgtggctctcctgtgagaactgtgtgcactctgtgatgtctttggctgtggcagtcccgttttcctagtaactctattgatgtgcttggacactgaaaatctgtgtagtgtgcaagacattaagttgtggattggtggggcttatgccacagtttatcaacacttgaaaat

SEQ ID NO: 8042 - protein, 35 aa, Homo sapiens
MCVYCVMGVCYRCVCVIGVCVYSVTGACNPSYSGG

SEQ ID NO: 8043 - DNA, 312 bp, Homo sapiens
ccctggggctggggctggctcccagatggggtgttttttatctgtaaaaattgtttttaaataactcattacattataaaaataaagttttggccagtgctgggattacaggtgtgagccaccatacctggctgctgagaccgctcatctctcttccttcccattgtagggcaagctggtatttccattctccaggaggactttcctgctttattcaacaacaaacatccattgagcagctatggtttctaagtgtgcaccactgggcttagaattgttgatgggcttgaggggattaatctcaactccagc

SEQ ID NO: 8044 - protein, 74 aa, Homo sapiens
KLFLNNSLHYKNKVLASAGITGVSHHTWLLRPLISLPSHCRASWYFHSPGGLSCFIQQQTSIEQLWFLSVHHWA

SEQ ID NO: 8045 - DNA, 670 bp, Homo sapiens
ggccgggaacctgggcaagccaataaaggctgcggcgcgcggctgcgcgggactcggccttctgggcgcgcgcgacgtcagtttgagttctgtgttctccccgcccgtgtcccgcccgacccgcgcccgcgatgctggcgctgcgctgcggctcccgctggctcggcctgctctccgtcccgcgctccgtgccgctgcgcctccccgcggcccgcgcctgcagcaagggctccggcgacccgtcctcttcctcctcctccgggaacccgctcgtgtacctggacgtggacgccaacgggaagccgctcggccgcgtggtgctggagctgaaggcagatgtcgtcccaaagacagctgagaacttcagagccctgtgcactggtgagaagggcttcggctacaaaggctccaccttccacagggtgatcccttccttcatgtgccaggcgggcgacttcaccaaccacaatggcacaggcgggaagtccatctacggaagccgctttcctgacgagaactttacactgaagcacgtggggccaggtgtcctgtccatggctaatgctggtcctaacaccaacggctcccagttcttcatctgcaccataaagacagactggtgagttccctgccccaggccctctgggaatgcgggcagccttgcagctgg

SEQ ID NO: 8046 - protein, 163 aa, Homo sapiens
MLALRCGSRWLGLLSVPRSVPLRLPAARACSKGSGDPSSSSSSGNPLVYLDVDANGKPLGRVVLELKADVVPKTAENFRALCTGEKGFGYKGSTFHRVIPSFMCQAGDFTNHNGTGGKSIYGSRFPDENFTLKHVGPGVLSMANAGPNTNGSQFFICTIKTDW

SEQ ID NO: 8047 - DNA, 1628 bp, Homo sapiens
ggccgggaacctgggcaagccaataaaggctgcggcgcgcggctgcgcgggactcggccttctgggcgcgcgcgacgtcagtttgagttctgtgttctccccgcccgtgtcccgcccgacccgcgcccgcgatgctggcgctgcgctgcggctcccgctggctcggcctgctctccgtcccgcgctccgtgccgctgcgcctccccgcggcccgcgcctgcagcaagggctccggcgacccgtcctcttcctcctcctccgggaacccgctcgtgtacctggacgtggacgccaacgggaagccgctcggccgcgtggtgctggagctgaaggcagatgtcgtcccaaagacagctgagaacttcagagccctgtgcactggtgagaagggcttcggctacaaaggctccaccttccacagggtgatcccttccttcatgtgccaggcgggcgacttcaccaaccacaatggcacaggcgggaagtccatctacggaagccgctttcctgacgagaactttacactgaagcacgtggggccaggtgtcctgtccatggctaatgctggtcctaacaccaacggctcccagttcttcatctgcaccataaagacagactggttggatggcaagcatgttgtgttcggtcacgtcaaagagggcatggacgtcgtgaagaaaatagaatctttcggctctaagagtgggaggacatccaagaagattgtcatcacagactgtggccagttgagctaatctgtggccagggtgctggcatggtggcagctgcaaatgtccatgcacccaggtggccgcgttgggctgtcagccaaggtgcctgaaacgatacgtgtgcccactccactgtcacagtgtgcctgaggaaggctgctagggatgttagacctcggccaggacccaccacattgcttcctaatacccacccttcctcacgacctcatttctgggcatctttgtggacatgatgtcacccaccccttgtcaagcattgcctgtgattgcccagcccagattcatctgtgccttggacatggtgatggtgatgggttgccatccaagtgaaagtcttttccttgaccaagggggacagtcagttttgcaaaaggactctaatacctgtttaatattgtcttcctaattgggataatttaattaacaagattgactagaagtgaaactgcaacactaacttccccgtgctgtggtgtgacctgagttggtgacacaggccacagaccccagagcttggcttttgaaacacaactcagggcttttgtgaaggttcccccgctgagatctttcctcctggttactgtgaagcctgttggtttgctgctgtcgtttttgaggagggcccatgggggtaggagcagttgaacctgggaacaaacctcacttgagctgtgcctagacaatgtgaattcctgtgttgctaacagaagtggcctgtaagctcctgtgctccggagggaagcatttcctggtaggctttgatttttctgtgtgttaaagaaattcaatctactcatgatgtgttatgcataaaacatttctggaacatggatttgtgttcaccttaaatgtgaaaataaatcctattttctatgg

SEQ ID NO: 8048 - protein, 207 aa, Homo sapiens; identical to SEQ ID NO: 1170

SEQ ID NO: 8049 - DNA, 1676 bp, Homo sapiens
ggccgggaacctgggcaagccaataaaggctgcggcgcgcggctgcgcgggactcggccttctgggcgcgcgcgacgtcagtttgagttctgtgttctccccgcccgtgtcccgcccgacccgcgcccgcgatgctggcgctgcgctgcggctcccgctggctcggcctgctctccgtcccgcgctccgtgccgctgcgcctccccgcggcccgcgcctgcagcaagggctccggcgacccgtcctcttcctcctcctccgggaacccgctcgtgtacctggacgtggacgccaacgggaagccgctcggccgcgtggtgctggagctgaaggcagatgtcgtcccaaagacagctgagaacttcagagccctgtgcactggtgagaagggcttcggctacaaaggctccaccttccacagggtgatcccttccttcatgtgccaggcgggcgacttcaccaaccacaatggcacaggcgggaagtccatctacggaagccgctttcctgacgagaactttacactgaagcacgtggggccaggcaggtgcctccaggggcagcgtggctcagccctgctggtttttgcaggtgtcctgtccatggctaatgctggtcctaacaccaacggctcccagttcttcatctgcaccataaagacagactggttggatggcaagcatgttgtgttcggtcacgtcaaagagggcatggacgtcgtgaagaaaatagaatctttcggctctaagagtgggaggacatccaagaagattgtcatcacagactgtggccagttgagctaatctgtggccagggtgctggcatggtggcagctgcaaatgtccatgcacccaggtggccgcgttgggctgtcagccaaggtgcctgaaacgatacgtgtgcccactccactgtcacagtgtgcctgaggaaggctgctagggatgttagacctcggccaggacccaccacattgcttcctaatacccacccttcctcacgacctcatttctgggcatctttgtggacatgatgtcacccaccccttgtcaagcattgcctgtgattgcccagcccagattcatctgtgccttggacatggtgatggtgatgggttgccatccaagtgaaagtcttttccttgaccaagggggacagtcagttttgcaaaaggactctaatacctgtttaatattgtcttcctaattgggataatttaattaacaagattgactagaagtgaaactgcaacactaacttccccgtgctgtggtgtgacctgagttggtgacacaggccacagaccccagagcttggcttttgaaacacaactcagggcttttgtgaaggttcccccgctgagatctttcctcctggttactgtgaagcctgttggtttgctgctgtcgtttttgaggagggcccatgggggtaggagcagttgaacctgggaacaaacctcacttgagctgtgcctagacaatgtgaattcctgtgttgctaacagaagtggcctgtaagctcctgtgctccggagggaagcatttcctggtaggctttgatttttctgtgtgttaaagaaattcaatctactcatgatgtgttatgcataaaacatttctggaacatggatttgtgttcaccttaaatgtgaaaataaatcctattttctatgg

SEQ ID NO: 8050 - protein, 223 aa, Homo sapiens
MLALRCGSRWLGLLSVPRSVPLRLPAARACSKGSGDPSSSSSSGNPLVYLDVDANGKPLGRVVLELKADVVPKTAENFRALCTGEKGFGYKGSTFHRVIPSFMCQAGDFTNHNGTGGKSIYGSRFPDENFTLKHVGPGRCLQGQRGSALLVFAGVLSMANAGPNTNGSQFFICTIKTDWLDGKHVVFGHVKEGMDVVKKIESFGSKSGRTSKKIVITDCGQLS

SEQ ID NO: 8051 - DNA, 1690 bp, Homo sapiens
ggccgggaacctgggcaagccaataaaggctgcggcgcgcggctgcgcgggactcggccttctgggcgcgcgcgacgtcagtttgagttctgtgttctccccgcccgtgtcccgcccgacccgcgcccgcgatgctggcgctgcgctgcggctcccgctggctcggcctgctctccgtcccgcgctccgtgccgctgcgcctccccgcggcccgcgcctgcagcaagggctccggcgacccgtcctcttcctcctcctccgggaacccgctcgtgtacctggacgtggacgccaacgggaagccgctcggccgcgtggtgctggagctgaaggcagatgtcgtcccaaagacagctgagaacttcagagccctgtgcactggtgagaagggcttcggctacaaaggctccaccttccacagggtgatcccttccttcatgtgccaggcgggcgacttcaccaaccacaatggcacaggcgggaagtccatctacggaagccgctttcctgacgagaactttacactgaagcacgtggggccaggtgtcctgtccatggctaatgctggtcctaacaccaacggctcccagttcttcatctgcaccataaagacagactggtccatggcattggatgacattgcgctacactgttgctcacccgggtcacccgtcctcacaggttggatggcaagcatgttgtgttcggtcacgtcaaagagggcatggacgtcgtgaagaaaatagaatctttcggctctaagagtgggaggacatccaagaagattgtcatcacagactgtggccagttgagctaatctgtggccagggtgctggcatggtggcagctgcaaatgtccatgcacccaggtggccgcgttgggctgtcagccaaggtgcctgaaacgatacgtgtgcccactccactgtcacagtgtgcctgaggaaggctgctagggatgttagacctcggccaggacccaccacattgcttcctaatacccacccttcctcacgacctcatttctgggcatctttgtggacatgatgtcacccaccccttgtcaagcattgcctgtgattgcccagcccagattcatctgtgccttggacatggtgatggtgatgggttgccatccaagtgaaagtcttttccttgaccaagggggacagtcagttttgcaaaaggactctaatacctgtttaatattgtcttcctaattgggataatttaattaacaagattgactagaagtgaaactgcaacactaacttccccgtgctgtggtgtgacctgagttggtgacacaggccacagaccccagagcttggcttttgaaacacaactcagggcttttgtgaaggttcccccgctgagatctttcctcctggttactgtgaagcctgttggtttgctgctgtcgtttttgaggagggcccatgggggtaggagcagttgaacctgggaacaaacctcacttgagctgtgcctagacaatgtgaattcctgtgttgctaacagaagtggcctgtaagctcctgtgctccggagggaagcatttcctggtaggctttgatttttctgtgtgttaaagaaattcaatctactcatgatgtgttatgcataaaacatttctggaacatggatttgtgttcaccttaaatgtgaaaataaatcctattttctatgg

SEQ ID NO: 8052 - protein, 201 aa, Homo sapiens
MLALRCGSRWLGLLSVPRSVPLRLPAARACSKGSGDPSSSSSSGNPLVYLDVDANGKPLGRVVLELKADVVPKTAENFRALCTGEKGFGYKGSTFHRVIPSFMCQAGDFTNHNGTGGKSIYGSRFPDENFTLKHVGPGVLSMANAGPNTNGSQFFICTIKTDWSMALDDIALHCCSPGSPVLTGWMASMLCSVTSKRAWTS

SEQ ID NO: 8053 - DNA, 1552 bp, Homo sapiens
ggccgggaacctgggcaagccaataaaggctgcggcgcgcggctgcgcgggactcggccttctgggcgcgcgcgacgtcagtttgagttctgtgttctccccgcccgtgtcccgcccgacccgcgcccgcgatgctggcgctgcgctgcggctcccgctggctcggcctgctctccgtcccgcgctccgtgccgctgcgcctccccgcggcccgcgcctgcagcaagggctccggcgacccgtcctcttcctcctcctccgggaacccgctcgtgtacctggacgtggacgccaacgggaagccgctcggccgcgtggtgctggagctgaaggcagatgtcgtcccaaagacagctgagaacttcagagccctgtgcactggtgagaagggcttcggctacaaaggctccaccttccacagggtgatcccttccttcatgtgccaggcgggcgacttcaccaaccacaatggcacaggcgggaagtccatctacggaagccgctttcctgacgagaactttacactgaagcacgtggggccaggttggatggcaagcatgttgtgttcggtcacgtcaaagagggcatggacgtcgtgaagaaaatagaatctttcggctctaagagtgggaggacatccaagaagattgtcatcacagactgtggccagttgagctaatctgtggccagggtgctggcatggtggcagctgcaaatgtccatgcacccaggtggccgcgttgggctgtcagccaaggtgcctgaaacgatacgtgtgcccactccactgtcacagtgtgcctgaggaaggctgctagggatgttagacctcggccaggacccaccacattgcttcctaatacccacccttcctcacgacctcatttctgggcatctttgtggacatgatgtcacccaccccttgtcaagcattgcctgtgattgcccagcccagattcatctgtgccttggacatggtgatggtgatgggttgccatccaagtgaaagtcttttccttgaccaagggggacagtcagttttgcaaaaggactctaatacctgtttaatattgtcttcctaattgggataatttaattaacaagattgactagaagtgaaactgcaacactaacttccccgtgctgtggtgtgacctgagttggtgacacaggccacagaccccagagcttggcttttgaaacacaactcagggcttttgtgaaggttcccccgctgagatctttcctcctggttactgtgaagcctgttggtttgctgctgtcgtttttgaggagggcccatgggggtaggagcagttgaacctgggaacaaacctcacttgagctgtgcctagacaatgtgaattcctgtgttgctaacagaagtggcctgtaagctcctgtgctccggagggaagcatttcctggtaggctttgatttttctgtgtgttaaagaaattcaatctactcatgatgtgttatgcataaaacatttctggaacatggatttgtgttcaccttaaatgtgaaaataaatcctattttctatgg

SEQ ID NO: 8054 - protein, 155 aa, Homo sapiens
MLALRCGSRWLGLLSVPRSVPLRLPAARACSKGSGDPSSSSSSGNPLVYLDVDANGKPLGRVVLELKADVVPKTAENFRALCTGEKGFGYKGSTFHRVIPSFMCQAGDFTNHNGTGGKSIYGSRFPDENFTLKHVGPGWMASMLCSVTSKRAWTS

SEQ ID NO: 8055 - DNA, 2174 bp, Homo sapiens
ggccgggaacctgggcaagccaataaaggctgcggcgcgcggctgcgcgggactcggccttctgggcgcgcgcgacgtcagtttgagttctgtgttctccccgcccgtgtcccgcccgacccgcgcccgcgatgctggcgctgcgctgcggctcccgctggctcggcctgctctccgtcccgcgctccgtgccgctgcgcctccccgcggcccgcgcctgcagcaagggctccggcgacccgtcctcttcctcctcctccgggaacccgctcgtgtacctggacgtggacgccaacgggaagccgctcggccgcgtggtgctggagctgaaggcagatgtcgtcccaaagacagctgagaacttcagagccctgtgcactggtgagaagggcttcggctacaaaggctccaccttccacagggtgatcccttccttcatgtgccaggcgggcgacttcaccaaccacaatggcacaggcgggaagtccatctacggaagccgctttcctgacgagaactttacactgaagcacgtggggccaggttggatggcaagcatgttgtgttcggtcacgtcaaagagggcatggacgtcgtgaagaaaatagaatctttcggctctaagagtgggaggacatccaagaagattgtcatcacagactgtggccagttgagctaatctgtggccagggtgctggcatggtggcagctgcaaatgtccatgcacccaggtggccgcgttgggctgtcagccaaggtgcctgaaacgatacgtgtgcccactccactgtcacagtgtgcctgaggaaggctgctagggatgttagacctcggccaggacccaccacattgcttcctaatacccacccttcctcacgacctcatttctgggcatctttgtggacatgatgtcacccaccccttgtcaagcattgcctgtgattgcccagcccagattcatctgtgccttggacatggtgatggtgatgggttgccatccaagtgaaagtcttttccttgaccaagggggacagtcagttttgcaaaaggactctaatacctgtttaatattgtcttcctaattgggataatttaattaacaagattgactagaagtgaaactgcaacactaacttccccgtgctgtggtgtgacctgagttggtgacacaggccacagaccccagagcttggcttttgaaacacaactcagggcttttgtgaaggttcccccgctgagatctttcctcctggttactgtgaagcctgttggtttgctgctgtcgtttttgaggagggcccatgggggtaggagcagttgaacctgggaacaaacctcacttgagctgtgcctagacaatgtgaattcctgtgttgctaacagaagtggcctgtaagctcctgtgctccggagggaagcatttcctggtaggctttgatttttctgtgtgttaaagaaattcaatctactcatgatgtgttatgcataaaacatttctggaacatggatttgtgttcaccttaaatgtgaaaataaatcctattttctatggaagactggtacctggtttctggaagaggggtctgtgacttggagctgatctttactgagctcgccgtggcagatgccatgctcaggacgttcatgtggatggtttcatgtcatcgtgctggcaacttgtcctccctgccttagagatgaggctcagacaaacgaccttagcacccatagcctatgccatgagcactggctccaccctgaatcccagctcctccccttagtgaccccaagtctgtttccctcagctgcataaggaggcgatatagtttgaatatttgtccccagccaaatctcatgttgaactgtaatccccagtgctggaggtggggcctgctacgaggtgtttggatcatggggacgggtatttcatggcttggtgctgttttcttgatggtgaattattgcaagatacggtcatttaaaattgtgtggcacctccccctgcccccttcttgctcctgctttcaccatgtgacatgcctgatcccccttcaccttttgccatggtcataagcttcctgaggcctccctggaagctgagcagatgccagcaccatgcttcctgtacatcctgcagaaccataagccaattaaacctttttaataataaatta

SEQ ID NO: 8056 - protein, 155 aa, Homo sapiens; identical to SEQ ID NO: 8054

SEQ ID NO: 8057 - DNA, 2250 bp, Homo sapiens
ggccgggaacctgggcaagccaataaaggctgcggcgcgcggctgcgcgggactcggccttctgggcgcgcgcgacgtcagtttgagttctgtgttctccccgcccgtgtcccgcccgacccgcgcccgcgatgctggcgctgcgctgcggctcccgctggctcggcctgctctccgtcccgcgctccgtgccgctgcgcctccccgcggcccgcgcctgcagcaagggctccggcgacccgtcctcttcctcctcctccgggaacccgctcgtgtacctggacgtggacgccaacgggaagccgctcggccgcgtggtgctggagctgaaggcagatgtcgtcccaaagacagctgagaacttcagagccctgtgcactggtgagaagggcttcggctacaaaggctccaccttccacagggtgatcccttccttcatgtgccaggcgggcgacttcaccaaccacaatggcacaggcgggaagtccatctacggaagccgctttcctgacgagaactttacactgaagcacgtggggccaggtgtcctgtccatggctaatgctggtcctaacaccaacggctcccagttcttcatctgcaccataaagacagactggttggatggcaagcatgttgtgttcggtcacgtcaaagagggcatggacgtcgtgaagaaaatagaatctttcggctctaagagtgggaggacatccaagaagattgtcatcacagactgtggccagttgagctaatctgtggccagggtgctggcatggtggcagctgcaaatgtccatgcacccaggtggccgcgttgggctgtcagccaaggtgcctgaaacgatacgtgtgcccactccactgtcacagtgtgcctgaggaaggctgctagggatgttagacctcggccaggacccaccacattgcttcctaatacccacccttcctcacgacctcatttctgggcatctttgtggacatgatgtcacccaccccttgtcaagcattgcctgtgattgcccagcccagattcatctgtgccttggacatggtgatggtgatgggttgccatccaagtgaaagtcttttccttgaccaagggggacagtcagttttgcaaaaggactctaatacctgtttaatattgtcttcctaattgggataatttaattaacaagattgactagaagtgaaactgcaacactaacttccccgtgctgtggtgtgacctgagttggtgacacaggccacagaccccagagcttggcttttgaaacacaactcagggcttttgtgaaggttcccccgctgagatctttcctcctggttactgtgaagcctgttggtttgctgctgtcgtttttgaggagggcccatgggggtaggagcagttgaacctgggaacaaacctcacttgagctgtgcctagacaatgtgaattcctgtgttgctaacagaagtggcctgtaagctcctgtgctccggagggaagcatttcctggtaggctttgatttttctgtgtgttaaagaaattcaatctactcatgatgtgttatgcataaaacatttctggaacatggatttgtgttcaccttaaatgtgaaaataaatcctattttctatggaagactggtacctggtttctggaagaggggtctgtgacttggagctgatctttactgagctcgccgtggcagatgccatgctcaggacgttcatgtggatggtttcatgtcatcgtgctggcaacttgtcctccctgccttagagatgaggctcagacaaacgaccttagcacccatagcctatgccatgagcactggctccaccctgaatcccagctcctccccttagtgaccccaagtctgtttccctcagctgcataaggaggcgatatagtttgaatatttgtccccagccaaatctcatgttgaactgtaatccccagtgctggaggtggggcctgctacgaggtgtttggatcatggggacgggtatttcatggcttggtgctgttttcttgatggtgaattattgcaagatacggtcatttaaaattgtgtggcacctccccctgcccccttcttgctcctgctttcaccatgtgacatgcctgatcccccttcaccttttgccatggtcataagcttcctgaggcctccctggaagctgagcagatgccagcaccatgcttcctgtacatcctgcagaaccataagccaattaaacctttttaataataaatta

SEQ ID NO: 8058 - protein, 207 aa, Homo sapiens; identical to SEQ ID NO: 1170

SEQ ID NO: 8059 - DNA, 2298 bp, Homo sapiens
ggccgggaacctgggcaagccaataaaggctgcggcgcgcggctgcgcgggactcggccttctgggcgcgcgcgacgtcagtttgagttctgtgttctccccgcccgtgtcccgcccgacccgcgcccgcgatgctggcgctgcgctgcggctcccgctggctcggcctgctctccgtcccgcgctccgtgccgctgcgcctccccgcggcccgcgcctgcagcaagggctccggcgacccgtcctcttcctcctcctccgggaacccgctcgtgtacctggacgtggacgccaacgggaagccgctcggccgcgtggtgctggagctgaaggcagatgtcgtcccaaagacagctgagaacttcagagccctgtgcactggtgagaagggcttcggctacaaaggctccaccttccacagggtgatcccttccttcatgtgccaggcgggcgacttcaccaaccacaatggcacaggcgggaagtccatctacggaagccgctttcctgacgagaactttacactgaagcacgtggggccaggcaggtgcctccaggggcagcgtggctcagccctgctggtttttgcaggtgtcctgtccatggctaatgctggtcctaacaccaacggctcccagttcttcatctgcaccataaagacagactggttggatggcaagcatgttgtgttcggtcacgtcaaagagggcatggacgtcgtgaagaaaatagaatctttcggctctaagagtgggaggacatccaagaagattgtcatcacagactgtggccagttgagctaatctgtggccagggtgctggcatggtggcagctgcaaatgtccatgcacccaggtggccgcgttgggctgtcagccaaggtgcctgaaacgatacgtgtgcccactccactgtcacagtgtgcctgaggaaggctgctagggatgttagacctcggccaggacccaccacattgcttcctaatacccacccttcctcacgacctcatttctgggcatctttgtggacatgatgtcacccaccccttgtcaagcattgcctgtgattgcccagcccagattcatctgtgccttggacatggtgatggtgatgggttgccatccaagtgaaagtcttttccttgaccaagggggacagtcagttttgcaaaaggactctaatacctgtttaatattgtcttcctaattgggataatttaattaacaagattgactagaagtgaaactgcaacactaacttccccgtgctgtggtgtgacctgagttggtgacacaggccacagaccccagagcttggcttttgaaacacaactcagggcttttgtgaaggttcccccgctgagatctttcctcctggttactgtgaagcctgttggtttgctgctgtcgtttttgaggagggcccatgggggtaggagcagttgaacctgggaacaaacctcacttgagctgtgcctagacaatgtgaattcctgtgttgctaacagaagtggcctgtaagctcctgtgctccggagggaagcatttcctggtaggctttgatttttctgtgtgttaaagaaattcaatctactcatgatgtgttatgcataaaacatttctggaacatggatttgtgttcaccttaaatgtgaaaataaatcctattttctatggaagactggtacctggtttctggaagaggggtctgtgacttggagctgatctttactgagctcgccgtggcagatgccatgctcaggacgttcatgtggatggtttcatgtcatcgtgctggcaacttgtcctccctgccttagagatgaggctcagacaaacgaccttagcacccatagcctatgccatgagcactggctccaccctgaatcccagctcctccccttagtgaccccaagtctgtttccctcagctgcataaggaggcgatatagtttgaatatttgtccccagccaaatctcatgttgaactgtaatccccagtgctggaggtggggcctgctacgaggtgtttggatcatggggacgggtatttcatggcttggtgctgttttcttgatggtgaattattgcaagatacggtcatttaaaattgtgtggcacctccccctgcccccttcttgctcctgctttcaccatgtgacatgcctgatcccccttcaccttttgccatggtcataagcttcctgaggcctccctggaagctgagcagatgccagcaccatgcttcctgtacatcctgcagaaccataagccaattaaacctttttaataataaatta

SEQ ID NO: 8060 - protein, 223 aa, Homo sapiens; identical to SEQ ID NO: 8050

SEQ ID NO: 8061 - DNA, 2312 bp, Homo sapiens
ggccgggaacctgggcaagccaataaaggctgcggcgcgcggctgcgcgggactcggccttctgggcgcgcgcgacgtcagtttgagttctgtgttctccccgcccgtgtcccgcccgacccgcgcccgcgatgctggcgctgcgctgcggctcccgctggctcggcctgctctccgtcccgcgctccgtgccgctgcgcctccccgcggcccgcgcctgcagcaagggctccggcgacccgtcctcttcctcctcctccgggaacccgctcgtgtacctggacgtggacgccaacgggaagccgctcggccgcgtggtgctggagctgaaggcagatgtcgtcccaaagacagctgagaacttcagagccctgtgcactggtgagaagggcttcggctacaaaggctccaccttccacagggtgatcccttccttcatgtgccaggcgggcgacttcaccaaccacaatggcacaggcgggaagtccatctacggaagccgctttcctgacgagaactttacactgaagcacgtggggccaggtgtcctgtccatggctaatgctggtcctaacaccaacggctcccagttcttcatctgcaccataaagacagactggtccatggcattggatgacattgcgctacactgttgctcacccgggtcacccgtcctcacaggttggatggcaagcatgttgtgttcggtcacgtcaaagagggcatggacgtcgtgaagaaaatagaatctttcggctctaagagtgggaggacatccaagaagattgtcatcacagactgtggccagttgagctaatctgtggccagggtgctggcatggtggcagctgcaaatgtccatgcacccaggtggccgcgttgggctgtcagccaaggtgcctgaaacgatacgtgtgcccactccactgtcacagtgtgcctgaggaaggctgctagggatgttagacctcggccaggacccaccacattgcttcctaatacccacccttcctcacgacctcatttctgggcatctttgtggacatgatgtcacccaccccttgtcaagcattgcctgtgattgcccagcccagattcatctgtgccttggacatggtgatggtgatgggttgccatccaagtgaaagtcttttccttgaccaagggggacagtcagttttgcaaaaggactctaatacctgtttaatattgtcttcctaattgggataatttaattaacaagattgactagaagtgaaactgcaacactaacttccccgtgctgtggtgtgacctgagttggtgacacaggccacagaccccagagcttggcttttgaaacacaactcagggcttttgtgaaggttcccccgctgagatctttcctcctggttactgtgaagcctgttggtttgctgctgtcgtttttgaggagggcccatgggggtaggagcagttgaacctgggaacaaacctcacttgagctgtgcctagacaatgtgaattcctgtgttgctaacagaagtggcctgtaagctcctgtgctccggagggaagcatttcctggtaggctttgatttttctgtgtgttaaagaaattcaatctactcatgatgtgttatgcataaaacatttctggaacatggatttgtgttcaccttaaatgtgaaaataaatcctattttctatggaagactggtacctggtttctggaagaggggtctgtgacttggagctgatctttactgagctcgccgtggcagatgccatgctcaggacgttcatgtggatggtttcatgtcatcgtgctggcaacttgtcctccctgccttagagatgaggctcagacaaacgaccttagcacccatagcctatgccatgagcactggctccaccctgaatcccagctcctccccttagtgaccccaagtctgtttccctcagctgcataaggaggcgatatagtttgaatatttgtccccagccaaatctcatgttgaactgtaatccccagtgctggaggtggggcctgctacgaggtgtttggatcatggggacgggtatttcatggcttggtgctgttttcttgatggtgaattattgcaagatacggtcatttaaaattgtgtggcacctccccctgcccccttcttgctcctgctttcaccatgtgacatgcctgatcccccttcaccttttgccatggtcataagcttcctgaggcctccctggaagctgagcagatgccagcaccatgcttcctgtacatcctgcagaaccataagccaattaaacctttttaataataaatta

SEQ ID NO: 8062 - protein, 201 aa, Homo sapiens; identical to SEQ ID NO: 8052

SEQ ID NO: 8063 - DNA, 831 bp, Homo sapiens
gggactcggccttctgggcgcgcgcgacgtcagtttgagttctgtgttctccccgcccgtgtcccgcccgacccgcgcccgcgatgctggcgctgcgctgcggctcccgctggctcggcctgctctccgtcccgcgctccgtgccgctgcgcctccccgcggcccgcgcctgcagcaagggctccggcgacccgtcctcttcctcctcctccgggaacccgctcgtgtacctggacgtggacgccaacgggaagccgctcggccgcgtggtgctggagctgaaggcagatgtcgtcccaaagacagctgagaacttcagagccctgtgcactggtgagaagggcttcggctacaaaggctccaccttccacagggtgatcccttccttcatgtgccaggtaatgtagtttcctcttctgtaaggggggatgagagcaggagctgccttgtgggtgtgtgaagatgcctggtatgaggaaggtgctgagcagagcagctgcagttgctctgtcagccaggctgccctccctgcattagccctgtatccaggcttcactgcacatggaagcccagccccaacccgctgccactccaggtcagtggcaggccctgcccgggggactgggaggtggagtctatcaagagagagctgggttgggagatggatgtgctgggggtggccttgaagactttgaagagccagcatattccagtggtctctgaccttgtcccctgtgtgcccctgagcactggtgtgggagataagagagggagagagagaagtggaggaggcggaggaggaagacaggtccagggcaggaacacacacgc

SEQ ID NO: 8064 - protein, 107 aa, Homo sapiens [sequence omitted]

SEQ ID NO: 8065 - DNA, 626 bp, Homo sapiens
gactcggccttctgggcgcgcgcgacgtcagtttgagttctgtgttctccccgcccgtgtcccgcccgacccgcgcccgcgatgctggcgctgcgctgcggctcccgctggctcggcctgctctccgtcccgcgctccgtgccgctgcgcctccccgcggcccgcgcctgcagcaagggctccggcgacccgtcctcttcctcctcctccgggaacccgctcgtgtacctggacgtggacgccaacgggaagccgctcggccgcgtggtgctggagctgaaggcagatgtcgtcccaaagacagctgagaacttcagagccctgtgcactggtgagaagggcttcggctacaaaggctccaccttccacagggtgatcccttccttcatgtgccaggcgggcgacttcaccaaccacaatggcacaggcgggaagtccatctacggaagccgctttcctgacgagaactttacactgaagcacgtggggccaggtgagtgggggcctcctctagggtgagtgtccccacagctctgacctggcctggaagccccagcaggccctgagaggccacatgcagtcaccgtccagtatctgatgagtctccttcctccctgcgacactgt

SEQ ID NO: 8066 - protein, 145 aa, Homo sapiens
MLALRCGSRWLGLLSVPRSVPLRLPAARACSKGSGDPSSSSSSGNPLVYLDVDANGKPLGRVVLELKADVVPKTAENFRALCTGEKGFGYKGSTFHRVIPSFMCQAGDFTNHNGTGGKSIYGSRFPDENFTLKHVGPGEWGPPLG

SEQ ID NO: 8067 - DNA, 1487 bp, Homo sapiens
gactcggccttctgggcgcgcgcgacgtcagtttgagttctgtgttctccccgcccgtgtcccgcccgacccgcgcctgcagcaagggctccggcgacccgtcctcttcctcctcctccgggaacccgctcgtgtacctggacgtggacgccaacgggaagccgctcggccgcgtggtgctggagctgaaggcagatgtcgtcccaaagacagctgagaacttcagagccctgtgcactggtgagaagggcttcggctacaaaggctccaccttccacagggtgatcccttccttcatgtgccaggcgggcgacttcaccaaccacaatggcacaggcgggaagtccatctacggaagccgctttcctgacgagaactttacactgaagcacgtggggccaggtgtcctgtccatggctaatgctggtcctaacaccaacggctcccagttcttcatctgcaccataaagacagactggttggatggcaagcatgttgtgttcggtcacgtcaaagagggcatggacgtcgtgaagaaaatagaatctttcggctctaagagtgggaggacatccaagaagattgtcatcacagactgtggccagttgagctaatctgtggccagggtgctggcatggtggcagctgcaaatgtccatgcacccaggtggccgcgttgggctgtcagccaaggtgcctgaaacgatacgtgtgcccactccactgtcacagtgtgcctgaggaaggctgctagggatgttagacctcggccaggacccaccacattgcttcctaatacccacccttcctcacgacctcatttctgggcatctttgtggacatgatgtcacccaccccttgtcaagcattgcctgtgattgcccagcccagattcatctgtgccttggacatggtgatggtgatgggttgccatccaagtgaaagtcttttccttgaccaagggggacagtcagttttgcaaaaggactctaatacctgtttaatattgtcttcctaattgggataatttaattaacaagattgactagaagtgaaactgcaacactaacttccccgtgctgtggtgtgacctgagttggtgacacaggccacagaccccagagcttggcttttgaaacacaactcagggcttttgtgaaggttcccccgctgagatctttcctcctggttactgtgaagcctgttggtttgctgctgtcgtttttgaggagggcccatgggggtaggagcagttgaacctgggaacaaacctcacttgagctgtgcctagacaatgtgaattcctgtgttgctaacagaagtggcctgtaagctcctgtgctccggagggaagcatttcctggtaggctttgatttttctgtgtgttaaagaaattcaatctactcatgatgtgttatgcataaaacatttctggaacatggatttgtgttcaccttaaatgtgaaaataaatcctattttctatgg

SEQ ID NO: 8068 - protein, 105 aa, Homo sapiens [sequence omitted]

SEQ ID NO: 8069 - DNA, 2109 bp, Homo sapiens
gactcggccttctgggcgcgcgcgacgtcagtttgagttctgtgttctccccgcccgtgtcccgcccgacccgcgcctgcagcaagggctccggcgacccgtcctcttcctcctcctccgggaacccgctcgtgtacctggacgtggacgccaacgggaagccgctcggccgcgtggtgctggagctgaaggcagatgtcgtcccaaagacagctgagaacttcagagccctgtgcactggtgagaagggcttcggctacaaaggctccaccttccacagggtgatcccttccttcatgtgccaggcgggcgacttcaccaaccacaatggcacaggcgggaagtccatctacggaagccgctttcctgacgagaactttacactgaagcacgtggggccaggtgtcctgtccatggctaatgctggtcctaacaccaacggctcccagttcttcatctgcaccataaagacagactggttggatggcaagcatgttgtgttcggtcacgtcaaagagggcatggacgtcgtgaagaaaatagaatctttcggctctaagagtgggaggacatccaagaagattgtcatcacagactgtggccagttgagctaatctgtggccagggtgctggcatggtggcagctgcaaatgtccatgcacccaggtggccgcgttgggctgtcagccaaggtgcctgaaacgatacgtgtgcccactccactgtcacagtgtgcctgaggaaggctgctagggatgttagacctcggccaggacccaccacattgcttcctaatacccacccttcctcacgacctcatttctgggcatctttgtggacatgatgtcacccaccccttgtcaagcattgcctgtgattgcccagcccagattcatctgtgccttggacatggtgatggtgatgggttgccatccaagtgaaagtcttttccttgaccaagggggacagtcagttttgcaaaaggactctaatacctgtttaatattgtcttcctaattgggataatttaattaacaagattgactagaagtgaaactgcaacactaacttccccgtgctgtggtgtgacctgagttggtgacacaggccacagaccccagagcttggcttttgaaacacaactcagggcttttgtgaaggttcccccgctgagatctttcctcctggttactgtgaagcctgttggtttgctgctgtcgtttttgaggagggcccatgggggtaggagcagttgaacctgggaacaaacctcacttgagctgtgcctagacaatgtgaattcctgtgttgctaacagaagtggcctgtaagctcctgtgctccggagggaagcatttcctggtaggctttgatttttctgtgtgttaaagaaattcaatctactcatgatgtgttatgcataaaacatttctggaacatggatttgtgttcaccttaaatgtgaaaataaatcctattttctatggaagactggtacctggtttctggaagaggggtctgtgacttggagctgatctttactgagctcgccgtggcagatgccatgctcaggacgttcatgtggatggtttcatgtcatcgtgctggcaacttgtcctccctgccttagagatgaggctcagacaaacgaccttagcacccatagcctatgccatgagcactggctccaccctgaatcccagctcctccccttagtgaccccaagtctgtttccctcagctgcataaggaggcgatatagtttgaatatttgtccccagccaaatctcatgttgaactgtaatccccagtgctggaggtggggcctgctacgaggtgtttggatcatggggacgggtatttcatggcttggtgctgttttcttgatggtgaattattgcaagatacggtcatttaaaattgtgtggcacctccccctgcccccttcttgctcctgctttcaccatgtgacatgcctgatcccccttcaccttttgccatggtcataagcttcctgaggcctccctggaagctgagcagatgccagcaccatgcttcctgtacatcctgcagaaccataagccaattaaacctttttaataataaatta

SEQ ID NO: 8070 - protein, 105 aa, Homo sapiens [sequence omitted]

SEQ ID NO: 8071 - DNA, 441 bp, Homo sapiens
atagtcggctactctggaggctgaggcaggaagatccttagagcccaagaaattgaggccgtagtaagctgtgattacaccactgcactccagcctggacaacagagcgagaccttgtctcaaatgagaaaaaaacaaaaagaaatgggagaatccagagagactaggctagatcaagcctgctgggtcctggcaggagccccagggagtagctcatctgcagacatttgcttgaggactaccccctaaacataaaggaagaatgacatccgaagggtgtggagcagccatgagctgagaactagcctggtctacctgagattgatggcagagctggctgctgagaggagctgcagatctggagaagacagcctaggtaaaggtggacagtgtgagagctgctgatgagatagctgctgaataaaactacattttacctgc

SEQ ID NO: 8072 - protein, 41 aa, Homo sapiens
MRKKQKEMGESRETRLDQACWVLAGAPGSSSSADICLRTTP

SEQ ID NO: 8073 - DNA, 4392 bp, Homo sapiens
acgggcctgctgcaggccaactgggctcccttttggcatctcagtcacctgtggaacctccctccttggagtggccatatgcttggcctctgtgctgtgtgtgggcatcttgattatggacctcggacttgttcatccccttgcccttaaacagattataaatttctgagggcaggtggatcatgaccttgctgtcgcccccaccttgcatcccccagcagcatcagagaacactcgggacctccccaaccttgaccgtgaccttcagcgttccgatcaccgtgtgattccttgatctgtcagtgagaactcatgtcccaaaggctctgtggagctctgctgtcactccctgacaaagcacttcctgcactcagccttaaatctccctgaaccccagctccattgtctttaagatgagaaaataatcgttccttcctgggaatgttgtgagtattgagtgaggcagtgcaggtcaagtgtctattaaacactagccacagttgtatcgctgtgtggcagagccagtctgacaaaatacattctcagctgtgtggtctaacgctcaaattctgaactcacatgagccttgcaattgcaccatggggaccacgtcctcccaccttagactcagtagcatttgatgatggtgggcatgtcatcacaggaaactcactgtgtttccttggctgtatgaatgaagctgttgttagagaattagtgattctaggctgggcacagtggctcacgcctgtaatcccagcactttgggaggctgaggcaggtggatcatttgaggtcaggagttcgagaccagcctggccaacaaggtaaaaccctgtctctactaaaaatacaaaattagctgggcttgcctgtaatcccagctaattaggtaggctgcggcaggagaattgcttgaacccgggagacagaggttgcagtgagctgggatcacgccattccacttcagtcttggtgacagagtgagacttcgtctcaaaaaaaaaaagagagttaataattcattacagagtatctcctgcatgccagcaagctatggacatctggaagaagccacatgccttgccctcaagttgcttagggtggaaggaaatgattagaaatgagccaagccgagcctgcactcttagagtaagtgtagtggcctcagacagaggagagatccctgggacctgggcagtctgagccttccactggacagtcatgtgtgaggagattgcatttcctgagcaggacactgtgttgcgttacattggtaaccccaatttaaggcagcataaatgcactgggaaaacagcaatattggttagccctgggaagtggtttttaggatgattataatttttttttgtgggtattcatttgatgtggatagctggggtgagtgctgctttccgtcttctgatgggggcctggagaaggctgaactgcattttttaaggtctgtgacgcctgctgcaggacctgcagtgggagaaaattccccagggtggggctttctccctataagggtgctcagggctgaatatcaggacccagaaggctgaaagtgactgtccctcccttaacggatgtcttccttgtttctgtggccagggagatacttcaggggattaccggaagattctgctgaagatctgtggtggcaatgactgaacagtgactggtggctcacttctgcccacctgccggcaacaccagtgccaggaaaaggccaaaagaatgtctgtttctaacaaatccacaaatagccccgagattcaccgtcctagagcttaggcctgtcttccacccctcctgacccgtatagtgtgccacaggacctgggtcggtctagaactctctcaggatgccttttctaccccatccctcacagcctcttgctgctaaaatagatgtttcatttttctgactcatgcaatcattcccctttgcctgtggctaagacttggcttcatttcgtcatgtaattgtatatttttatttggaggcatattttcttttcttacagtcattgccagacagaggcatacaagtctgtttgctgcatacacatttctggtgagggcgactgggtgggtgaagcaccgtgtcctcgctgaggagagaaagggaggcgtgcctgagaaggtagcctgtgcatctggtgagtgtgtcacgagctttgttactgccaaactcactcctttttagaaaaaacaaaaaaaaagggccagaaagtcattccttccatcttccttgcagaaaccacgagaacaaagccagttccctgtcagtgacagggcttcttgtaatttgtggtatgtgccttaaacctgaatgtctgtagccaaaacttgtttccacattaagagtcagccagctctggaatggtctggaaatgtcttcctggtaccaacttgttttcttctgcttgattctgccctgtggctcagaggtctggccttatcagccagtgaaagttcatgtaaccttacgtagagatttgtgtgcaggaaaccctgagcatacactagtttgcagggactcgtaaggacatgggaagggaggttcccgaaatccaggcaggaggcccagacacctgaaaggcaaagggatcttggttggttgcaggtgcagtgaagtccactgaaggtgtggtgcgaagaatgcagtccttcacccaggtcccaggagggaagaagggtgtgtgctaattcctggtgcccctcggcgggggccagagagaaggatggggacaacccagagagtcacaagaccagtgcctcccctcagggtgcctccaggctgaaaggggctcctggctctggtctctggggaccctgtgcccgttggttggtggtgtgagggaagagaatccataagagagtttctgagaattatggtgtcatgtccagaagctagagcttaccttgcatcaggggtctccacccactccttttccaacctcctgcgttgaggtttagaaaagagagaatcgactaggcactatggctcacgcctgtaatccaaggactttgggaagctgaggtgagaggatcacttgagctcaggagttcaagactagcctagccaacagcgagacccctgtctctactaaaaaatttggccaggcgtggtggctcacggctgtaatcccagcactttgggaggtgaggcgggcagatcacctgaggtcaggagttcgagacccagcctggccaacatggtgaaaccccatctctactaaaaatacaaaaattagccaggcatggtggcacattcctgtaatcccagctacacaggatgctgaggcaggagaatcacttgaacccaggaggcagaggttgtagtgagctgagatcacaccattgcacttcaacctgggtggacagagtgagactctgtctcaaaaaaaaaaaaaaatttacctggcattgtagtgcattccctatagtcggctactctggaggctgaggcaggaagatccttagagcccaagaaattgaggccgtagtaagctgtgattacaccactgcactccagcctggacaacagagcgagaccttgtctcaaatgagaaaaaaacaaaaagaaatgggagaatccagagagactaggctagatcaagcctgctgggtcctggcaggagccccagggagtagctcatctgcagacatttgcttgaggactaccccctaaacataaaggaagaatgacatccgaagggtgtggagcagccatgagctgagaactagcctggtctacctgagattgatggcaggtcctggtcaacacgtcagctctgcgtcagagtccatgcctcaagcccaagctgaagccccatccctgctgctctcccaagaactcctctgctagggcaggccccttgcccttgggtgccaggtgggacctgcctgatgggatggggtgcttggcatatacaacttgccatgaactcaaggtgaccctgggggcctcctgaattgtgatggggcctagaaccaatgtgctctgatgtgaccatattctgtgacattaccttgccctgtttactccaaagttcccagcctggtgcccagcaggcaatattgcacctacagacacatttactttggtttccaaagtgtttttagacatttgaatttgttgccaacatttaaacattgagagatttcatatttttaaaaatctggaattctggcttctcttgaaaactcagaaattctggcactatggggcttgcattcctgcatggctggagctgagttgcagctgcccctttaggcctgtactccttatttgctataggctccgtcttgtattacactaagcccatgtcacccatttggctcctgcaggcctttgggtttgagaccctggtctacacac

SEQ ID NO: 8074 - protein, 83 aa, Homo sapiens [sequence omitted]

SEQ ID NO: 8075 - DNA, 1977 bp, Homo sapiens
ccaaacacggttatattctgaagtcctgggagttgggacttccacatatgaactttggggagacacatttcagttcataatataagcctctgtcatccccatagttttcaatgagtaccagagaatgacaggccgggacattgagaagagcatctgttcccgaaatccaggcaggaggcccagacacctgaaaggcaaagggatcttggttggttgcaggtgcagtgaagtccactgaaggtgtggtgcgaagaatgcagtccttcacccaggtcccaggagggaagaagggtgtgtgctaattcctggtgcccctcggcgggggccagagagaaggatggggacaacccagagagtcacaagaccagtgcctcccctcagggtgcctccaggctgaaaggggctcctggctctggtctctggggaccctgtgcccgttggttggtggtgtgagggaagagaatccataagagagtttctgagaattatggtgtcatgtccagaagctagagcttaccttgcatcaggggtctccacccactccttttccaacctcctgcgttgaggtttagaaaagagagaatcgactaggcactatggctcacgcctgtaatccaaggactttgggaagctgaggtgagaggatcacttgagctcaggagttcaagactagcctagccaacagcgagacccctgtctctactaaaaaatttggccaggcgtggtggctcacggctgtaatcccagcactttgggaggtgaggcgggcagatcacctgaggtcaggagttcgagacccagcctggccaacatggtgaaaccccatctctactaaaaatacaaaaattagccaggcatggtggcacattcctgtaatcccagctacacaggatgctgaggcaggagaatcacttgaacccaggaggcagaggttgtagtgagctgagatcacaccattgcacttcaacctgggtggacagagtgagactctgtctcaaaaaaaaaaaaaaatttacctggcattgtagtgcattccctatagtcggctactctggaggctgaggcaggaagatccttagagcccaagaaattgaggccgtagtaagctgtgattacaccactgcactccagcctggacaacagagcgagaccttgtctcaaatgagaaaaaaacaaaaagaaatgggagaatccagagagactaggctagatcaagcctgctgggtcctggcaggagccccagggagtagctcatctgcagacatttgcttgaggactaccccctaaacataaaggaagaatgacatccgaagggtgtggagcagccatgagctgagaactagcctggtctacctgagattgatggcaggtcctggtcaacacgtcagctctgcgtcagagtccatgcctcaagcccaagctgaagccccatccctgctgctctcccaagaactcctctgctagggcaggccccttgcccttgggtgccaggtgggacctgcctgatgggatggggtgcttggcatatacaacttgccatgaactcaaggtgaccctgggggcctcctgaattgtgatggggcctagaaccaatgtgctctgatgtgaccatattctgtgacattaccttgccctgtttactccaaagttcccagcctggtgcccagcaggcaatattgcacctacagacacatttactttggtttccaaagtgtttttagacatttgaatttgttgccaacatttaaacattgagagatttcatatttttaaaaatctggaattctggcttctcttgaaaactcagaaattctggcactatggggcttgcattcctgcatggctggagctgagttgcagctgcccctttaggcctgtactccttatttgctataggctccgtcttgtattacactaagcccatgtcacccatttggctcctgcaggcctttgggtttgagaccctggtctacacac

SEQ ID NO: 8076 - protein, 37 aa, Homo sapiens
MTGRDIEKSICSRNPGRRPRHLKGKGILVGCRCSEVH

SEQ ID NO: 8077 - DNA, 4512 bp, Homo sapiens
ctctgttctctgcgctgggcatggagtggagctgtgaggccgagcccctgccctgccctgccctgccctgcccacgcaacagggactaggtttgcagggcagggcctggtatgctcacccttcactggctctcattgctttcctcattccttttatgcggcagtcaattgttggggattccaggggattaacagggcccctttcctcaaggcattctttgtgctgcaaggtgttccctgataagagaggccaggtccagatctaaccatgagctaccctggctatcccccgcccccaggtggctacccaccagctgcaccaggtggtggtccctggggaggtgctgcctaccctcctccgcccagcatgccccccatcgggctggataacgtggccacctatgcggggcagttcaaccaggactatctctcgggaatggcggccaacatgtctgggacatttggaggagccaacatgcccaacctgtaccctggggcccctggggctggctacccaccagtgccccctggcggctttgggcagcccccctctgcccagcagcctgttcctccctatgggatgtatccacccccaggaggaaacccaccctccaggatgccctcatatccgccatacccaggggcccctgtgccgggccagcccatgccaccccccggacagcagcccccaggggcctaccctgggcagccaccagtgacctaccctggtcagcctccagtgccactccctgggcagcagcagccagtgccgagctacccaggatacccggggtctgggactgtcacccccgctgtgcccccaacccagtttggaagccgaggcaccatcactgatgctcccggctttgaccccctgcgagatgccgaggtcctgcggaaggccatgaaaggcttcgggacggatgagcaggccatcattgactgcctggggagtcgctccaacaagcagcggcagcagatcctactttccttcaagacggcttacggcaaggcgagctgcggggatttgatcaaagatctgaaatctgaactgtcaggaaactttgagaagacaatcttggctctgatgaagaccccagtcctctttgacatttatgagataaaggaagccatcaagggggttggcactgatgaagcctgcctgattgagatcctcgcttcccgcagcaatgagcacatccgagaattaaacagagcctacaaagcagaattcaaaaagaccctggaagaggccattcgaagcgacacatcagggcacttccagcggctcctcatctctctctctcagggaaaccgtgatgaaagcacaaacgtggacatgtcactcgcccagagagatgcccaggagctgtatgcggccggggagaaccgcctgggaacagacgagtccaagttcaatgcggttctgtgctcccggagccgggcccacctggtagcagttttcaatgagtaccagagaatgacaggccgggacattgagaagagcatctgccgggagatgtccggggacctggaggagggcatgctggccgtggtgaaatgtctcaagaataccccagccttctttgcggagaggctcaacaaggccatgaggggggcaggaacaaaggaccggaccctgattcgcatcatggtgtctcgcagcgagaccgacctcctggacatcagatcagagtataagcggatgtacggcaagtcgctgtaccacgacatctcgggagatacttcaggggattaccggaagattctgctgaagatctgtggtggcaatgactgaacagtgactggtggctcacttctgcccacctgccggcaacaccagtgccaggaaaaggccaaaagaatgtctgtttctaacaaatccacaaatagccccgagattcaccgtcctagagcttaggcctgtcttccacccctcctgacccgtatagtgtgccacaggacctgggtcggtctagaactctctcaggatgccttttctaccccatccctcacagcctcttgctgctaaaatagatgtttcatttttctgactcatgcaatcattcccctttgcctgtggctaagacttggcttcatttcgtcatgtaattgtatatttttatttggaggcatattttcttttcttacagtcattgccagacagaggcatacaagtctgtttgctgcatacacatttctggtgagggcgactgggtgggtgaagcaccgtgtcctcgctgaggagagaaagggaggcgtgcctgagaaggtagcctgtgcatctggtgagtgtgtcacgagctttgttactgccaaactcactcctttttagaaaaaacaaaaaaaaagggccagaaagtcattccttccatcttccttgcagaaaccacgagaacaaagccagttccctgtcagtgacagggcttcttgtaatttgtggtatgtgccttaaacctgaatgtctgtagccaaaacttgtttccacattaagagtcagccagctctggaatggtctggaaatgtcttcctggtaccaacttgttttcttctgcttgattctgccctgtggctcagaggtctggccttatcagccagtgaaagttcatgtaaccttacgtagagatttgtgtgcaggaaaccctgagcatacactagtttgcagggactcgtaaggacatgggaagggaggttcccgaaatccaggcaggaggcccagacacctgaaaggcaaagggatcttggttggttgcaggtgcagtgaagtccactgaaggtgtggtgcgaagaatgcagtccttcacccaggtcccaggagggaagaagggtgtgtgctaattcctggtgcccctcggcgggggccagagagaaggatggggacaacccagagagtcacaagaccagtgcctcccctcagggtgcctccaggctgaaaggggctcctggctctggtctctggggaccctgtgcccgttggttggtggtgtgagggaagagaatccataagagagtttctgagaattatggtgtcatgtccagaagctagagcttaccttgcatcaggggtctccacccactccttttccaacctcctgcgttgaggtttagaaaagagagaatcgactaggcactatggctcacgcctgtaatccaaggactttgggaagctgaggtgagaggatcacttgagctcaggagttcaagactagcctagccaacagcgagacccctgtctctactaaaaaatttggccaggcgtggtggctcacggctgtaatcccagcactttgggaggtgaggcgggcagatcacctgaggtcaggagttcgagacccagcctggccaacatggtgaaaccccatctctactaaaaatacaaaaattagccaggcatggtggcacattcctgtaatcccagctacacaggatgctgaggcaggagaatcacttgaacccaggaggcagaggttgtagtgagctgagatcacaccattgcacttcaacctgggtggacagagtgagactctgtctcaaaaaaaaaaaaaaatttacctggcattgtagtgcattccctatagtcggctactctggaggctgaggcaggaagatccttagagcccaagaaattgaggccgtagtaagctgtgattacaccactgcactccagcctggacaacagagcgagaccttgtctcaaatgagaaaaaaacaaaaagaaatgggagaatccagagagactaggctagatcaagcctgctgggtcctggcaggagccccagggagtagctcatctgcagacatttgcttgaggactaccccctaaacataaaggaagaatgacatccgaagggtgtggagcagccatgagctgagaactagcctggtctacctgagattgatggcaggtcctggtcaacacgtcagctctgcgtcagagtccatgcctcaagcccaagctgaagccccatccctgctgctctcccaagaactcctctgctagggcaggccccttgcccttgggtgccaggtgggacctgcctgatgggatggggtgcttggcatatacaacttgccatgaactcaaggtgaccctgggggcctcctgaattgtgatggggcctagaaccaatgtgctctgatgtgaccatattctgtgacattaccttgccctgtttactccaaagttcccagcctggtgcccagcaggcaatattgcacctacagacacatttactttggtttccaaagtgtttttagacatttgaatttgttgccaacatttaaacattgagagatttcatatttttaaaaatctggaattctggcttctcttgaaaactcagaaattctggcactatggggcttgcattcctgcatggctggagctgagttgcagctgcccctttaggcctgtactccttatttgctataggctccgtcttgtattacactaagcccatgtcacccatttggctcctgcaggcctttgggtttgagaccctggtctacacac

SEQ ID NO: 8078 - protein, 509 aa, Homo sapiens
MSYPGYPPPPGGYPPAAPGGGPWGGAAYPPPPSMPPIGLDNVATYAGQFNQDYLSGMAANMSGTFGGANMPNLYPGAPGAGYPPVPPGGFGQPPSAQQPVPPYGMYPPPGGNPPSRMPSYPPYPGAPVPGQPMPPPGQQPPGAYPGQPPVTYPGQPPVPLPGQQQPVPSYPGYPGSGTVTPAVPPTQFGSRGTITDAPGFDPLRDAEVLRKAMKGFGTDEQAIIDCLGSRSNKQRQQILLSFKTAYGKASCGDLIKDLKSELSGNFEKTILALMKTPVLFDIYEIKEAIKGVGTDEACLIEILASRSNEHIRELNRAYKAEFKKTLEEAIRSDTSGHFQRLLISLSQGNRDESTNVDMSLAQRDAQELYAAGENRLGTDESKFNAVLCSRSRAHLVAVFNEYQRMTGRDIEKSICREMSGDLEEGMLAVVKCLKNTPAFFAERLNKAMRGAGTKDRTLIRIMVSRSETDLLDIRSEYKRMYGKSLYHDISGDTSGDYRKILLKICGGND

SEQ ID NO: 8079 - DNA, 4497 bp, Homo sapiens
cccgcccctcccttgcactgcctctggcacctggggcagccgcgcccgcggagttttccgcccggcgctgacggctgctgcgcccgcggctccccagtgccccgagtgccccgcgggccccgcgagcgggagtgggacccagcccctaggcagaacccaggcgccgcgcccgggacgcccgcggagagagccactcccgcccacgtcccatttcgcccctcgcgtccggagtccccgtggccagatctaaccatgagctaccctggctatcccccgcccccaggtggctacccaccagctgcaccaggtggtggtccctggggaggtgctgcctaccctcctccgcccagcatgccccccatcgggctggataacgtggccacctatgcggggcagttcaaccaggactatctctcgggaatggcggccaacatgtctgggacatttggaggagccaacatgcccaacctgtaccctggggcccctggggctggctacccaccagtgccccctggcggctttgggcagcccccctctgcccagcagcctgttcctccctatgggatgtatccacccccaggaggaaacccaccctccaggatgccctcatatccgccatacccaggggcccctgtgccgggccagcccatgccaccccccggacagcagcccccaggggcctaccctgggcagccaccagtgacctaccctggtcagcctccagtgccactccctgggcagcagcagccagtgccgagctacccaggatacccggggtctgggactgtcacccccgctgtgcccccaacccagtttggaagccgaggcaccatcactgatgctcccggctttgaccccctgcgagatgccgaggtcctgcggaaggccatgaaaggcttcgggacggatgagcaggccatcattgactgcctggggagtcgctccaacaagcagcggcagcagatcctactttccttcaagacggcttacggcaaggcgagctgcggggatttgatcaaagatctgaaatctgaactgtcaggaaactttgagaagacaatcttggctctgatgaagaccccagtcctctttgacatttatgagataaaggaagccatcaagggggttggcactgatgaagcctgcctgattgagatcctcgcttcccgcagcaatgagcacatccgagaattaaacagagcctacaaagcagaattcaaaaagaccctggaagaggccattcgaagcgacacatcagggcacttccagcggctcctcatctctctctctcagggaaaccgtgatgaaagcacaaacgtggacatgtcactcgcccagagagatgcccaggagctgtatgcggccggggagaaccgcctgggaacagacgagtccaagttcaatgcggttctgtgctcccggagccgggcccacctggtagcagttttcaatgagtaccagagaatgacaggccgggacattgagaagagcatctgccgggagatgtccggggacctggaggagggcatgctggccgtggtgaaatgtctcaagaataccccagccttctttgcggagaggctcaacaaggccatgaggggggcaggaacaaaggaccggaccctgattcgcatcatggtgtctcgcagcgagaccgacctcctggacatcagatcagagtataagcggatgtacggcaagtcgctgtaccacgacatctcgggagatacttcaggggattaccggaagattctgctgaagatctgtggtggcaatgactgaacagtgactggtggctcacttctgcccacctgccggcaacaccagtgccaggaaaaggccaaaagaatgtctgtttctaacaaatccacaaatagccccgagattcaccgtcctagagcttaggcctgtcttccacccctcctgacccgtatagtgtgccacaggacctgggtcggtctagaactctctcaggatgccttttctaccccatccctcacagcctcttgctgctaaaatagatgtttcatttttctgactcatgcaatcattcccctttgcctgtggctaagacttggcttcatttcgtcatgtaattgtatatttttatttggaggcatattttcttttcttacagtcattgccagacagaggcatacaagtctgtttgctgcatacacatttctggtgagggcgactgggtgggtgaagcaccgtgtcctcgctgaggagagaaagggaggcgtgcctgagaaggtagcctgtgcatctggtgagtgtgtcacgagctttgttactgccaaactcactcctttttagaaaaaacaaaaaaaaagggccagaaagtcattccttccatcttccttgcagaaaccacgagaacaaagccagttccctgtcagtgacagggcttcttgtaatttgtggtatgtgccttaaacctgaatgtctgtagccaaaacttgtttccacattaagagtcagccagctctggaatggtctggaaatgtcttcctggtaccaacttgttttcttctgcttgattctgccctgtggctcagaggtctggccttatcagccagtgaaagttcatgtaaccttacgtagagatttgtgtgcaggaaaccctgagcatacactagtttgcagggactcgtaaggacatgggaagggaggttcccgaaatccaggcaggaggcccagacacctgaaaggcaaagggatcttggttggttgcaggtgcagtgaagtccactgaaggtgtggtgcgaagaatgcagtccttcacccaggtcccaggagggaagaagggtgtgtgctaattcctggtgcccctcggcgggggccagagagaaggatggggacaacccagagagtcacaagaccagtgcctcccctcagggtgcctccaggctgaaaggggctcctggctctggtctctggggaccctgtgcccgttggttggtggtgtgagggaagagaatccataagagagtttctgagaattatggtgtcatgtccagaagctagagcttaccttgcatcaggggtctccacccactccttttccaacctcctgcgttgaggtttagaaaagagagaatcgactaggcactatggctcacgcctgtaatccaaggactttgggaagctgaggtgagaggatcacttgagctcaggagttcaagactagcctagccaacagcgagacccctgtctctactaaaaaatttggccaggcgtggtggctcacggctgtaatcccagcactttgggaggtgaggcgggcagatcacctgaggtcaggagttcgagacccagcctggccaacatggtgaaaccccatctctactaaaaatacaaaaattagccaggcatggtggcacattcctgtaatcccagctacacaggatgctgaggcaggagaatcacttgaacccaggaggcagaggttgtagtgagctgagatcacaccattgcacttcaacctgggtggacagagtgagactctgtctcaaaaaaaaaaaaaaatttacctggcattgtagtgcattccctatagtcggctactctggaggctgaggcaggaagatccttagagcccaagaaattgaggccgtagtaagctgtgattacaccactgcactccagcctggacaacagagcgagaccttgtctcaaatgagaaaaaaacaaaaagaaatgggagaatccagagagactaggctagatcaagcctgctgggtcctggcaggagccccagggagtagctcatctgcagacatttgcttgaggactaccccctaaacataaaggaagaatgacatccgaagggtgtggagcagccatgagctgagaactagcctggtctacctgagattgatggcaggtcctggtcaacacgtcagctctgcgtcagagtccatgcctcaagcccaagctgaagccccatccctgctgctctcccaagaactcctctgctagggcaggccccttgcccttgggtgccaggtgggacctgcctgatgggatggggtgcttggcatatacaacttgccatgaactcaaggtgaccctgggggcctcctgaattgtgatggggcctagaaccaatgtgctctgatgtgaccatattctgtgacattaccttgccctgtttactccaaagttcccagcctggtgcccagcaggcaatattgcacctacagacacatttactttggtttccaaagtgtttttagacatttgaatttgttgccaacatttaaacattgagagatttcatatttttaaaaatctggaattctggcttctcttgaaaactcagaaattctggcactatggggcttgcattcctgcatggctggagctgagttgcagctgcccctttaggcctgtactccttatttgctataggctccgtcttgtattacactaagcccatgtcacccatttggctcctgcaggcctttgggtttgagaccctggtctacacac

SEQ ID NO: 8080 - protein, 509 aa, Homo sapiens; identical to SEQ ID NO: 8078

SEQ ID NO: 8081 - DNA, 4413 bp, Homo sapiens
ttcctggagcagctccgcagccggaaggctgctgctcctcgcgggcccgccgtgcccacccctaggcagaacccaggcgccgcgcccgggacgcccgcggagagagccactcccgcccacgtcccatttcgcccctcgcgtccggagtccccgtggccagatctaaccatgagctaccctggctatcccccgcccccaggtggctacccaccagctgcaccaggtggtggtccctggggaggtgctgcctaccctcctccgcccagcatgccccccatcgggctggataacgtggccacctatgcggggcagttcaaccaggactatctctcgggaatggcggccaacatgtctgggacatttggaggagccaacatgcccaacctgtaccctggggcccctggggctggctacccaccagtgccccctggcggctttgggcagcccccctctgcccagcagcctgttcctccctatgggatgtatccacccccaggaggaaacccaccctccaggatgccctcatatccgccatacccaggggcccctgtgccgggccagcccatgccaccccccggacagcagcccccaggggcctaccctgggcagccaccagtgacctaccctggtcagcctccagtgccactccctgggcagcagcagccagtgccgagctacccaggatacccggggtctgggactgtcacccccgctgtgcccccaacccagtttggaagccgaggcaccatcactgatgctcccggctttgaccccctgcgagatgccgaggtcctgcggaaggccatgaaaggcttcgggacggatgagcaggccatcattgactgcctggggagtcgctccaacaagcagcggcagcagatcctactttccttcaagacggcttacggcaaggcgagctgcggggatttgatcaaagatctgaaatctgaactgtcaggaaactttgagaagacaatcttggctctgatgaagaccccagtcctctttgacatttatgagataaaggaagccatcaagggggttggcactgatgaagcctgcctgattgagatcctcgcttcccgcagcaatgagcacatccgagaattaaacagagcctacaaagcagaattcaaaaagaccctggaagaggccattcgaagcgacacatcagggcacttccagcggctcctcatctctctctctcagggaaaccgtgatgaaagcacaaacgtggacatgtcactcgcccagagagatgcccaggagctgtatgcggccggggagaaccgcctgggaacagacgagtccaagttcaatgcggttctgtgctcccggagccgggcccacctggtagcagttttcaatgagtaccagagaatgacaggccgggacattgagaagagcatctgccgggagatgtccggggacctggaggagggcatgctggccgtggtgaaatgtctcaagaataccccagccttctttgcggagaggctcaacaaggccatgaggggggcaggaacaaaggaccggaccctgattcgcatcatggtgtctcgcagcgagaccgacctcctggacatcagatcagagtataagcggatgtacggcaagtcgctgtaccacgacatctcgggagatacttcaggggattaccggaagattctgctgaagatctgtggtggcaatgactgaacagtgactggtggctcacttctgcccacctgccggcaacaccagtgccaggaaaaggccaaaagaatgtctgtttctaacaaatccacaaatagccccgagattcaccgtcctagagcttaggcctgtcttccacccctcctgacccgtatagtgtgccacaggacctgggtcggtctagaactctctcaggatgccttttctaccccatccctcacagcctcttgctgctaaaatagatgtttcatttttctgactcatgcaatcattcccctttgcctgtggctaagacttggcttcatttcgtcatgtaattgtatatttttatttggaggcatattttcttttcttacagtcattgccagacagaggcatacaagtctgtttgctgcatacacatttctggtgagggcgactgggtgggtgaagcaccgtgtcctcgctgaggagagaaagggaggcgtgcctgagaaggtagcctgtgcatctggtgagtgtgtcacgagctttgttactgccaaactcactcctttttagaaaaaacaaaaaaaaagggccagaaagtcattccttccatcttccttgcagaaaccacgagaacaaagccagttccctgtcagtgacagggcttcttgtaatttgtggtatgtgccttaaacctgaatgtctgtagccaaaacttgtttccacattaagagtcagccagctctggaatggtctggaaatgtcttcctggtaccaacttgttttcttctgcttgattctgccctgtggctcagaggtctggccttatcagccagtgaaagttcatgtaaccttacgtagagatttgtgtgcaggaaaccctgagcatacactagtttgcagggactcgtaaggacatgggaagggaggttcccgaaatccaggcaggaggcccagacacctgaaaggcaaagggatcttggttggttgcaggtgcagtgaagtccactgaaggtgtggtgcgaagaatgcagtccttcacccaggtcccaggagggaagaagggtgtgtgctaattcctggtgcccctcggcgggggccagagagaaggatggggacaacccagagagtcacaagaccagtgcctcccctcagggtgcctccaggctgaaaggggctcctggctctggtctctggggaccctgtgcccgttggttggtggtgtgagggaagagaatccataagagagtttctgagaattatggtgtcatgtccagaagctagagcttaccttgcatcaggggtctccacccactccttttccaacctcctgcgttgaggtttagaaaagagagaatcgactaggcactatggctcacgcctgtaatccaaggactttgggaagctgaggtgagaggatcacttgagctcaggagttcaagactagcctagccaacagcgagacccctgtctctactaaaaaatttggccaggcgtggtggctcacggctgtaatcccagcactttgggaggtgaggcgggcagatcacctgaggtcaggagttcgagacccagcctggccaacatggtgaaaccccatctctactaaaaatacaaaaattagccaggcatggtggcacattcctgtaatcccagctacacaggatgctgaggcaggagaatcacttgaacccaggaggcagaggttgtagtgagctgagatcacaccattgcacttcaacctgggtggacagagtgagactctgtctcaaaaaaaaaaaaaaatttacctggcattgtagtgcattccctatagtcggctactctggaggctgaggcaggaagatccttagagcccaagaaattgaggccgtagtaagctgtgattacaccactgcactccagcctggacaacagagcgagaccttgtctcaaatgagaaaaaaacaaaaagaaatgggagaatccagagagactaggctagatcaagcctgctgggtcctggcaggagccccagggagtagctcatctgcagacatttgcttgaggactaccccctaaacataaaggaagaatgacatccgaagggtgtggagcagccatgagctgagaactagcctggtctacctgagattgatggcaggtcctggtcaacacgtcagctctgcgtcagagtccatgcctcaagcccaagctgaagccccatccctgctgctctcccaagaactcctctgctagggcaggccccttgcccttgggtgccaggtgggacctgcctgatgggatggggtgcttggcatatacaacttgccatgaactcaaggtgaccctgggggcctcctgaattgtgatggggcctagaaccaatgtgctctgatgtgaccatattctgtgacattaccttgccctgtttactccaaagttcccagcctggtgcccagcaggcaatattgcacctacagacacatttactttggtttccaaagtgtttttagacatttgaatttgttgccaacatttaaacattgagagatttcatatttttaaaaatctggaattctggcttctcttgaaaactcagaaattctggcactatggggcttgcattcctgcatggctggagctgagttgcagctgcccctttaggcctgtactccttatttgctataggctccgtcttgtattacactaagcccatgtcacccatttggctcctgcaggcctttgggtttgagaccctggtctacacac

SEQ ID NO: 8082 - protein, 509 aa, Homo sapiens; identical to SEQ ID NO: 8078

SEQ ID NO: 8083 - DNA, 2406 bp, Homo sapiens
acgggcctgctgcaggccaactgggctcccttttggcatctcagtcacctgtggaacctccctccttggagtggccatatgcttggcctctgtgctgtgtgtgggcatcttgattatggacctcggacttgttcatccccttgcccttaaacagattataaatttctgagggcaggtggatcatgaccttgctgtcgcccccaccttgcatcccccagcagcatcagagaacactcgggacctccccaaccttgaccgtgaccttcagcgttccgatcaccgtgtgattccttgatctgtcagtgagaactcatgtcccaaaggctctgtggagctctgctgtcactccctgacaaagcacttcctgcactcagccttaaatctccctgaaccccagctccattgtctttaagatgagaaaataatcgttccttcctgggaatgttgtgagtattgagtgaggcagtgcaggtcaagtgtctattaaacactagccacagttgtatcgctgtgtggcagagccagtctgacaaaatacattctcagctgtgtggtctaacgctcaaattctgaactcacatgagccttgcaattgcaccatggggaccacgtcctcccaccttagactcagtagcatttgatgatggtgggcatgtcatcacaggaaactcactgtgtttccttggctgtatgaatgaagctgttgttagagaattagtgattctaggctgggcacagtggctcacgcctgtaatcccagcactttgggaggctgaggcaggtggatcatttgaggtcaggagttcgagaccagcctggccaacaaggtaaaaccctgtctctactaaaaatacaaaattagctgggcttgcctgtaatcccagctaattaggtaggctgcggcaggagaattgcttgaacccgggagacagaggttgcagtgagctgggatcacgccattccacttcagtcttggtgacagagtgagacttcgtctcaaaaaaaaaaagagagttaataattcattacagagtatctcctgcatgccagcaagctatggacatctggaagaagccacatgccttgccctcaagttgcttagggtggaaggaaatgattagaaatgagccaagccgagcctgcactcttagagtaagtgtagtggcctcagacagaggagagatccctgggacctgggcagtctgagccttccactggacagtcatgtgtgaggagattgcatttcctgagcaggacactgtgttgcgttacattggtaaccccaatttaaggcagcataaatgcactgggaaaacagcaatattggttagccctgggaagtggtttttaggatgattataatttttttttgtgggtattcatttgatgtggatagctggggtgagtgctgctttccgtcttctgatgggggcctggagaaggctgaactgcattttttaaggtctgtgacgcctgctgcaggacctgcagtgggagaaaattccccagggtggggctttctccctataagggtgctcagggctgaatatcaggacccagaaggctgaaagtgactgtccctcccttaacggatgtcttccttgtttctgtggccagggagatacttcaggggattaccggaagattctgctgaagatctgtggtggcaatgactgaacagtgactggtggctcacttctgcccacctgccggcaacaccagtgccaggaaaaggccaaaagaatgtctgtttctaacaaatccacaaatagccccgagattcaccgtcctagagcttaggcctgtcttccacccctcctgacccgtatagtgtgccacaggacctgggtcggtctagaactctctcaggatgccttttctaccccatccctcacagcctcttgctgctaaaatagatgtttcatttttctgactcatgcaatcattcccctttgcctgtggctaagacttggcttcatttcgtcatgtaattgtatatttttatttggaggcatattttcttttcttacagtcattgccagacagaggcatacaagtctgtttgctgcatacacatttctggtgagggcgactgggtgggtgaagcaccgtgtcctcgctgaggagagaaagggaggcgtgcctgagaaggtagcctgtgcatctggtgagtgtgtcacgagctttgttactgccaaactcactcctttttagaaaaaacaaaaaaaaagggccagaaagtcattccttccatcttccttgcagaaaccacgagaacaaagccagttccctgtcagtgacagggcttcttgtaatttgtggtatgtgccttaaacctgaatgtctgtagccaaaacttgtttccacattaagagtcagccagctctggaatggtctggaaatgtc

SEQ ID NO: 8084 - protein, 83 aa, Homo sapiens [sequence omitted]

SEQ ID NO: 8085 - DNA, 2526 bp, Homo sapiens
ctctgttctctgcgctgggcatggagtggagctgtgaggccgagcccctgccctgccctgccctgccctgcccacgcaacagggactaggtttgcagggcagggcctggtatgctcacccttcactggctctcattgctttcctcattccttttatgcggcagtcaattgttggggattccaggggattaacagggcccctttcctcaaggcattctttgtgctgcaaggtgttccctgataagagaggccaggtccagatctaaccatgagctaccctggctatcccccgcccccaggtggctacccaccagctgcaccaggtggtggtccctggggaggtgctgcctaccctcctccgcccagcatgccccccatcgggctggataacgtggccacctatgcggggcagttcaaccaggactatctctcgggaatggcggccaacatgtctgggacatttggaggagccaacatgcccaacctgtaccctggggcccctggggctggctacccaccagtgccccctggcggctttgggcagcccccctctgcccagcagcctgttcctccctatgggatgtatccacccccaggaggaaacccaccctccaggatgccctcatatccgccatacccaggggcccctgtgccgggccagcccatgccaccccccggacagcagcccccaggggcctaccctgggcagccaccagtgacctaccctggtcagcctccagtgccactccctgggcagcagcagccagtgccgagctacccaggatacccggggtctgggactgtcacccccgctgtgcccccaacccagtttggaagccgaggcaccatcactgatgctcccggctttgaccccctgcgagatgccgaggtcctgcggaaggccatgaaaggcttcgggacggatgagcaggccatcattgactgcctggggagtcgctccaacaagcagcggcagcagatcctactttccttcaagacggcttacggcaaggcgagctgcggggatttgatcaaagatctgaaatctgaactgtcaggaaactttgagaagacaatcttggctctgatgaagaccccagtcctctttgacatttatgagataaaggaagccatcaagggggttggcactgatgaagcctgcctgattgagatcctcgcttcccgcagcaatgagcacatccgagaattaaacagagcctacaaagcagaattcaaaaagaccctggaagaggccattcgaagcgacacatcagggcacttccagcggctcctcatctctctctctcagggaaaccgtgatgaaagcacaaacgtggacatgtcactcgcccagagagatgcccaggagctgtatgcggccggggagaaccgcctgggaacagacgagtccaagttcaatgcggttctgtgctcccggagccgggcccacctggtagcagttttcaatgagtaccagagaatgacaggccgggacattgagaagagcatctgccgggagatgtccggggacctggaggagggcatgctggccgtggtgaaatgtctcaagaataccccagccttctttgcggagaggctcaacaaggccatgaggggggcaggaacaaaggaccggaccctgattcgcatcatggtgtctcgcagcgagaccgacctcctggacatcagatcagagtataagcggatgtacggcaagtcgctgtaccacgacatctcgggagatacttcaggggattaccggaagattctgctgaagatctgtggtggcaatgactgaacagtgactggtggctcacttctgcccacctgccggcaacaccagtgccaggaaaaggccaaaagaatgtctgtttctaacaaatccacaaatagccccgagattcaccgtcctagagcttaggcctgtcttccacccctcctgacccgtatagtgtgccacaggacctgggtcggtctagaactctctcaggatgccttttctaccccatccctcacagcctcttgctgctaaaatagatgtttcatttttctgactcatgcaatcattcccctttgcctgtggctaagacttggcttcatttcgtcatgtaattgtatatttttatttggaggcatattttcttttcttacagtcattgccagacagaggcatacaagtctgtttgctgcatacacatttctggtgagggcgactgggtgggtgaagcaccgtgtcctcgctgaggagagaaagggaggcgtgcctgagaaggtagcctgtgcatctggtgagtgtgtcacgagctttgttactgccaaactcactcctttttagaaaaaacaaaaaaaaagggccagaaagtcattccttccatcttccttgcagaaaccacgagaacaaagccagttccctgtcagtgacagggcttcttgtaatttgtggtatgtgccttaaacctgaatgtctgtagccaaaacttgtttccacattaagagtcagccagctctggaatggtctggaaatgtc

SEQ ID NO: 8086 - protein, 509 aa, Homo sapiens; identical to SEQ ID NO: 8078

SEQ ID NO: 8087 - DNA, 2511 bp, Homo sapiens
cccgcccctcccttgcactgcctctggcacctggggcagccgcgcccgcggagttttccgcccggcgctgacggctgctgcgcccgcggctccccagtgccccgagtgccccgcgggccccgcgagcgggagtgggacccagcccctaggcagaacccaggcgccgcgcccgggacgcccgcggagagagccactcccgcccacgtcccatttcgcccctcgcgtccggagtccccgtggccagatctaaccatgagctaccctggctatcccccgcccccaggtggctacccaccagctgcaccaggtggtggtccctggggaggtgctgcctaccctcctccgcccagcatgccccccatcgggctggataacgtggccacctatgcggggcagttcaaccaggactatctctcgggaatggcggccaacatgtctgggacatttggaggagccaacatgcccaacctgtaccctggggcccctggggctggctacccaccagtgccccctggcggctttgggcagcccccctctgcccagcagcctgttcctccctatgggatgtatccacccccaggaggaaacccaccctccaggatgccctcatatccgccatacccaggggcccctgtgccgggccagcccatgccaccccccggacagcagcccccaggggcctaccctgggcagccaccagtgacctaccctggtcagcctccagtgccactccctgggcagcagcagccagtgccgagctacccaggatacccggggtctgggactgtcacccccgctgtgcccccaacccagtttggaagccgaggcaccatcactgatgctcccggctttgaccccctgcgagatgccgaggtcctgcggaaggccatgaaaggcttcgggacggatgagcaggccatcattgactgcctggggagtcgctccaacaagcagcggcagcagatcctactttccttcaagacggcttacggcaaggcgagctgcggggatttgatcaaagatctgaaatctgaactgtcaggaaactttgagaagacaatcttggctctgatgaagaccccagtcctctttgacatttatgagataaaggaagccatcaagggggttggcactgatgaagcctgcctgattgagatcctcgcttcccgcagcaatgagcacatccgagaattaaacagagcctacaaagcagaattcaaaaagaccctggaagaggccattcgaagcgacacatcagggcacttccagcggctcctcatctctctctctcagggaaaccgtgatgaaagcacaaacgtggacatgtcactcgcccagagagatgcccaggagctgtatgcggccggggagaaccgcctgggaacagacgagtccaagttcaatgcggttctgtgctcccggagccgggcccacctggtagcagttttcaatgagtaccagagaatgacaggccgggacattgagaagagcatctgccgggagatgtccggggacctggaggagggcatgctggccgtggtgaaatgtctcaagaataccccagccttctttgcggagaggctcaacaaggccatgaggggggcaggaacaaaggaccggaccctgattcgcatcatggtgtctcgcagcgagaccgacctcctggacatcagatcagagtataagcggatgtacggcaagtcgctgtaccacgacatctcgggagatacttcaggggattaccggaagattctgctgaagatctgtggtggcaatgactgaacagtgactggtggctcacttctgcccacctgccggcaacaccagtgccaggaaaaggccaaaagaatgtctgtttctaacaaatccacaaatagccccgagattcaccgtcctagagcttaggcctgtcttccacccctcctgacccgtatagtgtgccacaggacctgggtcggtctagaactctctcaggatgccttttctaccccatccctcacagcctcttgctgctaaaatagatgtttcatttttctgactcatgcaatcattcccctttgcctgtggctaagacttggcttcatttcgtcatgtaattgtatatttttatttggaggcatattttcttttcttacagtcattgccagacagaggcatacaagtctgtttgctgcatacacatttctggtgagggcgactgggtgggtgaagcaccgtgtcctcgctgaggagagaaagggaggcgtgcctgagaaggtagcctgtgcatctggtgagtgtgtcacgagctttgttactgccaaactcactcctttttagaaaaaacaaaaaaaaagggccagaaagtcattccttccatcttccttgcagaaaccacgagaacaaagccagttccctgtcagtgacagggcttcttgtaatttgtggtatgtgccttaaacctgaatgtctgtagccaaaacttgtttccacattaagagtcagccagctctggaatggtctggaaatgtc

SEQ ID NO: 8088 - protein, 509 aa, Homo sapiens; identical to SEQ ID NO: 8078

SEQ ID NO: 8089 - DNA, 2427 bp, Homo sapiens
ttcctggagcagctccgcagccggaaggctgctgctcctcgcgggcccgccgtgcccacccctaggcagaacccaggcgccgcgcccgggacgcccgcggagagagccactcccgcccacgtcccatttcgcccctcgcgtccggagtccccgtggccagatctaaccatgagctaccctggctatcccccgcccccaggtggctacccaccagctgcaccaggtggtggtccctggggaggtgctgcctaccctcctccgcccagcatgccccccatcgggctggataacgtggccacctatgcggggcagttcaaccaggactatctctcgggaatggcggccaacatgtctgggacatttggaggagccaacatgcccaacctgtaccctggggcccctggggctggctacccaccagtgccccctggcggctttgggcagcccccctctgcccagcagcctgttcctccctatgggatgtatccacccccaggaggaaacccaccctccaggatgccctcatatccgccatacccaggggcccctgtgccgggccagcccatgccaccccccggacagcagcccccaggggcctaccctgggcagccaccagtgacctaccctggtcagcctccagtgccactccctgggcagcagcagccagtgccgagctacccaggatacccggggtctgggactgtcacccccgctgtgcccccaacccagtttggaagccgaggcaccatcactgatgctcccggctttgaccccctgcgagatgccgaggtcctgcggaaggccatgaaaggcttcgggacggatgagcaggccatcattgactgcctggggagtcgctccaacaagcagcggcagcagatcctactttccttcaagacggcttacggcaaggcgagctgcggggatttgatcaaagatctgaaatctgaactgtcaggaaactttgagaagacaatcttggctctgatgaagaccccagtcctctttgacatttatgagataaaggaagccatcaagggggttggcactgatgaagcctgcctgattgagatcctcgcttcccgcagcaatgagcacatccgagaattaaacagagcctacaaagcagaattcaaaaagaccctggaagaggccattcgaagcgacacatcagggcacttccagcggctcctcatctctctctctcagggaaaccgtgatgaaagcacaaacgtggacatgtcactcgcccagagagatgcccaggagctgtatgcggccggggagaaccgcctgggaacagacgagtccaagttcaatgcggttctgtgctcccggagccgggcccacctggtagcagttttcaatgagtaccagagaatgacaggccgggacattgagaagagcatctgccgggagatgtccggggacctggaggagggcatgctggccgtggtgaaatgtctcaagaataccccagccttctttgcggagaggctcaacaaggccatgaggggggcaggaacaaaggaccggaccctgattcgcatcatggtgtctcgcagcgagaccgacctcctggacatcagatcagagtataagcggatgtacggcaagtcgctgtaccacgacatctcgggagatacttcaggggattaccggaagattctgctgaagatctgtggtggcaatgactgaacagtgactggtggctcacttctgcccacctgccggcaacaccagtgccaggaaaaggccaaaagaatgtctgtttctaacaaatccacaaatagccccgagattcaccgtcctagagcttaggcctgtcttccacccctcctgacccgtatagtgtgccacaggacctgggtcggtctagaactctctcaggatgccttttctaccccatccctcacagcctcttgctgctaaaatagatgtttcatttttctgactcatgcaatcattcccctttgcctgtggctaagacttggcttcatttcgtcatgtaattgtatatttttatttggaggcatattttcttttcttacagtcattgccagacagaggcatacaagtctgtttgctgcatacacatttctggtgagggcgactgggtgggtgaagcaccgtgtcctcgctgaggagagaaagggaggcgtgcctgagaaggtagcctgtgcatctggtgagtgtgtcacgagctttgttactgccaaactcactcctttttagaaaaaacaaaaaaaaagggccagaaagtcattccttccatcttccttgcagaaaccacgagaacaaagccagttccctgtcagtgacagggcttcttgtaatttgtggtatgtgccttaaacctgaatgtctgtagccaaaacttgtttccacattaagagtcagccagctctggaatggtctggaaatgtc

SEQ ID NO: 8090 - protein, 509 aa, Homo sapiens; identical to SEQ ID NO: 8078

SEQ ID NO: 8091 - DNA, 2133 bp, Homo sapiens
ctctgttctctgcgctgggcatggagtggagctgtgaggccgagcccctgccctgccctgccctgccctgcccacgcaacagggactaggtttgcagggcagggcctggtatgctcacccttcactggctctcattgctttcctcattccttttatgcggcagtcaattgttggggattccaggggattaacagggcccctttcctcaaggcattctttgtgctgcaaggtgttccctgataagagaggccaggtccagatctaaccatgagctaccctggctatcccccgcccccaggtggctacccaccagctgcaccaggtggtggtccctggggaggtgctgcctaccctcctccgcccagcatgccccccatcgggctggataacgtggccacctatgcggggcagttcaaccaggactatctctcgggaatggcggccaacatgtctgggacatttggaggagccaacatgcccaacctgtaccctggggcccctggggctggctacccaccagtgccccctggcggctttgggcagcccccctctgcccagcagcctgttcctccctatgggatgtatccacccccaggaggaaacccaccctccaggatgccctcatatccgccatacccaggggcccctgtgccgggccagcccatgccaccccccggacagcagcccccaggggcctaccctgggcagccaccagtgacctaccctggtcagcctccagtgccactccctgggcagcagcagccagtgccgagctacccaggatacccggggtctgggactgtcacccccgctgtgcccccaacccagtttggaagccgaggcaccatcactgatgctcccggctttgaccccctgcgagatgccgaggtcctgcggaaggccatgaaaggcttcgggacggatgagcaggccatcattgactgcctggggagtcgctccaacaagcagcggcagcagatcctactttccttcaagacggcttacggcaaggcgagctgcggggatttgatcaaagatctgaaatctgaactgtcaggaaactttgagaagacaatcttggctctgatgaagaccccagtcctctttgacatttatgagataaaggaagccatcaagggggttggcactgatgaagcctgcctgattgagatcctcgcttcccgcagcaatgagcacatccgagaattaaacagagcctacaaagcagaattcaaaaagaccctggaagaggccattcgaagcgacacatcagggcacttccagcggctcctcatctctctctctcagggaaaccgtgatgaaagcacaaacgtggacatgtcactcgcccagagagatgcccaggagctgtatgcggccggggagaaccgcctgggaacagacgagtccaagttcaatgcggttctgtgctcccggagccgggcccacctggtagcagttttcaatgagtaccagagaatgacaggccgggacattgagaagagcatctgccgggagatgtccggggacctggaggagggcatgctggccgtggtgaaatgtctcaagaataccccagccttctttgcggagaggctcaacaaggccatgaggggggcaggaacaaaggaccggaccctgattcgcatcatggtgtctcgcagcgagaccgacctcctggacatcagatcagagtataagcggatgtacggcaagtcgctgtaccacgacatctcgggagatacttcaggggattaccggaagattctgctgaagatctgtggtggcaatgactgaacagtgactggtggctcacttctgcccacctgccggcaacaccagtgccaggaaaaggccaaaagaatgtctgtttctaacaaatccacaaatagccccgagattcaccgtcctagagcttaggcctgtcttccacccctcctgacccgtatagtgtgccacaggacctgggtcggtctagaactctctcaggatgccttttctaccccatccctcacagcctcttgctgctaaaatagatgtttcatttttctgactcatgcaatcattcccctttgcctgtggctaagacttggcttcatttcgtcatgtaattgtatatttttatttggaggc

SEQ ID NO: 8092 - protein, 509 aa, Homo sapiens; identical to SEQ ID NO: 8078

SEQ ID NO: 8093 - DNA, 2118 bp, Homo sapiens
cccgcccctcccttgcactgcctctggcacctggggcagccgcgcccgcggagttttccgcccggcgctgacggctgctgcgcccgcggctccccagtgccccgagtgccccgcgggccccgcgagcgggagtgggacccagcccctaggcagaacccaggcgccgcgcccgggacgcccgcggagagagccactcccgcccacgtcccatttcgcccctcgcgtccggagtccccgtggccagatctaaccatgagctaccctggctatcccccgcccccaggtggctacccaccagctgcaccaggtggtggtccctggggaggtgctgcctaccctcctccgcccagcatgccccccatcgggctggataacgtggccacctatgcggggcagttcaaccaggactatctctcgggaatggcggccaacatgtctgggacatttggaggagccaacatgcccaacctgtaccctggggcccctggggctggctacccaccagtgccccctggcggctttgggcagcccccctctgcccagcagcctgttcctccctatgggatgtatccacccccaggaggaaacccaccctccaggatgccctcatatccgccatacccaggggcccctgtgccgggccagcccatgccaccccccggacagcagcccccaggggcctaccctgggcagccaccagtgacctaccctggtcagcctccagtgccactccctgggcagcagcagccagtgccgagctacccaggatacccggggtctgggactgtcacccccgctgtgcccccaacccagtttggaagccgaggcaccatcactgatgctcccggctttgaccccctgcgagatgccgaggtcctgcggaaggccatgaaaggcttcgggacggatgagcaggccatcattgactgcctggggagtcgctccaacaagcagcggcagcagatcctactttccttcaagacggcttacggcaaggcgagctgcggggatttgatcaaagatctgaaatctgaactgtcaggaaactttgagaagacaatcttggctctgatgaagaccccagtcctctttgacatttatgagataaaggaagccatcaagggggttggcactgatgaagcctgcctgattgagatcctcgcttcccgcagcaatgagcacatccgagaattaaacagagcctacaaagcagaattcaaaaagaccctggaagaggccattcgaagcgacacatcagggcacttccagcggctcctcatctctctctctcagggaaaccgtgatgaaagcacaaacgtggacatgtcactcgcccagagagatgcccaggagctgtatgcggccggggagaaccgcctgggaacagacgagtccaagttcaatgcggttctgtgctcccggagccgggcccacctggtagcagttttcaatgagtaccagagaatgacaggccgggacattgagaagagcatctgccgggagatgtccggggacctggaggagggcatgctggccgtggtgaaatgtctcaagaataccccagccttctttgcggagaggctcaacaaggccatgaggggggcaggaacaaaggaccggaccctgattcgcatcatggtgtctcgcagcgagaccgacctcctggacatcagatcagagtataagcggatgtacggcaagtcgctgtaccacgacatctcgggagatacttcaggggattaccggaagattctgctgaagatctgtggtggcaatgactgaacagtgactggtggctcacttctgcccacctgccggcaacaccagtgccaggaaaaggccaaaagaatgtctgtttctaacaaatccacaaatagccccgagattcaccgtcctagagcttaggcctgtcttccacccctcctgacccgtatagtgtgccacaggacctgggtcggtctagaactctctcaggatgccttttctaccccatccctcacagcctcttgctgctaaaatagatgtttcatttttctgactcatgcaatcattcccctttgcctgtggctaagacttggcttcatttcgtcatgtaattgtatatttttatttggaggc

SEQ ID NO: 8094 - protein, 509 aa, Homo sapiens; identical to SEQ ID NO: 8078

SEQ ID NO: 8095 - DNA, 2034 bp, Homo sapiens
ttcctggagcagctccgcagccggaaggctgctgctcctcgcgggcccgccgtgcccacccctaggcagaacccaggcgccgcgcccgggacgcccgcggagagagccactcccgcccacgtcccatttcgcccctcgcgtccggagtccccgtggccagatctaaccatgagctaccctggctatcccccgcccccaggtggctacccaccagctgcaccaggtggtggtccctggggaggtgctgcctaccctcctccgcccagcatgccccccatcgggctggataacgtggccacctatgcggggcagttcaaccaggactatctctcgggaatggcggccaacatgtctgggacatttggaggagccaacatgcccaacctgtaccctggggcccctggggctggctacccaccagtgccccctggcggctttgggcagcccccctctgcccagcagcctgttcctccctatgggatgtatccacccccaggaggaaacccaccctccaggatgccctcatatccgccatacccaggggcccctgtgccgggccagcccatgccaccccccggacagcagcccccaggggcctaccctgggcagccaccagtgacctaccctggtcagcctccagtgccactccctgggcagcagcagccagtgccgagctacccaggatacccggggtctgggactgtcacccccgctgtgcccccaacccagtttggaagccgaggcaccatcactgatgctcccggctttgaccccctgcgagatgccgaggtcctgcggaaggccatgaaaggcttcgggacggatgagcaggccatcattgactgcctggggagtcgctccaacaagcagcggcagcagatcctactttccttcaagacggcttacggcaaggcgagctgcggggatttgatcaaagatctgaaatctgaactgtcaggaaactttgagaagacaatcttggctctgatgaagaccccagtcctctttgacatttatgagataaaggaagccatcaagggggttggcactgatgaagcctgcctgattgagatcctcgcttcccgcagcaatgagcacatccgagaattaaacagagcctacaaagcagaattcaaaaagaccctggaagaggccattcgaagcgacacatcagggcacttccagcggctcctcatctctctctctcagggaaaccgtgatgaaagcacaaacgtggacatgtcactcgcccagagagatgcccaggagctgtatgcggccggggagaaccgcctgggaacagacgagtccaagttcaatgcggttctgtgctcccggagccgggcccacctggtagcagttttcaatgagtaccagagaatgacaggccgggacattgagaagagcatctgccgggagatgtccggggacctggaggagggcatgctggccgtggtgaaatgtctcaagaataccccagccttctttgcggagaggctcaacaaggccatgaggggggcaggaacaaaggaccggaccctgattcgcatcatggtgtctcgcagcgagaccgacctcctggacatcagatcagagtataagcggatgtacggcaagtcgctgtaccacgacatctcgggagatacttcaggggattaccggaagattctgctgaagatctgtggtggcaatgactgaacagtgactggtggctcacttctgcccacctgccggcaacaccagtgccaggaaaaggccaaaagaatgtctgtttctaacaaatccacaaatagccccgagattcaccgtcctagagcttaggcctgtcttccacccctcctgacccgtatagtgtgccacaggacctgggtcggtctagaactctctcaggatgccttttctaccccatccctcacagcctcttgctgctaaaatagatgtttcatttttctgactcatgcaatcattcccctttgcctgtggctaagacttggcttcatttcgtcatgtaattgtatatttttatttggaggc

SEQ ID NO: 8096 - protein, 509 aa, Homo sapiens; identical to SEQ ID NO: 8078

SEQ ID NO: 8097 - DNA, 1977 bp, Homo sapiens
acgggcctgctgcaggccaactgggctcccttttggcatctcagtcacctgtggaacctccctccttggagtggccatatgcttggcctctgtgctgtgtgtgggcatcttgattatggacctcggacttgttcatccccttgcccttaaacagattataaatttctgagggcaggtggatcatgaccttgctgtcgcccccaccttgcatcccccagcagcatcagagaacactcgggacctccccaaccttgaccgtgaccttcagcgttccgatcaccgtgtgattccttgatctgtcagtgagaactcatgtcccaaaggctctgtggagctctgctgtcactccctgacaaagcacttcctgcactcagccttaaatctccctgaaccccagctccattgtctttaagatgagaaaataatcgttccttcctgggaatgttgtgagtattgagtgaggcagtgcaggtcaagtgtctattaaacactagccacagttgtatcgctgtgtggcagagccagtctgacaaaatacattctcagctgtgtggtctaacgctcaaattctgaactcacatgagccttgcaattgcaccatggggaccacgtcctcccaccttagactcagtagcatttgatgatggtgggcatgtcatcacaggaaactcactgtgtttccttggctgtatgaatgaagctgttgttagagaattagtgattctaggctgggcacagtggctcacgcctgtaatcccagcactttgggaggctgaggcaggtggatcatttgaggtcaggagttcgagaccagcctggccaacaaggtaaaaccctgtctctactaaaaatacaaaattagctgggcttgcctgtaatcccagctaattaggtaggctgcggcaggagaattgcttgaacccgggagacagaggttgcagtgagctgggatcacgccattccacttcagtcttggtgacagagtgagacttcgtctcaaaaaaaaaaagagagttaataattcattacagagtatctcctgcatgccagcaagctatggacatctggaagaagccacatgccttgccctcaagttgcttagggtggaaggaaatgattagaaatgagccaagccgagcctgcactcttagagtaagtgtagtggcctcagacagaggagagatccctgggacctgggcagtctgagccttccactggacagtcatgtgtgaggagattgcatttcctgagcaggacactgtgttgcgttacattggtaaccccaatttaaggcagcataaatgcactgggaaaacagcaatattggttagccctgggaagtggtttttaggatgattataatttttttttgtgggtattcatttgatgtggatagctggggtgagtgctgctttccgtcttctgatgggggcctggagaaggctgaactgcattttttaaggtctgtgacgcctgctgcaggacctgcagtgggagaaaattccccagggtggggctttctccctataagggtgctcagggctgaatatcaggacccagaaggctgaaagtgactgtccctcccttaacggatgtcttccttgtttctgtggccagggagatacttcaggggattaccggaagattctgctgaagatctgtggtggcaatgactgaacagtgactggtggctcacttctgcccacctgccggcaacaccagtgccaggaaaaggccaaaagaatgtctgtttctaacaaatccacaaatagccccgagattcaccgtcctagagcttaggcctgtcttccacccctcctgacccgtatagtgtgccacaggacctgggtcggtctagaactctctcaggatgccttttctaccccatccctcacagcctcttgctgctaaaatagatgtttcatttttctgactcatgcaatcattcccctttgcctgtggctaagacttggcttc

SEQ ID NO: 8098 - protein, 83 aa, Homo sapiens [sequence omitted]

SEQ ID NO: 8099 - DNA, 2081 bp, Homo sapiens
ctctgttctctgcgctgggcatggagtggagctgtgaggccgagcccctgccctgccctgccctgccctgcccacgcaacagggactaggtttgcagggcagggcctggtatgctcacccttcactggctctcattgctttcctcattccttttatgcggcagtcaattgttggggattccaggggattaacagggcccctttcctcaaggcattctttgtgctgcaaggtgttccctgataagagaggccaggtccagatctaaccatgagctaccctggctatcccccgcccccaggtggctacccaccagctgcaccaggtggtggtccctggggaggtgctgcctaccctcctccgcccagcatgccccccatcgggctggataacgtggccacctatgcggggcagttcaaccaggactatctctcgggaatggcggccaacatgtctgggacatttggaggagccaacatgcccaacctgtaccctggggcccctggggctggctacccaccagtgccccctggcggctttgggcagcccccctctgcccagcagcctgttcctccctatgggatgtatccacccccaggaggaaacccaccctccaggatgccctcatatccgccatacccaggggcccctgtgccgggccagcccatgccaccccccggacagcagcccccaggggcctaccctgggcagccaccagtgacctaccctggtcagcctccagtgccactccctgggcagcagcagccagtgccgagctacccaggatacccggggtctgggactgtcacccccgctgtgcccccaacccagtttggaagccgaggcaccatcactgatgctcccggctttgaccccctgcgagatgccgaggtcctgcggaaggccatgaaaggcttcgggacggatgagcaggccatcattgactgcctggggagtcgctccaacaagcagcggcagcagatcctactttccttcaagacggcttacggcaaggcgagctgcggggatttgatcaaagatctgaaatctgaactgtcaggaaactttgagaagacaatcttggctctgatgaagaccccagtcctctttgacatttatgagataaaggaagccatcaagggggttggcactgatgaagcctgcctgattgagatcctcgcttcccgcagcaatgagcacatccgagaattaaacagagcctacaaagcagaattcaaaaagaccctggaagaggccattcgaagcgacacatcagggcacttccagcggctcctcatctctctctctcagggaaaccgtgatgaaagcacaaacgtggacatgtcactcgcccagagagatgcccaggagctgtatgcggccggggagaaccgcctgggaacagacgagtccaagttcaatgcggttctgtgctcccggagccgggcccacctggtagcagttttcaatgagtaccagagaatgacaggccgggacattgagaagagcatctgccgggagatgtccggggacctggaggagggcatgctggccgtggtgaaatgtctcaagaataccccagccttctttgcggagaggctcaacaaggccatgaggggggcaggaacaaaggaccggaccctgattcgcatcatggtgtctcgcagcgagaccgacctcctggacatcagatcagagtataagcggatgtacggcaagtcgctgtaccacgacatctcgggagatacttcaggggattaccggaagattctgctgaagatctgtggtggcaatgactgaacagtgactggtggctcacttctgcccacctgccggcaacaccagtgccaggaaaaggccaaaagaatgtctgtttctaacaaatccacaaatagccccgagattcaccgtcctagagcttaggcctgtcttccacccctcctgacccgtatagtgtgccacaggacctgggtcggtctagaactctctcaggatgccttttctaccccatccctcacagcctcttgctgctaaaatagatgtttcatttttctgactcatgcaatcattcccctttgcctgtg

SEQ ID NO: 8100 - protein, 509 aa, Homo sapiens; identical to SEQ ID NO: 8078

SEQ ID NO: 8101 - DNA, 2066 bp, Homo sapiens
cccgcccctcccttgcactgcctctggcacctggggcagccgcgcccgcggagttttccgcccggcgctgacggctgctgcgcccgcggctccccagtgccccgagtgccccgcgggccccgcgagcgggagtgggacccagcccctaggcagaacccaggcgccgcgcccgggacgcccgcggagagagccactcccgcccacgtcccatttcgcccctcgcgtccggagtccccgtggccagatctaaccatgagctaccctggctatcccccgcccccaggtggctacccaccagctgcaccaggtggtggtccctggggaggtgctgcctaccctcctccgcccagcatgccccccatcgggctggataacgtggccacctatgcggggcagttcaaccaggactatctctcgggaatggcggccaacatgtctgggacatttggaggagccaacatgcccaacctgtaccctggggcccctggggctggctacccaccagtgccccctggcggctttgggcagcccccctctgcccagcagcctgttcctccctatgggatgtatccacccccaggaggaaacccaccctccaggatgccctcatatccgccatacccaggggcccctgtgccgggccagcccatgccaccccccggacagcagcccccaggggcctaccctgggcagccaccagtgacctaccctggtcagcctccagtgccactccctgggcagcagcagccagtgccgagctacccaggatacccggggtctgggactgtcacccccgctgtgcccccaacccagtttggaagccgaggcaccatcactgatgctcccggctttgaccccctgcgagatgccgaggtcctgcggaaggccatgaaaggcttcgggacggatgagcaggccatcattgactgcctggggagtcgctccaacaagcagcggcagcagatcctactttccttcaagacggcttacggcaaggcgagctgcggggatttgatcaaagatctgaaatctgaactgtcaggaaactttgagaagacaatcttggctctgatgaagaccccagtcctctttgacatttatgagataaaggaagccatcaagggggttggcactgatgaagcctgcctgattgagatcctcgcttcccgcagcaatgagcacatccgagaattaaacagagcctacaaagcagaattcaaaaagaccctggaagaggccattcgaagcgacacatcagggcacttccagcggctcctcatctctctctctcagggaaaccgtgatgaaagcacaaacgtggacatgtcactcgcccagagagatgcccaggagctgtatgcggccggggagaaccgcctgggaacagacgagtccaagttcaatgcggttctgtgctcccggagccgggcccacctggtagcagttttcaatgagtaccagagaatgacaggccgggacattgagaagagcatctgccgggagatgtccggggacctggaggagggcatgctggccgtggtgaaatgtctcaagaataccccagccttctttgcggagaggctcaacaaggccatgaggggggcaggaacaaaggaccggaccctgattcgcatcatggtgtctcgcagcgagaccgacctcctggacatcagatcagagtataagcggatgtacggcaagtcgctgtaccacgacatctcgggagatacttcaggggattaccggaagattctgctgaagatctgtggtggcaatgactgaacagtgactggtggctcacttctgcccacctgccggcaacaccagtgccaggaaaaggccaaaagaatgtctgtttctaacaaatccacaaatagccccgagattcaccgtcctagagcttaggcctgtcttccacccctcctgacccgtatagtgtgccacaggacctgggtcggtctagaactctctcaggatgccttttctaccccatccctcacagcctcttgctgctaaaatagatgtttcatttttctgactcatgcaatcattcccctttgcctgtg

SEQ ID NO: 8102 - protein, 509 aa, Homo sapiens; identical to SEQ ID NO: 8078

SEQ ID NO: 8103 - DNA, 1982 bp, Homo sapiens
ttcctggagcagctccgcagccggaaggctgctgctcctcgcgggcccgccgtgcccacccctaggcagaacccaggcgccgcgcccgggacgcccgcggagagagccactcccgcccacgtcccatttcgcccctcgcgtccggagtccccgtggccagatctaaccatgagctaccctggctatcccccgcccccaggtggctacccaccagctgcaccaggtggtggtccctggggaggtgctgcctaccctcctccgcccagcatgccccccatcgggctggataacgtggccacctatgcggggcagttcaaccaggactatctctcgggaatggcggccaacatgtctgggacatttggaggagccaacatgcccaacctgtaccctggggcccctggggctggctacccaccagtgccccctggcggctttgggcagcccccctctgcccagcagcctgttcctccctatgggatgtatccacccccaggaggaaacccaccctccaggatgccctcatatccgccatacccaggggcccctgtgccgggccagcccatgccaccccccggacagcagcccccaggggcctaccctgggcagccaccagtgacctaccctggtcagcctccagtgccactccctgggcagcagcagccagtgccgagctacccaggatacccggggtctgggactgtcacccccgctgtgcccccaacccagtttggaagccgaggcaccatcactgatgctcccggctttgaccccctgcgagatgccgaggtcctgcggaaggccatgaaaggcttcgggacggatgagcaggccatcattgactgcctggggagtcgctccaacaagcagcggcagcagatcctactttccttcaagacggcttacggcaaggcgagctgcggggatttgatcaaagatctgaaatctgaactgtcaggaaactttgagaagacaatcttggctctgatgaagaccccagtcctctttgacatttatgagataaaggaagccatcaagggggttggcactgatgaagcctgcctgattgagatcctcgcttcccgcagcaatgagcacatccgagaattaaacagagcctacaaagcagaattcaaaaagaccctggaagaggccattcgaagcgacacatcagggcacttccagcggctcctcatctctctctctcagggaaaccgtgatgaaagcacaaacgtggacatgtcactcgcccagagagatgcccaggagctgtatgcggccggggagaaccgcctgggaacagacgagtccaagttcaatgcggttctgtgctcccggagccgggcccacctggtagcagttttcaatgagtaccagagaatgacaggccgggacattgagaagagcatctgccgggagatgtccggggacctggaggagggcatgctggccgtggtgaaatgtctcaagaataccccagccttctttgcggagaggctcaacaaggccatgaggggggcaggaacaaaggaccggaccctgattcgcatcatggtgtctcgcagcgagaccgacctcctggacatcagatcagagtataagcggatgtacggcaagtcgctgtaccacgacatctcgggagatacttcaggggattaccggaagattctgctgaagatctgtggtggcaatgactgaacagtgactggtggctcacttctgcccacctgccggcaacaccagtgccaggaaaaggccaaaagaatgtctgtttctaacaaatccacaaatagccccgagattcaccgtcctagagcttaggcctgtcttccacccctcctgacccgtatagtgtgccacaggacctgggtcggtctagaactctctcaggatgccttttctaccccatccctcacagcctcttgctgctaaaatagatgtttcatttttctgactcatgcaatcattcccctttgcctgtg

SEQ ID NO: 8104 - protein, 509 aa, Homo sapiens; identical to SEQ ID NO: 8078

SEQ ID NO: 8105 - DNA, 1152 bp, Homo sapiens
gcggagttttccgcccggcgctgacggctgctgcgcccgcggctccccagtgccccgagtgccccgcgggccccgcgagcgggagtgggacccagcccctaggcagaacccaggcgccgcgcccgggacgcccgcggagagagccactcccgcccacgtcccatttcgcccctcgcgtccggagtccccgtggccagatctaaccatgagctaccctggctatcccccgcccccaggtggctacccaccagctgcaccaggtaagagggtctggggtggggaggagagtgaatgctgcctctgtacagtggctgggagtggagaggggagaacagtagtttcctcactcccctcctcccctcacagcacggcccagcaggggaggagaggacaacaggagtagtgggacagccagccgaggcaggggctggagaagagcatgacactaaggccatcggaggcctaggtttgaaactgcctccagaaagccctggaccaggcccagggctgggtctcttgccttactctctagtaacagtgggcaaatgctgtcactttgagactcagttttcttctccgcaaaattgcttcaaggatttctccctcattaggtggtcctggatactgatgagataggcaggcagagcgacacggtgtcctccaaagcattgctaggtgatggttgccccttaccacctctcctaccctctgctcaaggtgtgtgggtttgcagcaacaagatcccccttgccaagagaggaagtggaggcagatgctaagggtcaaaggtcactccctgttttctgcaggagctgtgggtagtcacatggagaagtcgtcttctctggccctggccccttttggtcctcaaatgagatttggtccccactgtgggaaaggaaatatgagggctcatgagaccaaggggagaaaagggtcattccaaggctggtcatcctgagggtgcctgagccgctgcccctctccccaggggactcctaggcatcattgatttctttggagctgaggtcctgtggtttgaacaccccagacctgcaggccatttaccttccctcccattcagcaggtgaagaacagactcagacctagaggtggctcagctgctgtcccagggcatgttaggggctgagc

SEQ ID NO: 8106 - protein, 114 aa, Homo sapiens [sequence omitted]

SEQ ID NO: 8107 - DNA, 1050 bp, Homo sapiens
ctctgttctctgcgctgggcatggagtggagctgtgaggccgagcccctgccctgccctgccctgccctgcccacgcaacagggactaggtttgcagggcagggcctggtatgctcacccttcactggctctcattgctttcctcattccttttatgcggcagtcaattgttggggattccaggggattaacagggcccctttcctcaaggcattctttgtgctgcaaggtgttccctgataagagaggccagggtttcacttccatcgcccaggctggagtgcaatggcgtgatctgggctcactgcaacctccacctcccaggctcaaatgattctcctgcctcagcctcctgagtagagtagctgggaccacagtcgcatgccatggtgctcggctaatttttttgtattttatttttgtaacgacagggtctcattatgttgcccaggctggtgtcaaacttctgagctcaaatgatctgcctgcgtcagcctcccaaagtgctgggattataggcatgggccactgtgcctggcctcatcttgtcattttaaagaatatatcagcagggattattggacctgcctggtttaaactattgtcttagttaattttgtgctgctctaacaaaatatcacagactgagtaatttataagcaatagtagcttatttggctcacagttctggaggctgagaagatcgtgaggctgcatctggcaagggccttcttgctgcttcataacatggcagaagacatcatgcgggtaagagagagcatgttatacttttgtaacaaacacactggtggtaaggagcccacttcctccataacacattaatccattcgtgagggtagagcctcttaaaagtaccgcctctcagaactgttgtattgaccattaagtttgcagcacatgaactttgggggatacatttaaacaatagcaatgatatatttaaattttatggatacaaccttatggggaaagtattttaaaaaataaattgtgtgtgtgtgtgtaaaaacaggttaaggatctaatgtt

SEQ ID NO: 8108 - protein, 59 aa, Homo sapiens
MRQSIVGDSRGLTGPLSSRHSLCCKVFPDKRGQGFTSIAQAGVQWRDLGSLQPPPPRLK

SEQ ID NO: 8109 - DNA, 993 bp, Homo sapiens
ggggagattaagcagagaaggctatcttcaggaactttcctccgaaactgggagcacgcacattcctgggagctgctaccattgcagtttatttggaaatttccctgcacaaactctcttctcttgtctgctgccatgtgagacgtgcctttcaccttcagccatgattgtgaggcctccccagccacgtggaactggtttcacttccatcgcccaggctggagtgcaatggcgtgatctgggctcactgcaacctccacctcccaggctcaaatgattctcctgcctcagcctcctgagtagagtagctgggaccacagtcgcatgccatggtgctcggctaatttttttgtattttatttttgtaacgacagggtctcattatgttgcccaggctggtgtcaaacttctgagctcaaatgatctgcctgcgtcagcctcccaaagtgctgggattataggcatgggccactgtgcctggcctcatcttgtcattttaaagaatatatcagcagggattattggacctgcctggtttaaactattgtcttagttaattttgtgctgctctaacaaaatatcacagactgagtaatttataagcaatagtagcttatttggctcacagttctggaggctgagaagatcgtgaggctgcatctggcaagggccttcttgctgcttcataacatggcagaagacatcatgcgggtaagagagagcatgttatacttttgtaacaaacacactggtggtaaggagcccacttcctccataacacattaatccattcgtgagggtagagcctcttaaaagtaccgcctctcagaactgttgtattgaccattaagtttgcagcacatgaactttgggggatacatttaaacaatagcaatgatatatttaaattttatggatacaaccttatggggaaagtattttaaaaaataaattgtgtgtgtgtgtgtaaaaacaggttaaggatctaatgtt

SEQ ID NO: 8110 - protein, 37 aa, Homo sapiens
MIVRPPQPRGTGFTSIAQAGVQWRDLGSLQPPPPRLK

SEQ ID NO: 8111 - DNA, 1025 bp, Homo sapiens
actgcctctggcacctggggcagccgcgcccgcggagttttccgcccggcgctgacggctgctgcgcccgcggctccccagtgccccgagtgccccgcgggccccgcgagcgggagtgggacccagcccctaggcagaacccaggcgccgcgcccgggacgcccgcggagagagccactcccgcccacgtcccatttcgcccctcgcgtccggagtccccgtggccagggtttcacttccatcgcccaggctggagtgcaatggcgtgatctgggctcactgcaacctccacctcccaggctcaaatgattctcctgcctcagcctcctgagtagagtagctgggaccacagtcgcatgccatggtgctcggctaatttttttgtattttatttttgtaacgacagggtctcattatgttgcccaggctggtgtcaaacttctgagctcaaatgatctgcctgcgtcagcctcccaaagtgctgggattataggcatgggccactgtgcctggcctcatcttgtcattttaaagaatatatcagcagggattattggacctgcctggtttaaactattgtcttagttaattttgtgctgctctaacaaaatatcacagactgagtaatttataagcaatagtagcttatttggctcacagttctggaggctgagaagatcgtgaggctgcatctggcaagggccttcttgctgcttcataacatggcagaagacatcatgcgggtaagagagagcatgttatacttttgtaacaaacacactggtggtaaggagcccacttcctccataacacattaatccattcgtgagggtagagcctcttaaaagtaccgcctctcagaactgttgtattgaccattaagtttgcagcacatgaactttgggggatacatttaaacaatagcaatgatatatttaaattttatggatacaaccttatggggaaagtattttaaaaaataaattgtgtgtgtgtgtgtaaaaacaggttaaggatctaatgtt

SEQ ID NO: 8112 - protein, 32 aa, Homo sapiens
MPWCSANFFVFYFCNDRVSLCCPGWCQTSELK

SEQ ID NO: 8113 - DNA, 3534 bp, Homo sapiens
accgcttgctgtccctacccccgctgcctgctctggctgtgcctctgccatgagtaataaatgccccctgaagcctccccagaagccaagtaggtgccagtaccaaggttcctgtgcagcctgcagaactgagtcgctcaggagcaagctgtggcaagctggagggagggacacatcccgtgttccatccactccctcccttctcagcagtcctcgcctgttctcacgtgctcacaggcagttaggcagaagtgatccccgtggctctgccaaagacaagcctgttgggttgaaagaagaagaagaagaagaaaaaaaaactcaggcaaagtcacagcctcaaaattgttcactgaaagaagcgtgagtggagaagtgtgagaagatgaatggaccggtggatggcttgtgtgaccactctctaagtgaaggagtcttcatgttcacatcggagtctgtgggagagggacacccggataagatctgtgaccagatcagtgatgcagtgctggatgcccatctcaagcaagaccccaatgccaaggtggcctgtgagacagtgtgcaagaccggcatggtgctgctgtgtggtgagatcacctcaatggccatggtggactaccagcgggtggtgagggacaccatcaagcacatcggctacgatgactcagccaagggctttgacttcaagacttgcaacgtgctggtggctttggagcagcaatccccagatattgcccagtgcgtccatctggacagaaatgaggaggatgtgggggcaggagatcagggtttgatgttcggctatgctaccgacgagacagaggagtgcatgcccctcaccatcatccttgctcacaagctcaacgcccggatggcagacctcaggcgctccggcctcctcccctggctgcggcctgactctaagactcaggtgacagttcagtacatgcaggacaatggcgcagtcatccctgtgcgcatccacaccatcgtcatctctgtgcagcacaacgaagacatcacgctggaggagatgcgcagggccctgaaggagcaagtcatcagggccgtggtgccggccaagtacctggacgaagacaccgtctaccacctgcagcccagtgggcggtttgtcatcggaggtccccagggggatgcgggtgtcactggccgtaagattattgtggacacctatggcggctggggggctcatggtggtggggccttctctgggaaggactacaccaaggtagaccgctcagctgcatatgctgcccgctgggtggccaagtctctggtgaaagcagggctctgccggagagtgcttgtccaggtttcctatgccattggtgtggccgagccgctgtccatttccatcttcacctacggaacctctcagaagacagagcgagagctgctggatgtggtgcataagaacttcgacctccggccgggcgtcattgtcagggatttggacttgaagaagcccatctaccagaagacagcatgctacggccatttcggaagaagcgagttcccatgggaggttcccaggaagcttgtattttagagccagggggagctgggcctggtctcaccctggaggcacctggtggccatgctcctcttccccagacgcctggctgctgatcgccttccccacccaccaaccctcagggcaaagccaggtccctctcatttagcctgtcctgtcatcatcatggccagctggaggcaggggcttcctggtgctggaggttggatcttgatgtaaggatgggcatggtgttctcctgctgctccctcagactggggcaatgttaatttagtggaaaaggcacccccgtcaagagtgaattccctcactcgtctcccccaacagctggaccctgaccagctccccctccctccccttgcctgtgccaggtgaggtcagcacatctcaacaggcctcagggctccttgtgggcctgggctcctggacccccctttcacaggcagccagtgccctgagccagggtctccagaaagccccacccaggccaggcatgtggcaggggttagagcaggactgatgtctcctaagcacctgtaatgtgcgagggacccagctaataactgatctcgttttttcttcactgcaacatgatgaggtagtaccttttatatcccatttatagatgggggaaagcaaagcacagagagtctggataacttccacagggtcccacagccacgtgtttagacctagatgtataactaggagctttgactcaggagcctgtgacataccccctcccccaccgttgtctcatgccagtaacaggctcaaacaatgacaaagcagattcagaaatgaggccatggactctgtcctgaaggcctgaggttactggaaattaggggattaacccactagctcttgttgagccgtgggcaattgtctgaaaagtgaagacagaaccacagggctattttgtttgcttcatgtgtcccagaagatgactgagggtgagttggcttacctggcccatcagggtaggctggagttagggactgaccagcagctttagaatcccagccccctgaccactcagagacatgcagagattgggtttttggacttctggggtaagtggtctaagtccagtccagtcctatctgggcttcctggagcagaagcagcaacttgtcctagcacagatggccagccccttagacagaggccctcaagtctttctctttccctggtcccttgtatcccctgcaggctgagtgcatttggagggagtgagtggccctttcggatccagggaggctggtcctatggcctcatgttaaataggcggggcttgccttctggtgttggacaagcttctgagacgtcatgaggagattctgcctttgccaggtgactgtctggggagcgggtctgctcccaaggggcctgagcagtccttggcctgctaaggtcttggaacttgcctgcctttccatccatggccagcagcacctgccctacctgccccacttgtccttagcctggacctctgacagcagcatctctaccttctccccagctcccaggaccacaggctcaggcaggggcctccatgggccccaggggaacactggggacttggcctctctctagggtacatggtgctgggagaggcagcccaggaagtctcatctggggagcaggcagccagcatctgggccttggcctggagcacaaagaccctggctttcattttctctcaggtgaaaggaaattaaggcaacaaaagaagcccggctcctggtcacctaggaagcctcagattccttcccatggagggagggagtggtttgcaggtggccaagttcctctaacttggctcacactcgacatgaaaattcagaattttatactttccctaccctctagagaaataagatcttttttgtcagtttgtttgtatgaaactaaagcctttatttgttaatagttcctgctaaaacaatgaataaaaactcaaggagcaacta

SEQ ID NO: 8114 - protein, 395 aa, Homo sapiens; identical to SEQ ID NO: 1178

SEQ ID NO: 8115 - DNA, 3668 bp, Homo sapiens
ctcttgctgcagctctcaccgcttgctgtccctacccccgctgcctgctctggctgtgcctctgccatgagtaataaatgccccctgaagcctccccagaagccaagtaggtgccagtaccaaggttcctgtgcagcctgcagaactgccctccttcagtcacccaggctggaatgcagtggcgccatcttgacttattgcaactctgcctcctgggctgaagtgattctcctgcctcagcctcctaagtagctgggactacaggagtcgctcaggagcaagctgtggcaagctggagggagggacacatcccgtgttccatccactccctcccttctcagcagtcctcgcctgttctcacgtgctcacaggcagttaggcagaagtgatccccgtggctctgccaaagacaagcctgttgggttgaaagaagaagaagaagaagaaaaaaaaactcaggcaaagtcacagcctcaaaattgttcactgaaagaagcgtgagtggagaagtgtgagaagatgaatggaccggtggatggcttgtgtgaccactctctaagtgaaggagtcttcatgttcacatcggagtctgtgggagagggacacccggataagatctgtgaccagatcagtgatgcagtgctggatgcccatctcaagcaagaccccaatgccaaggtggcctgtgagacagtgtgcaagaccggcatggtgctgctgtgtggtgagatcacctcaatggccatggtggactaccagcgggtggtgagggacaccatcaagcacatcggctacgatgactcagccaagggctttgacttcaagacttgcaacgtgctggtggctttggagcagcaatccccagatattgcccagtgcgtccatctggacagaaatgaggaggatgtgggggcaggagatcagggtttgatgttcggctatgctaccgacgagacagaggagtgcatgcccctcaccatcatccttgctcacaagctcaacgcccggatggcagacctcaggcgctccggcctcctcccctggctgcggcctgactctaagactcaggtgacagttcagtacatgcaggacaatggcgcagtcatccctgtgcgcatccacaccatcgtcatctctgtgcagcacaacgaagacatcacgctggaggagatgcgcagggccctgaaggagcaagtcatcagggccgtggtgccggccaagtacctggacgaagacaccgtctaccacctgcagcccagtgggcggtttgtcatcggaggtccccagggggatgcgggtgtcactggccgtaagattattgtggacacctatggcggctggggggctcatggtggtggggccttctctgggaaggactacaccaaggtagaccgctcagctgcatatgctgcccgctgggtggccaagtctctggtgaaagcagggctctgccggagagtgcttgtccaggtttcctatgccattggtgtggccgagccgctgtccatttccatcttcacctacggaacctctcagaagacagagcgagagctgctggatgtggtgcataagaacttcgacctccggccgggcgtcattgtcagggatttggacttgaagaagcccatctaccagaagacagcatgctacggccatttcggaagaagcgagttcccatgggaggttcccaggaagcttgtattttagagccagggggagctgggcctggtctcaccctggaggcacctggtggccatgctcctcttccccagacgcctggctgctgatcgccttccccacccaccaaccctcagggcaaagccaggtccctctcatttagcctgtcctgtcatcatcatggccagctggaggcaggggcttcctggtgctggaggttggatcttgatgtaaggatgggcatggtgttctcctgctgctccctcagactggggcaatgttaatttagtggaaaaggcacccccgtcaagagtgaattccctcactcgtctcccccaacagctggaccctgaccagctccccctccctccccttgcctgtgccaggtgaggtcagcacatctcaacaggcctcagggctccttgtgggcctgggctcctggacccccctttcacaggcagccagtgccctgagccagggtctccagaaagccccacccaggccaggcatgtggcaggggttagagcaggactgatgtctcctaagcacctgtaatgtgcgagggacccagctaataactgatctcgttttttcttcactgcaacatgatgaggtagtaccttttatatcccatttatagatgggggaaagcaaagcacagagagtctggataacttccacagggtcccacagccacgtgtttagacctagatgtataactaggagctttgactcaggagcctgtgacataccccctcccccaccgttgtctcatgccagtaacaggctcaaacaatgacaaagcagattcagaaatgaggccatggactctgtcctgaaggcctgaggttactggaaattaggggattaacccactagctcttgttgagccgtgggcaattgtctgaaaagtgaagacagaaccacagggctattttgtttgcttcatgtgtcccagaagatgactgagggtgagttggcttacctggcccatcagggtaggctggagttagggactgaccagcagctttagaatcccagccccctgaccactcagagacatgcagagattgggtttttggacttctggggtaagtggtctaagtccagtccagtcctatctgggcttcctggagcagaagcagcaacttgtcctagcacagatggccagccccttagacagaggccctcaagtctttctctttccctggtcccttgtatcccctgcaggctgagtgcatttggagggagtgagtggccctttcggatccagggaggctggtcctatggcctcatgttaaataggcggggcttgccttctggtgttggacaagcttctgagacgtcatgaggagattctgcctttgccaggtgactgtctggggagcgggtctgctcccaaggggcctgagcagtccttggcctgctaaggtcttggaacttgcctgcctttccatccatggccagcagcacctgccctacctgccccacttgtccttagcctggacctctgacagcagcatctctaccttctccccagctcccaggaccacaggctcaggcaggggcctccatgggccccaggggaacactggggacttggcctctctctagggtacatggtgctgggagaggcagcccaggaagtctcatctggggagcaggcagccagcatctgggccttggcctggagcacaaagaccctggctttcattttctctcaggtgaaaggaaattaaggcaacaaaagaagcccggctcctggtcacctaggaagcctcagattccttcccatggagggagggagtggtttgcaggtggccaagttcctctaacttggctcacactcgacatgaaaattcagaattttatactttccctaccctctagagaaataagatcttttttgtcagtttgtttgtatgaaactaaagcctttatttgttaatagttcctgctaaaacaatgaataaaaactcaaggagcaacta

SEQ ID NO: 8116 - protein, 395 aa, Homo sapiens; identical to SEQ ID NO: 1178

SEQ ID NO: 8117 - DNA, 781 bp, Homo sapiens
gttaatgggtacaaaaaaatagaaagaatgaataagacctagtatttgatagcacaacagggtgagtagagtaaaaaataatttaattatacattttaaaagaactaaaagagtataactggattgtttgtaacacaaaggataaatgcttgaggtgatgaatatcccatttaccttgatgtgattattatgcattgcatacctgtatcaaaacatctcatgtaacccacaaatacatacacctactttgtacccacaaaaattaaaaattaattttaaaaaagattcaaggaaaatgtgtgtttggtgcacatgtatttaaatggtctcattttgcatgaggagaaaacttaattacctatgttaagaagcttgatatctcccatgcttttatccattccttcttctggaatctttgccttcctcaagaccagttcatcagtaaaatctagagtaggtcaattgagcctaggatgtcatccagcaacagaaagcttgtcaaaataggaaccatttccatccctaccactgggcctctatgatggtgccctttgggctgagtcagggtctggaagtacactctgctccttgtctcccttggacactcttgcctgggtagatgtgaatgcaggtcatccatgctggggacacagtgcctggaaattgaattcacacagaaatcatatatcgctccagggtacctggaagttttttcctcaaaaatgtacagaactggtatgacaggataacattcttaattaaacatttttaatgaaactat

SEQ ID NO: 8118 - protein, 48 aa, Homo sapiens
MLRSLISPMLLSIPSSGIFAFLKTSSSVKSRVGQLSLGCHPATESLSK

SEQ ID NO: 8119 - DNA, 3042 bp, Homo sapiens
aacgggacgccgctcctgggtggcgagcaggcgcgtgtgtagggacgaagtttcactcttgttgcccaggctggagtgcaatggcacaatctcagctcactgcaacctctgcctcccgggttcaagtgattctcctgcctcagccttccaagtagctgggattacaggagttagaaatggagtcaatatatcttcaaaagcaccttggggcctgtttaactcaaggtcttgcagaagtggcaagagttcgcccagtggatccgatagaatatttagcattgtggatttacaagtataaggaaaatgtgaccatggaacaactgagacaaaaggaaatggccaagctggagcgtgaaagagaattagctctgatggagcaggaaatgatggagaggctcaaagcagaggagctcttacttcagcagcaacagctggcattgcagctagagttggaaatgcaagaaaaggagaggcagagaatacaagaactacagagagctcaagaacaattaggcaaggagatgagaatgaatatggaaaatctagttaggaatgaagatattctacattcagaggaagcaacactagactcaggcaaaacactagctgaaatcagcgatcgttatggagcacctaacttgagcagagtggaagaacttgatgaaccaatgttttctgatgtcagtatcagtgtgttttgtgaaaaaactcgtttttgtttttgtttttgattttttttacttaggtaaagcctagggaaaatgaggctaggccaggattggttggcaaataggccttttgcttcagagaaagaaaatcagttccctggttgcggattatattcctaattggcattctgcccttttgtgaagtgtgtcactggcttatctatatctccgtatctgtgacttcaaaacctcttcaaaatatgttttaaaatcattttgtgaaatatataatctttaaatttggtgtggggggcacgatttttgttctcagtagcaaaccctggaaccaaattaatgccttaatgagaatgcatgcttctccagtatgtaagtacatttgtttatttaagaaacatgccacatcttccatatgccaggcactgtgcctgatgctgtggtgaataaggcagatggctttgaccttatggagtttattgtcaggggagaaacagacaattagatgaacatttaatagtcatggttagtgggaccacataatttattgtccaaaccagtatgcttttgagaatgagagccggatcagcagatgtaagccaggactgtcctggaagaagggtacattttggtcactttaattggtgtacacggacaaggggggacagccagcacagttgaggaacctcagtcagggaaggaagctaatgatttgctactcactggtggcatgggaggctgaggatagtgctccaggcagagagcatggaaggtgtgaagacccagataggagagcgtgtagagggagtgaggcagggaggggtgagagctgaggccagggagaaagcaggggccagaccatgaaagcacttgtcatttctgttcagaggcttagattttatcctgaaggcagtggagactcatatgatgagagctacattttgcaaagaccatctggtaacagtgtggggaagaaaatggagaagtaggtgtcaggagatggcttaggaggtagtaatctaggggacaagatgtcgatggcctgaagtaaatgttgttttcaagagctgttcagaaaatggagctgcacagactcagtgctaattgtttaaagttttattaaaggtcagctatgatttggcactatgcagggagctagaaaatgccaatgaacaaaatggattgggcttctgcccttgggggccgtgggccaatggggaagcttctttgagggacagagtagggagagacctgacctgggctggacaagtcttcctcaggaggtgaagttcaaggaattagcctgagatgagcccagaggaaagagacagcaaaatgctttcaagggactgaagtcatccagtattaatggctaacgtccatggagctaggaaaatggtgtgattttaagctggagaggtggataaaggcagagcacactgggtcttgtatgttgccttagggattttggacttaagtgcagtaggagttattgaaaggacttaaagattcaatctgtgtttttataaggtggagagaggattggtgtggagcaggagtggaaaaagggagaccacttaggaagttattgcactgatccagatgtaagatgactagggttagacagcagagatggagggaactgagtggatttaagattggcttacaggatcagtgcggggcagggtcaggatgaagcctaaatgtcttccttgggctactgagttaagagtgttaacatttgatgagttgatgaacataagaggaagcaggtttttaaaaaatgatggcttcagttgcagagatgttgactctcaggtggctctgagatatgcaggtgaaaacagccaagaacagttgatgttaggaaggggcccaggccggagatataaattcagcagtcatgggcatatgtgctgaatgaagcaaggggattgagtaaggtacctaggagagagtgcagtgtgtgaaggcctgggggctcagggaggaaccattagcaattctaacattgaagggatggccacaggaagaggagcctacaagaaggatgagaatgcatagtaagagaagtagaagaaaggatggaacaataactactttgagaacataatttatggttatattcaatttgagtatcatttgaaatcatctgaaactcccaaaaagtttcattcatgtagtcacatagaagttacctaaagtttatttctttggcttgtgccttttcacagttctaattgtattaaggaatatttactttttgttttgcttttagattgcattaaacattgatcaagatttgtaggaccaaccaacctaagagcaataaatgtttttgtttgtttcaaatttcaaa

SEQ ID NO: 8120 - protein, 184 aa, Homo sapiens
MESIYLQKHLGACLTQGLAEVARVRPVDPIEYLALWIYKYKENVTMEQLRQKEMAKLERERELALMEQEMMERLKAEELLLQQQQLALQLELEMQEKERQRIQELQRAQEQLGKEMRMNMENLVRNEDILHSEEATLDSGKTLAEISDRYGAPNLSRVEELDEPMFSDVSISVFCEKTRFCFCF

SEQ ID NO: 8121 - DNA, 747 bp, Homo sapiens
gctcctgggtggcgagcaggcgcgtgtgtagggacgaagtttcactcttgttgcccaggctggagtgcaatggcacaatctcagctcactgcaacctctgcctcccgggttcaagtgattctcctgcctcagccttccaagtagctgggattacaggagttagaaatggagtcaatatatcttcaaaagcaccttggggcctgtttaactcaaggtcttgcagaagtggcaagagttcgcccagtggatccgatagaatatttagcattgtggatttacaagtataaggaaaatgtgaccatggaacaactgagacaaaaggaaatggccaagctggagcgtgaaagagaattagctctgatggagcaggaaatgatggagaggctcaaagcagaggagctcttacttcagcagcaacagctggcattgcagctagagttggaaatgcaagaaaaggagaggcagagaatacaagaactacagagagctcaagaacaattaggcaaggagatgagaatgaatatggaaaatctagttaggaatgaagatattctacattcagaggaagcaacactagactcaggcaaaacactagctgaaatcagcgatcgttatggagcacctaacttgagcagagtggaagaacttgatgaaccaatgttttctgatattgcattaaacattgatcaagatttgtaggaccaaccaacctaagagcaataaatgtttttgtttgtttcaaatttc

SEQ ID NO: 8122 - protein, 177 aa, Homo sapiens; identical to SEQ ID NO: 1180

SEQ ID NO: 8123 - DNA, 612 bp, Homo sapiens
cgggacgccgctcctgggtggcgagcaggcgcgtgtgtaggggagttagaaatggagtcaatatatcttcaaaagcaccttggggcctgtttaactcaaggtcttgcagaagtggcaagagttcgcccagtggatccgatagaatatttagcattgtggatttacaagtataaggaaaatgtgaccatggaacaactgagacaaaaggaaatggccaagctggagcgtgaaagagaattagctctgatggagcaggaaatgatggagaggctcaaagcagaggagctcttacttcagcagcaacagctggcattgcagctagagttggaaatgcaagaaaaggagaggcagagaatacaagaactacagagagctcaagaacaattaggcaaggagatgagaatgaatatggaaaatctagttaggaatgaagatattctacattcagaggaagcaacactagactcaggcaaaacactagctgaaatcagcgatcgttatggagcacctaacttgagcagagtggaagaacttgatgaaccaatgttttctgatattgcattaaacattgatcaagatttgtaggaccaaccaacctaagagcaataaatg

SEQ ID NO: 8124 - protein, 177 aa, Homo sapiens; identical to SEQ ID NO: 1180

SEQ ID NO: 8125 - DNA, 895 bp, Homo sapiens
tgctgccaccatgtaagaagtgcctttcgcctcccaccatgattctgagacctccccagcaatgtggaactgctgccaggatggaaactaactacctgaagaggtgctttggaaattgcctggcccaggcactggcagaggtggcgaaggttcggcccagtgacccaatagaatacctggctcactggctttatcattacaggaaaacagcaaaagcaaaagaagagaatagggaaaagaagatccacctgcaggaggaatatgacagtagcctcaaggaaatggaaatgacagaaatgctgaaacaggaagagtatcagattcaacagaactgtgaaaagtgtcacaaggaactgacttctgaaactgtttccacgaagaagaccatattcatgcaggaggacacaaacccccttgagaaggaggccttgaagcaggaattcctgccaggtacttccagtctgattccaggaatgcctcaacaggttcctccttcagagtctgctggccagattgaccagaacttcaaaatgccacaagaaataaattacaaggaggcttttcagcatgaagttgctcatgaaatgcctcctggctccaaatctcctttttaggttacagaaggtagatgcttctgatttacttctctcaaagctagaagccaagaaaatggccagctagaaccaagatttaaggggctgtaaaaggcaagttcagggactctccagcctactccttttctgaaaaacccttaatcatgtgaacatttgaactagttataggataaaataaactcagaataaggatttaaaataagtaaccaagtggctgtgactttttcctcttgttttatcaacgttttggagactacacaatgaaaacacatctgttgggg

SEQ ID NO: 8126 - protein, 191 aa, Homo sapiens
MILRPPQQCGTAARMETNYLKRCFGNCLAQALAEVAKVRPSDPIEYLAHWLYHYRKTAKAKEENREKKIHLQEEYDSSLKEMEMTEMLKQEEYQIQQNCEKCHKELTSETVSTKKTIFMQEDTNPLEKEALKQEFLPGTSSLIPGMPQQVPPSESAGQIDQNFKMPQEINYKEAFQHEVAHEMPPGSKSPF

SEQ ID NO: 8127 - DNA, 2254 bp, Homo sapiens
tgctgccaccatgtaagaagtgcctttcgcctcccaccatgattctgagacctccccagcaatgtggaactaaggagattcctacttaccagttgttccatggtcacattttccttatacttgtaaatccacaatgctaaatattctatcggatccactgggcgaactcttgccacttctgcaagaccttgagttaaacaggccccaaggtgcttttgaagatatattgactccatttctaactcctaaaaagcatcttggctcaacataagaaagccctttcccacagaaacagctgcctccagcgtgaagaaggtgccacagagatggaaggagattccttacccacacctgggagacagctagccagccagccagccaactgggcgggggcacccgggcaggggtgccagatacagtattgtatctggcaacctcccggggcgctcagtgtggttttcccacccgggagtctggaagggtctcccgcagcccgcaggagacgcagcgctccccgctcagggggagcaggaggacagctggccgctttcgggagccccaggcgcgaagcggcctctctccgcctcaggctgccaggatggaaactaactacctgaagaggtgctttggaaattgcctggcccaggcactggcagaggtggcgaaggttcggcccagtgacccaatagaatacctggctcactggctttatcattacaggaaaacagcaaaagcaaaagaagagaatagggaaaagaagatccacctgcaggaggaatatgacagtagcctcaaggaaatggaaatgacagaaatgctgaaacaggaagagtatcagattcaacagaactgtgaaaagtgtcacaaggaactgacttctgaaactgtttccacgaagaagaccatattcatgcaggaggacacaaacccccttgagaaggaggccttgaagcaggaattcctgccaggtacttccagtctgattccaggaatgcctcaacaggttcctccttcagagtctgctggccagattgaccagaacttcaaaatgccacaagaaataaattacaaggaggcttttcagcatgaagttgctcatgaaatgcctcctggctccaaatctcctttttaggttacagaaggtagatgcttctgatttacttctctcaaagctagaagccaagaaaatggccagctagaaccaagatttaaggggctgtaaaaggcaagttcagggactctccagcctactccttttctgaaaaacccttaatcatgtgaacatttgaactagttataggataaaataaactcagaataaggatttaaaataagtaaccaagtggctgtgactttttcctcttgttttatcaacgttttggagactacacaatgaaaacacatctgttggggtgatcagacccaacacccggccatgggggctacaaagtccagccgagtcaaaggaaagagaaaagacaagtcaagagagaaagtgggaccagggggccaatgctagtatggaggctgtgaagtccccaagctctggaagcccacactatttgttggtgatcaaacaaagaaacaggtgatgaggatgtgggagttgaaagaaagtggtgtatcaagcgaatgaactacagctgtgagggtttagcattttctttgaaacatatggctacttgagataatgggagtgctagaagcaaggagccagcaagtctggacacattacaaaggccacaaggggttttatcctggaccccggacatgttccaagccctgcctcaacttttctcccaacactaagctttcctcccaacacacatccatctcgtgtgttcatgtcttaacttttgcttcacttcacagtcaggcctctccgagtattttttacacatatcctggagtctacctatgtcactgatagcagatatttttcttcaacatatattatcaatgttttaatacttttcttcaattttagtaactggtaaaatacatgtaagatgtaccatcttaaccatttttaagtgtacagatcagttgtattaagtagattcatattcttgtgcaaccatcatcaccatccggctgcaaaactctttcatcttgcaaaactgaaactctacacccattaaaaaataactcgccatttctctctctccccagcccctggcaaccaccattctttctgtctctgtgatttagattactctgtaagtatgttgtataaatagactcatacaatgtt

SEQ ID NO: 8128 - protein, 177 aa, Homo sapiens; identical to SEQ ID NO: 1182

SEQ ID NO: 8129 - DNA, 1104 bp, Homo sapiens
aagaagtgcctttcgcctcccaccatgattctgagacctccccagcaatgtggaactaaacagctgcctccagcgtgaagaaggtgccacagagatggaaggagattccttacccacacctgggagacagctagccagccagccagccaactgggcgggggcacccgggcaggggtgccagatacagtattgtatctggcaacctcccggggcgctcagtgtggttttcccacccgggagtctggaagggtctcccgcagcccgcaggagacgcagcgctccccgctcagggggagcaggaggacagctggccgctttcgggagccccaggcgcgaagcggcctctctccgcctcaggctgccaggatggaaactaactacctgaagaggtgctttggaaattgcctggcccaggcactggcagaggtggcgaaggttcggcccagtgacccaatagaatacctggctcactggctttatcattacaggaaaacagcaaaagcaaaagaagagaatagggaaaagaagatccacctgcaggaggaatatgacagtagcctcaaggaaatggaaatgacagaaatgctgaaacaggaagagtatcagattcaacagaactgtgaaaagtgtcacaaggaactgacttctgaaactgtttccacgaagaagaccatattcatgcaggaggacacaaacccccttgagaaggaggccttgaagcaggaattcctgccaggtacttccagtctgattccaggaatgcctcaacaggttcctccttcagagtctgctggccagattgaccagaacttcaaaatgccacaagaaataaattacaaggaggcttttcagcatgaagttgctcatgaaatgcctcctggctccaaatctcctttttaggttacagaaggtagatgcttctgatttacttctctcaaagctagaagccaagaaaatggccagctagaaccaagatttaaggggctgtaaaaggcaagttcagggactctccagcctactccttttctgaaaaacccttaatcatgtgaacatttgaactagttataggataaaataaactcagaataaggatttaaaataagt

SEQ ID NO: 8130 - protein, 177 aa, Homo sapiens; identical to SEQ ID NO: 1182

SEQ ID NO: 8131 - DNA, 1230 bp, Homo sapiens
aagaagtgcctttcgcctcccaccatgattctgagacctccccagcaatgtggaactaaacagctgcctccagcgtgaagaaggtgccacagagatggaaggagattccttacccacacctgggagacagctagccagccagccagccaactgggcgggggcacccgggcaggggtgccagatacagtattgtatctggcaacctcccggggcgctcagtgtggttttcccacccgggagtctggaagggtctcccgcagcccgcaggagacgcagcgctccccgctcagggggagcaggaggacagctggccgctttcgggagccccaggcgcgaagcggcctctctccgcctcaggctgccaggatggaaactaactacctgaagaggtgctttggaaattgcctggcccaggcactggcagaggtggcgaaggttcggcccagtgacccaatagaatacctggctcactggctttatcattacaggaaaacagcaaaagcaaaagaagagaatagggaaaagaagatccacctgcaggaggaatatgacagtagcctcaaggaaatggaaatgacagaaatgctgaaacaggaagagtatcagattcaacagaactgtgaaaagtgtcacaaggaactgacttctgaaactgtttccacgaagaagaccatattcatgcaggaggacacaaacccccttgagaaggaggccttgaagcaggaattcctgccaggtacttccagtctgattccaggaatgcctcaacaggttcctccttcagagtctgctggccagattgaccagaacttcaaaatgccacaagaaataaattacaaggaggcttttcagcatgaagttgctcatgaaatgcctcctggctccaaatctcctttttaggttacagaaggtagatgcttctgatttacttctctcaaagctagaagccaagaaaatggccagctagaaccaagatttaaggggctgtaaaaggcaagttcagggactctccagcctactccttttctgaaaaacccttaatcatgtgaacatttgaactagttataggataaaataaactcagaataaggatttaaaataagtaaccaagtggctgtgactttttcctcttgttttatcaacgttttggagactacacaatgaaaacacatctgttggggtgatcagacccaacacccggccatgggggctacaaagtccagccgagtc

SEQ ID NO: 8132 - protein, 177 aa, Homo sapiens; identical to SEQ ID NO: 1182

SEQ ID NO: 8133 - DNA, 798 bp, Homo sapiens
tgcctttcgcctcccaccatgattctgagacctccccagcaatgtggaactgctgccaggatggaaactaactacctgaagaggtgctttggaaattgcctggcccaggcactggcagaggtggcgaaggttcggcccagtgacccaatagaatacctggctcactggctttatcattacaggaaaacagcaaaagcaaaagaagagaatagggaaaagaagatccacctgcaggaggaatatgacagtagcctcaaggaaatggaaatgacagaaatgctgaaacaggaagagtatcagattcaacagaactgtgaaaagtgtcacaaggaactgacttctgaaactgtttccacgaagaagaccatattcatgcaggaggacacaaacccccttgagaaggaggccttgaagcaggaattcctgccaggtacttccagtctgattccaggaatgcctcaacaggttcctccttcagagtctgctggccagattgaccagaacttcaaaatgccacaagaaataaattacaaggaggcttttcagcatgaagttgctcatgaaatgcctcctggctccaaatctcctttttaggttacagaaggtagatgcttctgatttacttctctcaaagctagaagccaagaaaatggccagctagaaccaagatttaaggggctgtaaaaggcaagttcagggactctccagcctactccttttctgaaaaacccttaatcatgtgaacatttgaactagttataggataaaataaactcagaataaggatttaaaataagt

SEQ ID NO: 8134 - protein, 191 aa, Homo sapiens; identical to SEQ ID NO: 8126

SEQ ID NO: 8135 - DNA, 806 bp, Homo sapiens
gagctcgcgcctcaggagccagtgtaggcgccgcaaagcggaaggggcgcgcggataggctgccaggatggaaactaactacctgaagaggtgctttggaaattgcctggcccaggcactggcagaggtggcgaaggttcggcccagtgacccaatagaatacctggctcactggctttatcattacaggaaaacagcaaaagcaaaagaagagaatagggaaaagaagatccacctgcaggaggaatatgacagtagcctcaaggaaatggaaatgacagaaatgctgaaacaggaagagtatcagattcaacagaactgtgaaaagtgtcacaaggaactgacttctgaaactgtttccacgaagaagaccatattcatgcaggaggacacaaacccccttgagaaggaggccttgaagcaggaattcctgccaggtacttccagtctgattccaggaatgcctcaacaggttcctccttcagagtctgctggccagattgaccagaacttcaaaatgccacaagaaataaattacaaggaggcttttcagcatgaagttgctcatgaaatgcctcctggctccaaatctcctttttaggttacagaaggtagatgcttctgatttacttctctcaaagctagaagccaagaaaatggccagctagaaccaagatttaaggggctgtaaaaggcaagttcagggactctccagcctactccttttctgaaaaacccttaatcatgtgaacatttgaactagttataggataaaataaactcagaataaggatttaaaataagta

SEQ ID NO: 8136 - protein, 177 aa, Homo sapiens; identical to SEQ ID NO: 1182

SEQ ID NO: 8137 - DNA, 902 bp, Homo sapiens
agagctcccagtgtgccaagcgtgggcggtatacagtaaacaaagacaacccctattcttatcaccttgcctactgagtgcaagtccaggaactgtgtaagcagaccctcagaggagctctgggaaacactgaaaaatagcctctccccccattggctgccaggatggaaactaactacctgaagaggtgctttggaaattgcctggcccaggcactggcagaggtggcgaaggttcggcccagtgacccaatagaatacctggctcactggctttatcattacaggaaaacagcaaaagcaaaagaagagaatagggaaaagaagatccacctgcaggaggaatatgacagtagcctcaaggaaatggaaatgacagaaatgctgaaacaggaagagtatcagattcaacagaactgtgaaaagtgtcacaaggaactgacttctgaaactgtttccacgaagaagaccatattcatgcaggaggacacaaacccccttgagaaggaggccttgaagcaggaattcctgccaggtacttccagtctgattccaggaatgcctcaacaggttcctccttcagagtctgctggccagattgaccagaacttcaaaatgccacaagaaataaattacaaggaggcttttcagcatgaagttgctcatgaaatgcctcctggctccaaatctcctttttaggttacagaaggtagatgcttctgatttacttctctcaaagctagaagccaagaaaatggccagctagaaccaagatttaaggggctgtaaaaggcaagttcagggactctccagcctactccttttctgaaaaacccttaatcatgtgaacatttgaactagttataggataaaataaactcagaataaggatttaaaataagt

SEQ ID NO: 8138 - protein, 177 aa, Homo sapiens; identical to SEQ ID NO: 1182

SEQ ID NO: 8139 - DNA, 1820 bp, Homo sapiens
agagctcccagtgtgccaagcgtgggcggtatacagtaaacaaagacaacccctattcttatcaccttgcctactgagtgcaagtccaggaactgtgtaagcagaccctcagaggagctctgggaaacactgaaaaatagcctctccccccattggctgccaggatggaaactaactacctgaagaggtgctttggaaattgcctggcccaggcactggcagaggtggcgaaggttcggcccagtgacccaatagaatacctggctcactggctttatcattacaggaaaacagcaaaagcaaaagaagagaatagggaaaagaagatccacctgcaggaggaatatgacagtagcctcaaggaaatggaaatgacagaaatgctgaaacaggaagagtatcagattcaacagaactgtgaaaagtgtcacaaggaactgacttctgaaactgtttccacgaagaagaccatattcatgcaggaggacacaaacccccttgagaaggaggccttgaagcaggaattcctgccaggtacttccagtctgattccaggaatgcctcaacaggttcctccttcagagtctgctggccagattgaccagaacttcaaaatgccacaagaaataaattacaaggaggcttttcagcatgaagttgctcatgaaatgcctcctggctccaaatctcctttttaggttacagaaggtagatgcttctgatttacttctctcaaagctagaagccaagaaaatggccagctagaaccaagatttaaggggctgtaaaaggcaagttcagggactctccagcctactccttttctgaaaaacccttaatcatgtgaacatttgaactagttataggataaaataaactcagaataaggatttaaaataagtaaccaagtggctgtgactttttcctcttgttttatcaacgttttggagactacacaatgaaaacacatctgttggggtgatcagacccaacacccggccatgggggctacaaagtccagccgagtcaaaggaaagagaaaagacaagtcaagagagaaagtgggaccagggggccaatgctagtatggaggctgtgaagtccccaagctctggaagcccacactatttgttggtgatcaaacaaagaaacaggtgatgaggatgtgggagttgaaagaaagtggtgtatcaagcgaatgaactacagctgtgagggtttagcattttctttgaaacatatggctacttgagataatgggagtgctagaagcaaggagccagcaagtctggacacattacaaaggccacaaggggttttatcctggaccccggacatgttccaagccctgcctcaacttttctcccaacactaagctttcctcccaacacacatccatctcgtgtgttcatgtcttaacttttgcttcacttcacagtcaggcctctccgagtattttttacacatatcctggagtctacctatgtcactgatagcagatatttttcttcaacatatattatcaatgttttaatacttttcttcaattttagtaactggtaaaatacatgtaagatgtaccatcttaaccatttttaagtgtacagatcagttgtattaagtagattcatattcttgtgcaaccatcatcaccatccggctgcaaaactctttcatcttgcaaaactgaaactctacacccattaaaaaataactcgccatttctctctctccccagcccctggcaaccaccattctttctgtctctgtgatttagattactctgtaagtatgttgtataaatagactcatacaatgtt

SEQ ID NO: 8140 - protein, 177 aa, Homo sapiens; identical to SEQ ID NO: 1182

SEQ ID NO: 8141 - DNA, 342 bp, Homo sapiens
aggaactgacttctgaaactgtttccacgaagaagaccatattcatgcaggaggacacaaacccccttgagaaggaggccttgaagcaggaattcctgccagcccctggcaaccaccattctttctgtctctgtgatttagattactctgaatcatcctatgaccatagggagaaccatccttaatatgaagccaacacatggataatggcagagaagcaagagaacctcgactgttgatgacatcatgaaaccacaggatcacctcaaggcaactggaattgggttttctgttaacttgcaaatcaaagcttcctaactgaataaagactcagttaatgtt

SEQ ID NO: 8142 - protein, 46 aa, Homo sapiens
MQEDTNPLEKEALKQEFLPAPGNHHSFCLCDLDYSESSYDHRENHP

SEQ ID NO: 8143 - DNA, 1356 bp, Homo sapiens
tgcccagactggtcttgaactcctgggctcaagcgatcctcccaaagccctgagattacaggcgtgagccagcgcgccggacacaacctcctactttcatgaaagagtgggcacttccaacaggaggaaaatgtctttcctccaggacccaagtttcttcaccatggggatgtggtccattggtgcaggagccctgggggctgctgccttggcattgctgcttgccaacacagacgtgtttctgtccaagccccagaaagcggccctggagtacctggaggatatagacctgaaaacactggagaaggaaccaaggactttcaaagcaaaggagctatgggaaaaaaatggagctgtgattatggccgtgcggaggccaggctgtttcctctgtcgagaggaagctgcggatctgtcctccctgaaaagcatgttggaccagctgggcgtccccctctatgcagtggtaaaggagcacatcaggactgaagtgaaggatttccagccttatttcaaaggagaaatcttcctggatgaaaagaaaaagttctatggtccacaaaggcggaagatgatgtttatgggatttatccgtctgggagtgtggtacaacttcttccgagcctggaacggaggcttctctggaaacctggaaggagaaggcttcatccttgggggagttttcgtggtgggatcaggaaagcagggcattcttcttgagcaccgagaaaaagaatttggagacaaagtaaacctactttctgttctggaagctgctaagatgatcaaaccacagactttggcctcagagaaaaaatgattgtgtgaaactgcccagctcagggataaccagggacattcacctgtgttcatgggatgtattgtttccactcgtgtccctaaggagtgagaaacccatttatactctactctcagtatggattattaatgtattttaatattctgtttaggcccactaaggcaaaatagccccaaaacaagactgacaaaaatctgaaaaactaatgaggattattaagctaaaacctgggaaataggaggcttaaaattgactgccaggctgggtgcagtggctcacacctgtaatcccagcactttgggaggccaaggtgagcaagtcacttgaggtcgggagttcgagaccagcctgagcaacatggcgaaaccccgtctctactaaaaatacaaaaatcacccgggtgtggtggcaggcacctgtagtcccagctacccgggaggctgaggcaggagaatcacttgaacctgggaggtggaggttgcggtgagctgagatcacaccactgtattccagcctgggtgactgagactctaact

SEQ ID NO: 8144 - protein, 229 aa, Homo sapiens; identical to SEQ ID NO: 1184

SEQ ID NO: 8145 - DNA, 1717 bp, Homo sapiens
tgcccagactggtcttgaactcctgggctcaagcgatcctcccaaagccctgagattacaggcgtgagccagcgcgccggacacaacctcctactttcatgaaagagtgggcacttccaacaggaggaaaatgtctttcctccaggacccaagtttcttcaccatggggatgtggtccattggtgcaggagccctgggggctgctgccttggcattgctgcttgccaacacagacgtgtttctgtccaagccccagaaagcggccctggagtacctggaggatatagacctgaaaacactggagaaggaaccaaggactttcaaagcaaaggagctatgggaaaaaaatggagctgtgattatggccgtgcggaggccaggctgtttcctctgtcgagaggaagctgcggatctgtcctccctgaaaagcatgttggaccagctgggcgtccccctctatgcagtggtaaaggagcacatcaggactgaagtgaaggatttccagccttatttcaaaggagaaatcttcctggatgaaaagaaaaagttctatggtccacaaaggcggaagatgatgtttatgggatttatccgtctgggagtgtggtacaacttcttccgagcctggaacggaggcttctctggaaacctggaaggagaaggcttcatccttgggggagttttcgtggtgggatcaggaaagcagggcattcttcttgagcaccgagaaaaagaatttggagacaaagtaaacctactttctgttctggaagctgctaagatgatcaaaccacagactttggcctcagagaaaaaatgattgtgtgaaactgcccagctcagggataaccagggacattcacctgtgttcatgggatgtattgtttccactcgtgtccctaaggagtgagaaacccatttatactctactctcagtatggattattaatgtattttaatattctgtttaggcccactaaggcaaaatagccccaaaacaagactgacaaaaatctgaaaaactaatgaggattattaagctaaaacctgggaaataggaggcttaaaattgactgccaggctgggtgcagtggctcacacctgtaatcccagcactttgggaggccaaggtgagcaagtcacttgaggtcgggagttcgagaccagcctgagcaacatggcgaaaccccgtctctactaaaaatacaaaaatcacccgggtgtggtggcaggcacctgtagtcccagctacccgggaggctgaggcaggagaatcacttgaacctgggaggtggaggttgcggtgagctgagatcacaccactgtattccagcctgggtgactgagactctaactaaaaaaaaaaaaaaaaaaaaattgattgctgtgcctcattacaaatgcatatgatgtttgagtgctgttgtttgaaattatttttcttttcgggtcttcaaaaattcaagaaaagttgatgattgacttgaagattacaaaatttaaggttttttggcatgtgtgttttctattaataattggttatatgatgtcaaagtaatactttcataatagaattgacatgctctgggatagtttgacaaaggtaaattataaagtgaaatctcttgtttcattatcttccattctaacctcagagatctgtttctctagaaaaaatgtccatctctggctttaataaaattatgcatcagaaatc

SEQ ID NO: 8146 - protein, 229 aa, Homo sapiens; identical to SEQ ID NO: 1184

SEQ ID NO: 8147 - DNA, 3460 bp, Homo sapiens
tgcccagactggtcttgaactcctgggctcaagcgatcctcccaaagccctgagattacaggcgtgagccagcgcgccggacacaacctcctactttcatgaaagagtgggcacttccaacaggaggaaaatgtctttcctccaggacccaagtttcttcaccatggggatgtggtccattggtgcaggagccctgggggctgctgccttggcattgctgcttgccaacacagacgtgtttctgtccaagccccagaaagcggccctggagtacctggaggatatagacctgaaaacactggagaaggaaccaaggactttcaaagcaaaggagctatgggaaaaaaatggagctgtgattatggccgtgcggaggccaggctgtttcctctgtcgagaggaagctgcggatctgtcctccctgaaaagcatgttggaccagctgggcgtccccctctatgcagtggtaaaggagcacatcaggactgaagtgaaggatttccagccttatttcaaaggagaaatcttcctggatgaaaagaaaaagttctatggtccacaaaggcggaagatgatgtttatgggatttatccgtctgggagtgtggtacaacttcttccgagcctggaacggaggcttctctggaaacctggaaggagaaggcttcatccttgggggagttttcgtggtgggatcaggaaagcagggcattcttcttgagcaccgagaaaaagaatttggagacaaagtaaacctactttctgttctggaagctgctaagatgatcaaaccacagactttggcctcagagaaaaaatgattgtgtgaaactgcccagctcagggataaccagggacattcacctgtgttcatgggatgtattgtttccactcgtgtccctaaggagtgagaaacccatttatactctactctcagtatggattattaatgtattttaatattctgtttaggcccactaaggcaaaatagccccaaaacaagactgacaaaaatctgaaaaactaatgaggattattaagctaaaacctgggaaataggaggcttaaaattgactgccaggctgggtgcagtggctcacacctgtaatcccagcactttgggaggccaaggtgagcaagtcacttgaggtcgggagttcgagaccagcctgagcaacatggcgaaaccccgtctctactaaaaatacaaaaatcacccgggtgtggtggcaggcacctgtagtcccagctacccgggaggctgaggcaggagaatcacttgaacctgggaggtggaggttgcggtgagctgagatcacaccactgtattccagcctgggtgactgagactctaactaaaaaaaaaaaaaaaaaaaaattgattgctgtgcctcattacaaatgcatatgatgtttgagtgctgttgtttgaaattatttttcttttcgggtcttcaaaaattcaagaaaagttgatgattgacttgaagattacaaaatttaaggttttttggcatgtgtgttttctattaataattggttatatgatgtcaaagtaatactttcataatagaattgacatgctctgggatagtttgacaaaggtaaattataaagtgaaatctcttgtttcattatcttccattctaacctcagagatctgtttctctagaaaaaatgtccatctctggctttaataaaattatgcatcagaaatcacctgtatgtataagattttctgataaaactaataattatatttaccatataattggctgaaagtaaaaaaagtcagcattctccatggctgaggggtaaagtgcctcgggggattcctctggttctagctatctaagtggtttgaaaatgaccaggaaaaattcatcctgtcattcacgttagtaattttgctgtctttcctagaggaatgactttggtgtttaaaattggtagctgtttttctattggtcttttagcctaatttggcaaatcagaagaaaggacatagagatgatgaaatataactttatcttttttgtttgaattttgtcgtgtaagtttgagtgacatcatcaagacctaccagggagctcggccacagggagtctactcaaggcatcaaactggcccaggagtagaaaggtgggggtggaaataggaaatagtgtttacccaggggactggcccagccaggaggagaaaggaatcagtgtttacccaggaaagcaagaatggatactgatgttggaggtaaagctgggaaagtaggagagcatcgggattgagtatgcagagtgagttagggttgagtggttcgggactaagacccactaagaccatgcctgcacctgacttcatgtagcagtggttgcatggggtatgcatgggcccttaaagggctgggcttctgcagcatttgaggccatagcctttggtacttgcacagggttggtacctgtcatccttgggactccagctactgataggataactcagtacctaaacttagaactttaatacctaagacacttgatggtgaaacagttctcttgcaactaaagaagaacctgaggtcaggtgtggtggctcacgcctgtaatcctagcactttgggaagtcgaggtagaaggatcacttgaggtcaggagttcgagaccagcctggccagcatggtgaaaccccatctctactaaaaatacaaaatattagacagacggggtggtacatgcctgtaatcccagctacttgggaggctgaggcaggagaatcgcttgaacccaggaggcagaggttgcagtgagccgagatcgtgccactgcactccagcttgggcaacaagagcgaaactccatatcaaaaaaaaaaacctgagaggacattgcaccaatggagatgcatcaagagaaacatgtttggttttttgtgagctctcaccaacttttttcccctgggtcctcacgtgcagtgtggtcttctctttctgattagcatgtcattttggaaagagcactggattgagtcatgaggcataatcaatttctagtttaccagtgtgatcttaagcaaagatctaactcattggcaaaatgggcgtgattccttcccattcagggctgtttatgataagtcactgagggaatgataaatattatgacactgcttctcagactgtaatgtacatgcacatcacataaggaccttattaaaatggagacttaaaaagctggacgctaaaggcaataatgacagattttactcaataactactgcagaaggagagagtcctcagtatagaactgagcttagctccaatctgtgcagaggtgatggaattttaaagaggggagggaggaggttcaaatagaactagggaagtgcaaaattacaaaaagctggtaaggagattggtcaatgtgattcggctatctgtgtctactaactctcaaatttatttatcaaag

SEQ ID NO: 8148 - protein, 229 aa, Homo sapiens; identical to SEQ ID NO: 1184

SEQ ID NO: 8149 - DNA, 1382 bp, Homo sapiens
cacatggcggtggcgcggtagcgcgcgatgcagcacaggctagaggctgcgcaagcgcggggcccgcccctgggaccctccgggccgggcggtttggccccttagcgcccgggcgtcggggcggtaaaaggccggcagaagggaggcacttgagaaatgtctttcctccaggacccaagtttcttcaccatggggatgtggtccattggtgcaggagccctgggggctgctgccttggcattgctgcttgccaacacagacgtgtttctgtccaagccccagaaagcggccctggagtacctggaggatatagacctgaaaacactggagaaggaaccaaggactttcaaagcaaaggagctatgggaaaaaaatggagctgtgattatggccgtgcggaggccaggctgtttcctctgtcgagaggaagctgcggatctgtcctccctgaaaagcatgttggaccagctgggcgtccccctctatgcagtggtaaaggagcacatcaggactgaagtgaaggatttccagccttatttcaaaggagaaatcttcctggatgaaaagaaaaagttctatggtccacaaaggcggaagatgatgtttatgggatttatccgtctgggagtgtggtacaacttcttccgagcctggaacggaggcttctctggaaacctggaaggagaaggcttcatccttgggggagttttcgtggtgggatcaggaaagcagggcattcttcttgagcaccgagaaaaagaatttggagacaaagtaaacctactttctgttctggaagctgctaagatgatcaaaccacagactttggcctcagagaaaaaatgattgtgtgaaactgcccagctcagggataaccagggacattcacctgtgttcatgggatgtattgtttccactcgtgtccctaaggagtgagaaacccatttatactctactctcagtatggattattaatgtattttaatattctgtttaggcccactaaggcaaaatagccccaaaacaagactgacaaaaatctgaaaaactaatgaggattattaagctaaaacctgggaaataggaggcttaaaattgactgccaggctgggtgcagtggctcacacctgtaatcccagcactttgggaggccaaggtgagcaagtcacttgaggtcgggagttcgagaccagcctgagcaacatggcgaaaccccgtctctactaaaaatacaaaaatcacccgggtgtggtggcaggcacctgtagtcccagctacccgggaggctgaggcaggagaatcacttgaacctgggaggtggaggttgcggtgagctgagatcacaccactgtattccagcctgggtgactgagactctaact

SEQ ID NO: 8150 - protein, 229 aa, Homo sapiens; identical to SEQ ID NO: 1184

SEQ ID NO: 8151 - DNA, 1743 bp, Homo sapiens
cacatggcggtggcgcggtagcgcgcgatgcagcacaggctagaggctgcgcaagcgcggggcccgcccctgggaccctccgggccgggcggtttggccccttagcgcccgggcgtcggggcggtaaaaggccggcagaagggaggcacttgagaaatgtctttcctccaggacccaagtttcttcaccatggggatgtggtccattggtgcaggagccctgggggctgctgccttggcattgctgcttgccaacacagacgtgtttctgtccaagccccagaaagcggccctggagtacctggaggatatagacctgaaaacactggagaaggaaccaaggactttcaaagcaaaggagctatgggaaaaaaatggagctgtgattatggccgtgcggaggccaggctgtttcctctgtcgagaggaagctgcggatctgtcctccctgaaaagcatgttggaccagctgggcgtccccctctatgcagtggtaaaggagcacatcaggactgaagtgaaggatttccagccttatttcaaaggagaaatcttcctggatgaaaagaaaaagttctatggtccacaaaggcggaagatgatgtttatgggatttatccgtctgggagtgtggtacaacttcttccgagcctggaacggaggcttctctggaaacctggaaggagaaggcttcatccttgggggagttttcgtggtgggatcaggaaagcagggcattcttcttgagcaccgagaaaaagaatttggagacaaagtaaacctactttctgttctggaagctgctaagatgatcaaaccacagactttggcctcagagaaaaaatgattgtgtgaaactgcccagctcagggataaccagggacattcacctgtgttcatgggatgtattgtttccactcgtgtccctaaggagtgagaaacccatttatactctactctcagtatggattattaatgtattttaatattctgtttaggcccactaaggcaaaatagccccaaaacaagactgacaaaaatctgaaaaactaatgaggattattaagctaaaacctgggaaataggaggcttaaaattgactgccaggctgggtgcagtggctcacacctgtaatcccagcactttgggaggccaaggtgagcaagtcacttgaggtcgggagttcgagaccagcctgagcaacatggcgaaaccccgtctctactaaaaatacaaaaatcacccgggtgtggtggcaggcacctgtagtcccagctacccgggaggctgaggcaggagaatcacttgaacctgggaggtggaggttgcggtgagctgagatcacaccactgtattccagcctgggtgactgagactctaactaaaaaaaaaaaaaaaaaaaaattgattgctgtgcctcattacaaatgcatatgatgtttgagtgctgttgtttgaaattatttttcttttcgggtcttcaaaaattcaagaaaagttgatgattgacttgaagattacaaaatttaaggttttttggcatgtgtgttttctattaataattggttatatgatgtcaaagtaatactttcataatagaattgacatgctctgggatagtttgacaaaggtaaattataaagtgaaatctcttgtttcattatcttccattctaacctcagagatctgtttctctagaaaaaatgtccatctctggctttaataaaattatgcatcagaaatc

SEQ ID NO: 8152 - protein, 229 aa, Homo sapiens; identical to SEQ ID NO: 1184

SEQ ID NO: 8153 - DNA, 3486 bp, Homo sapiens
cacatggcggtggcgcggtagcgcgcgatgcagcacaggctagaggctgcgcaagcgcggggcccgcccctgggaccctccgggccgggcggtttggccccttagcgcccgggcgtcggggcggtaaaaggccggcagaagggaggcacttgagaaatgtctttcctccaggacccaagtttcttcaccatggggatgtggtccattggtgcaggagccctgggggctgctgccttggcattgctgcttgccaacacagacgtgtttctgtccaagccccagaaagcggccctggagtacctggaggatatagacctgaaaacactggagaaggaaccaaggactttcaaagcaaaggagctatgggaaaaaaatggagctgtgattatggccgtgcggaggccaggctgtttcctctgtcgagaggaagctgcggatctgtcctccctgaaaagcatgttggaccagctgggcgtccccctctatgcagtggtaaaggagcacatcaggactgaagtgaaggatttccagccttatttcaaaggagaaatcttcctggatgaaaagaaaaagttctatggtccacaaaggcggaagatgatgtttatgggatttatccgtctgggagtgtggtacaacttcttccgagcctggaacggaggcttctctggaaacctggaaggagaaggcttcatccttgggggagttttcgtggtgggatcaggaaagcagggcattcttcttgagcaccgagaaaaagaatttggagacaaagtaaacctactttctgttctggaagctgctaagatgatcaaaccacagactttggcctcagagaaaaaatgattgtgtgaaactgcccagctcagggataaccagggacattcacctgtgttcatgggatgtattgtttccactcgtgtccctaaggagtgagaaacccatttatactctactctcagtatggattattaatgtattttaatattctgtttaggcccactaaggcaaaatagccccaaaacaagactgacaaaaatctgaaaaactaatgaggattattaagctaaaacctgggaaataggaggcttaaaattgactgccaggctgggtgcagtggctcacacctgtaatcccagcactttgggaggccaaggtgagcaagtcacttgaggtcgggagttcgagaccagcctgagcaacatggcgaaaccccgtctctactaaaaatacaaaaatcacccgggtgtggtggcaggcacctgtagtcccagctacccgggaggctgaggcaggagaatcacttgaacctgggaggtggaggttgcggtgagctgagatcacaccactgtattccagcctgggtgactgagactctaactaaaaaaaaaaaaaaaaaaaaattgattgctgtgcctcattacaaatgcatatgatgtttgagtgctgttgtttgaaattatttttcttttcgggtcttcaaaaattcaagaaaagttgatgattgacttgaagattacaaaatttaaggttttttggcatgtgtgttttctattaataattggttatatgatgtcaaagtaatactttcataatagaattgacatgctctgggatagtttgacaaaggtaaattataaagtgaaatctcttgtttcattatcttccattctaacctcagagatctgtttctctagaaaaaatgtccatctctggctttaataaaattatgcatcagaaatcacctgtatgtataagattttctgataaaactaataattatatttaccatataattggctgaaagtaaaaaaagtcagcattctccatggctgaggggtaaagtgcctcgggggattcctctggttctagctatctaagtggtttgaaaatgaccaggaaaaattcatcctgtcattcacgttagtaattttgctgtctttcctagaggaatgactttggtgtttaaaattggtagctgtttttctattggtcttttagcctaatttggcaaatcagaagaaaggacatagagatgatgaaatataactttatcttttttgtttgaattttgtcgtgtaagtttgagtgacatcatcaagacctaccagggagctcggccacagggagtctactcaaggcatcaaactggcccaggagtagaaaggtgggggtggaaataggaaatagtgtttacccaggggactggcccagccaggaggagaaaggaatcagtgtttacccaggaaagcaagaatggatactgatgttggaggtaaagctgggaaagtaggagagcatcgggattgagtatgcagagtgagttagggttgagtggttcgggactaagacccactaagaccatgcctgcacctgacttcatgtagcagtggttgcatggggtatgcatgggcccttaaagggctgggcttctgcagcatttgaggccatagcctttggtacttgcacagggttggtacctgtcatccttgggactccagctactgataggataactcagtacctaaacttagaactttaatacctaagacacttgatggtgaaacagttctcttgcaactaaagaagaacctgaggtcaggtgtggtggctcacgcctgtaatcctagcactttgggaagtcgaggtagaaggatcacttgaggtcaggagttcgagaccagcctggccagcatggtgaaaccccatctctactaaaaatacaaaatattagacagacggggtggtacatgcctgtaatcccagctacttgggaggctgaggcaggagaatcgcttgaacccaggaggcagaggttgcagtgagccgagatcgtgccactgcactccagcttgggcaacaagagcgaaactccatatcaaaaaaaaaaacctgagaggacattgcaccaatggagatgcatcaagagaaacatgtttggttttttgtgagctctcaccaacttttttcccctgggtcctcacgtgcagtgtggtcttctctttctgattagcatgtcattttggaaagagcactggattgagtcatgaggcataatcaatttctagtttaccagtgtgatcttaagcaaagatctaactcattggcaaaatgggcgtgattccttcccattcagggctgtttatgataagtcactgagggaatgataaatattatgacactgcttctcagactgtaatgtacatgcacatcacataaggaccttattaaaatggagacttaaaaagctggacgctaaaggcaataatgacagattttactcaataactactgcagaaggagagagtcctcagtatagaactgagcttagctccaatctgtgcagaggtgatggaattttaaagaggggagggaggaggttcaaatagaactagggaagtgcaaaattacaaaaagctggtaaggagattggtcaatgtgattcggctatctgtgtctactaactctcaaatttatttatcaaag

SEQ ID NO: 8154 - protein, 229 aa, Homo sapiens; identical to SEQ ID NO: 1184

SEQ ID NO: 8155 - DNA, 1422 bp, Homo sapiens
tatacttctttgtcaagagaagcagaggtgtggacgctgtgtatgaaatgtctttcctccaggacccaagtttcttcaccatggggatgtggtccattggtgcaggagccctgggggctgctgccttggcattgctgcttgccaacacagacgtgtttctgtccaagccccagaaagcggccctggagtacctggaggatatagacctgaaaacactggagaagggtaagtggtgacccttcaggtctcagtacttttccaaggagctgggatacaggcttactgctttctttctaaactctctcctttttttaattgaaaagataatataacaacattaggaaaaatttaataacaatttttaaactaggaataattctgttaccctaacacagtaattttgattttggcatattcctttccatgtgtacatattacgtagttgtgcttggcttaggtgctgttttacattttagcttttcttatcaaaagcatttctcattctctgttgttgtctctgtaattataatgataaattgctccataatatttagtaataattacaatcttttactaaaccagtgcttccagagtgtattctgaggaattccaggcttgtgggatcgtcaaactaaaaggagttcctgagtgaacaagtatgggagacaccttttatccaattccatgctcctgatgctcagcacagacatatgcttattagaatgaggtgtctggattgctgctgattcaggcatggccagcccctccctgtgaagaagctgtggtgtctgaggaatcacttcaaggtcacccgttagagcagacctgcctatctccctcttctgggggactgctagaatccattgtggacagcttagagccacacacccaaatgtgttagctctgcctccttgctgtgtgctctcagtgttagagctgtagcttggtgggatttcagtcatgccagtggtgtggcaagagagttggagtggtgaaggtctcattgatggcgtggtcaccatgttagccccccaggtggaagtcatcgtcatctgtttagtaagtaaggaagcttgcgaaaggaaggcaggagattgtgcaggtttatagtaggtcaccttagtaagatactaggagagagagagacctgttaagctttgttcaacccagggtttcccaatcttatttgattacagactcttctccccaccctctcacccacctgaccccattttttttttttccacataacatctacgggaacatggatccctctgggaaatactaaaataattaagggctcatatttattgagccctcaccaactctatattaccagacattgtggtgagcacttttatattcatctttcaatatgccctgtggcccaaagtggagctactagatatttgcattttacaa

SEQ ID NO: 8156 - protein, 53 aa, Homo sapiens
MKCLSSRTQVSSPWGCGPLVQEPWGLLPWHCCLPTQTCFCPSPRKRPWSTWRI

SEQ ID NO: 8157 - DNA, 2209 bp, Homo sapiens
ttctttgtcaagagaagcagaggtgtggacgctgtgtatgaaatgtctttcctccaggacccaagtttcttcaccatggggatgtggtccattggtgcaggagccctgggggctgctgccttggcattgctgcttgccaacacagacgtgtttctgtccaagccccagaaagcggccctggagtacctggaggatatagacctgaaaacactggagaaggaaccaaggactttcaaagcaaaggagctatgggaaaaaaatggagctgtgattatggccgtgcggaggccaggctgtttcctctgtcgagaggtgagtgcagatgaggatctattcagagaaagggatcctggcaagtaggggccattgttttccggccagaaccaagggtcggtaagccagctttagccttttacccacatgttctgttctgttatttgctctaggtatttctttgatttgtgctcttttttttttttttttaaacaactcaccctctcctactggggttagcaacacatctcagtttcccttagtactcccaggcctttcaccctgtgctgtaccttctgagtcctggaccatattccaatttaatcaggggcagtgaccaggtccaattccatgcttctgatgctcagcacagatatatgatgtgcctggattgcttctgattcgggtgtggtcagtccctccctgtgatgaagctgcagtgtcggaggaaacacttcaaggttacctattagagcagacctgcctgtctctctttccttggggagctcttagagtccatcgtggacagctgagagccacattctcacatgttagctctgcctccttgctgtgtgctctcagcattgaatctgtagctcagtgggatttcagtcatgccagtagtgcatttggcatgagagtttgttgaaagttggagctcactgactgggtggtctccaggttggcccctcgaagggaagacatcatctatttgtaggtgatggagcttatcagtggaaggaaggaactgtgattgttgaaacacaaaatgctagtgtgagaaggaacattgccactacttggatctagccttgtccctttataggtaggcaaactgaggaccagagtggttagtggtctgtttgtggtcacacagccagtcagtggcagaagacccagattctgaaattactgccctgcctgggagaaaactgggaatgacagtattcctgctcttgagacaactttgcatctcaagcagtggctgtggccctgtccaaattgtcatcctcattctcctggttcccctccctgaccctgagacaccacctttcagccttgctgatctctccatgcttgtgtggctgggctggtgaagaatccacttgcactgctggatgcatgtgatgcctgcagtaccctacccccagggcactgtgtgcctgctatctcagtgggtcctcaccatagcccttggaaatacagcttgttttactctcattttattattctcattacagaggaggaaacagttacagaggttgtaacaaagccacccggatcggggagatgtattaattttctgttgctgtaacaaattacctcaaactcaatggctttaaccagcacagatttatcttgtagttctagaggtcagaattccaaagcggaatctggttgcattccttctgaagactataggggagaatccatttcttttgccttttccagctgttagaggccacctatgtatattggtttatggccccttcctctatttttaggtcagcaatggctggcaagtcagcaacagcatggaagcctgttttgacttgatttctcggggccattaaaatccagaaggttccaagagcaacagctctccctaattataacctgtttccctctgtactggtctgtgcccacatagaacatttagtggaaacttacgtttccaaaaagatgggtggatggcaatctgagttattttgagtggcccaactaggaggtatgtgactcagtttccacgtcatggctttgtatagtgccacaccaggagtaaagagccaggaaaagtgagtaagacctttcatctcagccaggtgcagtggctcatgcctataatcccagcactttgggaggctgaggtgagaagatcacttgagcccaggaatttgagaccaccctaggcaacatagcgagaccctgtctctac

SEQ ID NO: 8158 - protein, 105 aa, Homo sapiens
MSFLQDPSFFTMGMWSIGAGALGAAALALLLANTDVFLSKPQKAALEYLEDIDLKTLEKEPRTFKAKELWEKNGAVIMAVRRPGCFLCREVSADEDLFRERDPGK

SEQ ID NO: 8159 - DNA, 1821 bp, Homo sapiens
tgaatgaggccctgctgggcactggctgggggcttgatgagtaggatatggtccctgtttttggagggtcgtcaaactaaagaggaaagaagataggggaacaaaacagtgcggttggtgttctaagtatcctctgatcacagaagagaaagctgcccctacccagggacatgatcctgagccacctggattgtgagggagaatcaggcattgatgaggaggggaatgaggaagtagtctgcctacaggggacatagctcggcacagctccacagagctaggggctgcaacttggggcatgagaagagagagcagcaagagaaccatttgagaaggctgtcctttctctgtcatcactcctgatgccctggtgagctccacggtgcaggaacctccatgtgtgtgctgcatccccaagttctggtggcagcaggtgcttagcagcccttgtccagtctcgcctgtgacactgctgctcccttcccctgtcctgacctcctggttggctgtcctgccagagccttgcctggaagatgaaattccagctaccctgtgggagcagtaacgccttcttccttcttctcaatctccagaaatgtctttcctccaggacccaagtttcttcaccatggggatgtggtccattggtgcaggagccctgggggctgctgccttggcattgctgcttgccaacacagacgtgtttctgtccaagccccagaaagcggccctggagtacctggaggatatagacctgaaaacactggagaaggaaccaaggactttcaaagcaaaggagctatgggaaaaaaatggagctgtgattatggccgtgcggaggccaggctgtttcctctgtcgagaggaagctgcggatctgtcctccctgaaaagcatgttggaccagctgggcgtccccctctatgcagtggtaaaggagcacatcaggactgaagtgaaggatttccagccttatttcaaaggagaaatcttcctggatgaaaagaaaaagttctatggtccacaaaggcggaagatgatgtttatgggatttatccgtctgggagtgtggtacaacttcttccgagcctggaacggaggcttctctggaaacctggaaggagaaggcttcatccttgggggagttttcgtggtgggatcaggaaagcagggcattcttcttgagcaccgagaaaaagaatttggagacaaagtaaacctactttctgttctggaagctgctaagatgatcaaaccacagactttggcctcagagaaaaaatgattgtgtgaaactgcccagctcagggataaccagggacattcacctgtgttcatgggatgtattgtttccactcgtgtccctaaggagtgagaaacccatttatactctactctcagtatggattattaatgtattttaatattctgtttaggcccactaaggcaaaatagccccaaaacaagactgacaaaaatctgaaaaactaatgaggattattaagctaaaacctgggaaataggaggcttaaaattgactgccaggctgggtgcagtggctcacacctgtaatcccagcactttgggaggccaaggtgagcaagtcacttgaggtcgggagttcgagaccagcctgagcaacatggcgaaaccccgtctctactaaaaatacaaaaatcacccgggtgtggtggcaggcacctgtagtcccagctacccgggaggctgaggcaggagaatcacttgaacctgggaggtggaggttgcggtgagctgagatcacaccactgtattccagcctgggtgactgagactctaact

SEQ ID NO: 8160 - protein, 229 aa, Homo sapiens; identical to SEQ ID NO: 1184

SEQ ID NO: 8161 - DNA, 1435 bp, Homo sapiens
gcctctgctttccactggagaagacaaggagcctgggctgcagagggaacctgacaccctatgtggaggcccacagccagctgggacagatgtccctgaacccttgtgtcttctacaggaagctgcggatctgtcctccctgaaaagcatgttggaccagctgggcgtccccctctatgcagtggtaaaggagcacatcaggactgaagtgaaggatttccagccttatttcaaaggagaaatcttcctggatgaaaagaaaaagttctatggtccacaaaggcggaagatgatgtttatgggatttatccgtctgggagtgtggtacaacttcttccgagcctggaacggaggcttctctggaaacctggaaggagaaggcttcatccttgggggagttttcgtggtgggatcaggaaagcagggcattcttcttgagcaccgagaaaaagaatttggagacaaagtaaacctactttctgttctggaagctgctaagatgatcaaaccacagactttggcctcagagaaaaaatgattgtgtgaaactgcccagctcagggataaccagggacattcacctgtgttcatgggatgtattgtttccactcgtgtccctaaggagtgagaaacccatttatactctactctcagtatggattattaatgtattttaatattctgtttaggcccactaaggcaaaatagccccaaaacaagactgacaaaaatctgaaaaactaatgaggattattaagctaaaacctgggaaataggaggcttaaaattgactgccaggctgggtgcagtggctcacacctgtaatcccagcactttgggaggccaaggtgagcaagtcacttgaggtcgggagttcgagaccagcctgagcaacatggcgaaaccccgtctctactaaaaatacaaaaatcacccgggtgtggtggcaggcacctgtagtcccagctacccgggaggctgaggcaggagaatcacttgaacctgggaggtggaggttgcggtgagctgagatcacaccactgtattccagcctgggtgactgagactctaactaaaaaaaaaaaaaaaaaaaaattgattgctgtgcctcattacaaatgcatatgatgtttgagtgctgttgtttgaaattatttttcttttcgggtcttcaaaaattcaagaaaagttgatgattgacttgaagattacaaaatttaaggttttttggcatgtgtgttttctattaataattggttatatgatgtcaaagtaatactttcataatagaattgacatgctctgggatagtttgacaaaggtaaattataaagtgaaatctcttgtttcattatcttccattctaacctcagagatctgtttctctagaaaaaatgtccatctctggctttaataaaattatgcatcagaaatc

SEQ ID NO: 8162 - protein, 129 aa, Homo sapiens [sequence omitted]

SEQ ID NO: 8163 - DNA, 3178 bp, Homo sapiens
gcctctgctttccactggagaagacaaggagcctgggctgcagagggaacctgacaccctatgtggaggcccacagccagctgggacagatgtccctgaacccttgtgtcttctacaggaagctgcggatctgtcctccctgaaaagcatgttggaccagctgggcgtccccctctatgcagtggtaaaggagcacatcaggactgaagtgaaggatttccagccttatttcaaaggagaaatcttcctggatgaaaagaaaaagttctatggtccacaaaggcggaagatgatgtttatgggatttatccgtctgggagtgtggtacaacttcttccgagcctggaacggaggcttctctggaaacctggaaggagaaggcttcatccttgggggagttttcgtggtgggatcaggaaagcagggcattcttcttgagcaccgagaaaaagaatttggagacaaagtaaacctactttctgttctggaagctgctaagatgatcaaaccacagactttggcctcagagaaaaaatgattgtgtgaaactgcccagctcagggataaccagggacattcacctgtgttcatgggatgtattgtttccactcgtgtccctaaggagtgagaaacccatttatactctactctcagtatggattattaatgtattttaatattctgtttaggcccactaaggcaaaatagccccaaaacaagactgacaaaaatctgaaaaactaatgaggattattaagctaaaacctgggaaataggaggcttaaaattgactgccaggctgggtgcagtggctcacacctgtaatcccagcactttgggaggccaaggtgagcaagtcacttgaggtcgggagttcgagaccagcctgagcaacatggcgaaaccccgtctctactaaaaatacaaaaatcacccgggtgtggtggcaggcacctgtagtcccagctacccgggaggctgaggcaggagaatcacttgaacctgggaggtggaggttgcggtgagctgagatcacaccactgtattccagcctgggtgactgagactctaactaaaaaaaaaaaaaaaaaaaaattgattgctgtgcctcattacaaatgcatatgatgtttgagtgctgttgtttgaaattatttttcttttcgggtcttcaaaaattcaagaaaagttgatgattgacttgaagattacaaaatttaaggttttttggcatgtgtgttttctattaataattggttatatgatgtcaaagtaatactttcataatagaattgacatgctctgggatagtttgacaaaggtaaattataaagtgaaatctcttgtttcattatcttccattctaacctcagagatctgtttctctagaaaaaatgtccatctctggctttaataaaattatgcatcagaaatcacctgtatgtataagattttctgataaaactaataattatatttaccatataattggctgaaagtaaaaaaagtcagcattctccatggctgaggggtaaagtgcctcgggggattcctctggttctagctatctaagtggtttgaaaatgaccaggaaaaattcatcctgtcattcacgttagtaattttgctgtctttcctagaggaatgactttggtgtttaaaattggtagctgtttttctattggtcttttagcctaatttggcaaatcagaagaaaggacatagagatgatgaaatataactttatcttttttgtttgaattttgtcgtgtaagtttgagtgacatcatcaagacctaccagggagctcggccacagggagtctactcaaggcatcaaactggcccaggagtagaaaggtgggggtggaaataggaaatagtgtttacccaggggactggcccagccaggaggagaaaggaatcagtgtttacccaggaaagcaagaatggatactgatgttggaggtaaagctgggaaagtaggagagcatcgggattgagtatgcagagtgagttagggttgagtggttcgggactaagacccactaagaccatgcctgcacctgacttcatgtagcagtggttgcatggggtatgcatgggcccttaaagggctgggcttctgcagcatttgaggccatagcctttggtacttgcacagggttggtacctgtcatccttgggactccagctactgataggataactcagtacctaaacttagaactttaatacctaagacacttgatggtgaaacagttctcttgcaactaaagaagaacctgaggtcaggtgtggtggctcacgcctgtaatcctagcactttgggaagtcgaggtagaaggatcacttgaggtcaggagttcgagaccagcctggccagcatggtgaaaccccatctctactaaaaatacaaaatattagacagacggggtggtacatgcctgtaatcccagctacttgggaggctgaggcaggagaatcgcttgaacccaggaggcagaggttgcagtgagccgagatcgtgccactgcactccagcttgggcaacaagagcgaaactccatatcaaaaaaaaaaacctgagaggacattgcaccaatggagatgcatcaagagaaacatgtttggttttttgtgagctctcaccaacttttttcccctgggtcctcacgtgcagtgtggtcttctctttctgattagcatgtcattttggaaagagcactggattgagtcatgaggcataatcaatttctagtttaccagtgtgatcttaagcaaagatctaactcattggcaaaatgggcgtgattccttcccattcagggctgtttatgataagtcactgagggaatgataaatattatgacactgcttctcagactgtaatgtacatgcacatcacataaggaccttattaaaatggagacttaaaaagctggacgctaaaggcaataatgacagattttactcaataactactgcagaaggagagagtcctcagtatagaactgagcttagctccaatctgtgcagaggtgatggaattttaaagaggggagggaggaggttcaaatagaactagggaagtgcaaaattacaaaaagctggtaaggagattggtcaatgtgattcggctatctgtgtctactaactctcaaatttatttatcaaag

SEQ ID NO: 8164 - protein, 129 aa, Homo sapiens [sequence omitted]

SEQ ID NO: 8165 - DNA, 690 bp, Homo sapiens
ctactcgggtggctgaggcaggagaatcgcttgaacccaggaggcggagggtgcagtgagccgggatcacgccactgcacttcagcctgggtgacagagtgtgactccatctcaagaaaaacgagggagattagaaacctatgatcaggctggtctcaaactcctggcctcccaaagtgtttagattacaggtgtaagccaccacacgtggccagcctctgcatttctaacaggttccaggtgatcttgatgttctgctggtccatgggtcacactttgagaagcatggttctaaaggactatacagattaaagtcattaatctctgtgggctttggacttgaagtttcagcagcctttgacaagcatttgcaggtttcctttttatttatttgataaactgagaatccacatgcaaagaaatgcaagaaaattcaaagaacgtaagaaaatgtccttgctgtaaagctggtggttctcaatctcggatacacagtagaatcacctggtgcgggggttgggggcggggtgcagtgtaaaaattattaaatcagaatctctggggtaggccccaagcaacttttttttttttttttttagatagaatcttgcttgtcacctaggctagagtgcagtaatgcaatcatggctcactgctgccttaacttctgggctcaagtgatatcctccc

SEQ ID NO: 8166 - protein, 38 aa, Homo sapiens
MQENSKNVRKCPCCKAGGSQSRIHSRITWCGGWGRGAV

SEQ ID NO: 8167 - DNA, 1991 bp, Homo sapiens
ccgcgccccgcccccgccgctcggacggcccgagtcgcgccctcccgccccgcgccgcggaacttgctctaacttcctcggccgagccgggccgcgccgccgctgccgccgccgcgcgcggattctgcttctcagaagatgcactattatagatactctaacgccaaggtcagctgctggtacaagtacctccttttcagctacaacatcatcttctggttggctggagttgtcttccttggagtcgggctgtgggcatggagcgaaaagggtgtgctgtccgacctcaccaaagtgacccggatgcatggaatcgaccctgtggtgctggtcctgatggtgggcgtggtgatgttcaccctggggttcgccggctgcgtgggggctctgcgggagaatatctgcttgctcaactttttctgtggcaccatcgtgctcatcttcttcctggagctggctgtggccgtgctggccttcctgttccaggactgggtgagggaccggttccgggagttcttcgagagcaacatcaagtcctaccgggacgatatcgatctgcaaaacctcatcgactcccttcagaaagctaaccagtgctgtggcgcatatggccctgaagactgggacctcaacgtctacttcaattgcagcggtgccagctacagccgagagaagtgcggggtccccttctcctgctgcgtgccagatcctgcgcaaaaagttgtgaacacacagtgtggatatgatgtcaggattcagctgaagagcaagtgggatgagtccatcttcacgaaaggctgcatccaggcgctggaaagctggctcccgcggaacatttacattgtggctggcgtcttcatcgccatctcgctgttgcagatatttggcatcttcctggcaaggacgctgatctcagacatcgaggcagtgaaggccggccatcacttctgaggagcagagttgagggagccgagctgagccacgctgggaggccagagcctttctctgccatcagccctacgtccagagggagaggagccgacacccccagagccagtgccccatcttaagcatcagcgtgacgtgacctctctgtttctgcttgctggtgctgaagaccaagggtcccccttgttacctgcccaaacttgtgactgcatccctctggagtctacccagagacagagaatgtgtctttatgtgggagtggtgactctgaaagacagagagggctcctgtggctgccaggagggcttgactcagaccccctgcagctcaagcatgtctgcaggacaccctggtcccctctccactggcatccaggcatctctctccatcaagcaaagcagcatgggggcctgcccgtaacgggaggcggacgtggccccgctgggcctctgagtgccagcgcagtctgctgggacatgcacatatcaggggttgtttgcagggctcctcttgtggccatgtacccagggctggctggcctgccatttgcctctccccggagacagccgttcttctgcaaccacaccccgtgcctagccacaaccccaggctgcagctgctcagaagctccaggcattttgtttctggtgaccgcccctaatgggatatcggtgatcactggtccacccttcctgtcagggcttttctggggctgctcttggaaatgaagtcttaagtactgaataactcccctggggatagctggggcatttgtctagctgggctactttctaacactttgccatagctcagaccacttctcatcgttcagggatggactgcaaccttaatttacttgccggagtgtacattctagtgtggtgtatactggtggctgttgatgatgatttttttttttttacacaattctctgtagactaggagaagaatgcttgtgtttttcggaagtgtgatgcttctctttgactgccaaactcttttatggaatatatctttatattaatgctgttttggtcattttt

SEQ ID NO: 8168 - protein, 270 aa, Homo sapiens
MHYYRYSNAKVSCWYKYLLFSYNIIFWLAGVVFLGVGLWAWSEKGVLSDLTKVTRMHGIDPVVLVLMVGVVMFTLGFAGCVGALRENICLLNFFCGTIVLIFFLELAVAVLAFLFQDWVRDRFREFFESNIKSYRDDIDLQNLIDSLQKANQCCGAYGPEDWDLNVYFNCSGASYSREKCGVPFSCCVPDPAQKVVNTQCGYDVRIQLKSKWDESIFTKGCIQALESWLPRNIYIVAGVFIAISLLQIFGIFLARTLISDIEAVKAGHHF

SEQ ID NO: 8169 - DNA, 1273 bp, Homo sapiens
ccgcgccccgcccccgccgctcggacggcccgagtcgcgccctcccgccccgcgccgcggaacttgctctaacttcctcggccgagccgggccgcgccgccgctgccgccgccgcgcgcggattctgcttctcagaagatgcactattatagatactctaacgccaaggtcagctgctggtacaagtacctccttttcagctacaacatcatcttctggttggctggagttgtcttccttggagtcgggctgtgggcatggagcgaaaagggtgtgctgtccgacctcaccaaagtgacccggatgcatggaatcgaccctgtggtgctggtcctgatggtgggcgtggtgatgttcaccctggggttcgccggctgcgtgggggctctgcgggagaatatctgcttgctcaactttttctgtggcaccatcgtgctcatcttcttcctggagctggctgtggccgtgctggccttcctgttccaggactgggtgagggaccggttccgggagttcttcgagagcaacatcaagtcctaccgggacgatatcgatctgcaaaacctcatcgactcccttcagaaagctaaccagtgctgtggcgcatatggcctcactgtcttctggtcttggtgctactgaaattgtcacccagaatttgaatcctgaccctccccactgcaagcccagggagccccagcccaagatggccagcctgaaactgttggccagggctcctcttgtggccatgtacccagggctggctggcctgccatttgcctctccccggagacagccgttcttctgcaaccacaccccgtgcctagccacaaccccaggctgcagctgctcagaagctccaggcattttgtttctggtgaccgcccctaatgggatatcggtgatcactggtccacccttcctgtcagggcttttctggggctgctcttggaaatgaagtcttaagtactgaataactcccctggggatagctggggcatttgtctagctgggctactttctaacactttgccatagctcagaccacttctcatcgttcagggatggactgcaaccttaatttacttgccggagtgtacattctagtgtggtgtatactggtggctgttgatgatgatttttttttttttacacaattctctgtagactaggagaagaatgcttgtgtttttcggaagtgtgatgcttctctttgactgccaaactcttttatggaatatatctttatattaatgctgttttggtcattttt

SEQ ID NO: 8170 - protein, 167 aa, Homo sapiens
MHYYRYSNAKVSCWYKYLLFSYNIIFWLAGVVFLGVGLWAWSEKGVLSDLTKVTRMHGIDPVVLVLMVGVVMFTLGFAGCVGALRENICLLNFFCGTIVLIFFLELAVAVLAFLFQDWVRDRFREFFESNIKSYRDDIDLQNLIDSLQKANQCCGAYGLTVFWSWCY

SEQ ID NO: 8171 - DNA, 2624 bp, Homo sapiens
ccgcgccccgcccccgccgctcggacggcccgagtcgcgccctcccgccccgcgccgcggaacttgctctaacttcctcggccgagccgggccgcgccgccgctgccgccgccgcgcgcggattctgcttctcagaagatgcactattatagatactctaacgccaaggtcagctgctggtacaagtacctccttttcagctacaacatcatcttctggttggctggagttgtcttccttggagtcgggctgtgggcatggagcgaaaagggtgtgctgtccgacctcaccaaagtgacccggatgcatggaatcgaccctgtggtgctggtcctgatggtgggcgtggtgatgttcaccctggggttcgccggctgcgtgggggctctgcgggagaatatctgcttgctcaactttttctgtggcaccatcgtgctcatcttcttcctggagctggctgtggccgtgctggccttcctgttccaggactgggtgagggaccggttccgggagttcttcgagagcaacatcaagtcctaccgggacgatatcgatctgcaaaacctcatcgactcccttcagaaagctaaccagtgctgtggcgcatatggccctgaagactgggacctcaacgtctacttcaattgcagcggtgccagctacagccgagagaagtgcggggtccccttctcctgctgcgtgccagatcctgcgcaaaaagttgtgaacacacagtgtggatatgatgtcaggattcagctgaagagcaagtgggatgagtccatcttcacgaaaggctgcatccaggcgctggaaagctggctcccgcggaacatttacattgtggctggcgtcttcatcgccatctcgctgttgcagatatttggcatcttcctggcaaggacgctgatctcagacatcgaggcagtgaaggccggccatcacttctgaggagcagagttgagggagccgagctgagccacgctgggaggccagagcctttctctgccatcagccctacgtccagagggagaggagccgacacccccagagccagtgccccatcttaagcatcagcgtgacgtgacctctctgtttctgcttgctggtgctgaagaccaagggtcccccttgttacctgcccaaacttgtgactgcatccctctggagtctacccagagacagagaatgtgtctttatgtgggagtggtgactctgaaagacagagagggctcctgtggctgccaggagggcttgactcagaccccctgcagctcaagcatgtctgcaggacaccctggtcccctctccactggcatccagacatctgctttgggtcatccacatctgtgggtgggccgtgggtagagggacccacaggcgtggacagggcatctctctccatcaagcaaagcagcatgggggcctgcccgtaacgggaggcggacgtggccccgctgggcctctgagtgccagcgcagtctgctgggacatgcacatatcaggggttgtttgcaggatcctcagccatgttcaagtgaagtaagcctgagccagtgcgtggactggtgccacgggagtgccttgtccactgtccccctgtgtccaccagctattctcctggcgccggaactgcctctggtcttgatagcattaagccctgatggcgccggtggcgcggtgggcatggttcttcactgagagccggctctccttttcttaaagtgtgtaaatagtttatttataggggtaagaatgttctcacaccatttcacttcctcttcctctcctccagcattctcctctgagcagccttagatagtgtccatggctggagccgaccctttgagtccccttgagtgtcttaagaaccagcccacaacagcctctctttctcctccacatactgcagcctccctccatgcatcccacatacaagcactcccccactccccagcgtggcctcactgtcttctggtcttggtgctactgaaattgtcacccagaatttgaatcctgaccctccccactgcaagcccagggagccccagcccaagatggccagcctgaaactgttggccagggctcctcttgtggccatgtacccagggctggctggcctgccatttgcctctccccggagacagccgttcttctgcaaccacaccccgtgcctagccacaaccccaggctgcagctgctcagaagctccaggcattttgtttctggtgaccgcccctaatgggatatcggtgatcactggtccacccttcctgtcagggcttttctggggctgctcttggaaatgaagtcttaagtactgaataactcccctggggatagctggggcatttgtctagctgggctactttctaacactttgccatagctcagaccacttctcatcgttcagggatggactgcaaccttaatttacttgccggagtgtacattctagtgtggtgtatactggtggctgttgatgatgatttttttttttttacacaattctctgtagactaggagaagaatgcttgtgtttttcggaagtgtgatgcttctctttgactgccaaactcttttatggaatatatctttatattaatgctgttttggtcattttt

SEQ ID NO: 8172 - protein, 270 aa, Homo sapiens; identical to SEQ ID NO: 8168

SEQ ID NO: 8173 - DNA, 2694 bp, Homo sapiens
ccgcgccccgcccccgccgctcggacggcccgagtcgcgccctcccgccccgcgccgcggaacttgctctaacttcctcggccgagccgggccgcgccgccgctgccgccgccgcgcgcggattctgcttctcagaagatgcactattatagatactctaacgccaaggtcagctgctggtacaagtacctccttttcagctacaacatcatcttctggttggctggagttgtcttccttggagtcgggctgtgggcatggagcgaaaagggtgtgctgtccgacctcaccaaagtgacccggatgcatggaatcgaccctgtggtgctggtcctgatggtgggcgtggtgatgttcaccctggggttcgccggctgcgtgggggctctgcgggagaatatctgcttgctcaactttttctgtggcaccatcgtgctcatcttcttcctggagctggctgtggccgtgctggccttcctgttccaggactgggtgagggaccggttccgggagttcttcgagagcaacatcaagtcctaccgggacgatatcgatctgcaaaacctcatcgactcccttcagaaagctaaccagtgctgtggcgcatatggcctcactgtcttctggtcttggtgctactgaaattgtcacccagaatttgaatcctgaccctccccactgcaagcccagggagccccagcccaagatggccagcctgaaactgttggccagggctcctcttgtggccatgtacccagggctggctggcctgccatttgcctctccccggagacagccgttcttctgcaaccacaccccgtgcctagccacaaccccaggctgcagctgctcagaagctccaggcattttgtttctggtgaccgcccctaatgggatatcggtgatcactggtccacccttcctgtcagggcttttctggggctgctcttggaaatgaagtcttaagtactgaataactcccctggggatagctggggcatttgtctagctgggctactttctaacactttgccatagctcagaccacttctcatcgttcagggatggactgcaaccttaatttacttgccggagtgtacattctagtgtggtgtatactggtggctgttgatgatgatttttttttttttacacaattctctgtagactaggagaagaatgcttgtgtttttcggaagtgtgatgcttctctttgactgccaaactcttttatggaatatatctttatattaatgctgttttggtcatttttgtttggggtcactattgagatattgctaagcatctcagtggtaaacgcggctgccagaggaaccaagggatagggtatgtagaccttacagaaggatggatggtaaaggcagtccatcatcagcacaatctgacttacatttcattgagtaattttttttttttttaagattctgtatggcagcactttcagttgcccttgtgtgccggccacagccgcacaagttggcttgtggtttatcccccgctataagtgagagctggagaaacttcaactccataggtctagaggaaacattgttttaggttatttctgtccacccctgtgcgatactatttattgatccaagcagaagagcttggggacactgagtcgaagtggggacatgggattgaagcctgggcactgctgctgcatgagctgtgtgtcctgggtgtgccggcctttctgtgaagggggttggtggcagtgcccacctcactagatgcctctgacccagcctcccctgggggagtgggtggccacagaccctccctgccagagctcctggaaggctcctgcaggcctgacccatctattcctgtagacctggtttaggatgaagtctcggtgcgatttttgcagagttgggtttatctttcaactatagacccttctggctgttctcagccatatcatgtgactctgaatagttggatgaggaatggaaagaaagcaaggatgagagccggtcacgtggcagtctccgcccagcatcggctgtccgcacagaggcacagggcaggcctcctgtgcactccccacctagcactggcctgtcctgaatccccgccttccctggttggaggccagctgtggcatttgcaccctcttctcacctcaccatgcacatgctaactttaaagccttggggtctttcctgtaccccctcctcaaccctggtccaccccctctcaggatcttgtcaacgttatttttcctgtcccgtcttcctatcgctggccttcctttcccatcctaaaaacttgccgaggccctatggctccctccctttctttcccaggcagcttcttatctgggctgtctgtaccccttcctttgcaccacccaccatgccccacgtagctgaaagctgcttatcccaattgtcaactctggccttcttcagcctctgtagcaccagacactgcacctcctgaatgtcctctgcttctctgcttcagaggcccaggctcgccagttctctgacctctcccatatgtctgcttaggactctgctgcagctgtcctcaccagcctccggggaatcccactacccacagggcagggctgtgggctgggctgaaaaaccatctgcatggtccacaagaagcctggcactgggtttccccatgaataacaatgaaaattaatggatgcac

SEQ ID NO: 8174 - protein, 167 aa, Homo sapiens; identical to SEQ ID NO: 8170

SEQ ID NO: 8175 - DNA, 4809 bp, Homo sapiens
ccgcgccccgcccccgccgctcggacggcccgagtcgcgccctcccgccccgcgccgcggaacttgctctaacttcctcggccgagccgggccgcgccgccgctgccgccgccgcgcgcggattctgcttctcagaagatgcactattatagatactctaacgccaaggtcagctgctggtacaagtacctccttttcagctacaacatcatcttctggttggctggagttgtcttccttggagtcgggctgtgggcatggagcgaaaagggtgtgctgtccgacctcaccaaagtgacccggatgcatggaatcgaccctgtggtgctggtcctgatggtgggcgtggtgatgttcaccctggggttcgccggctgcgtgggggctctgcgggagaatatctgcttgctcaactttttctgtggcaccatcgtgctcatcttcttcctggagctggctgtggccgtgctggccttcctgttccaggactgggtgagggaccggttccgggagttcttcgagagcaacatcaagtcctaccgggacgatatcgatctgcaaaacctcatcgactcccttcagaaagctaaccagtgctgtggcgcatatggcctcactgtcttctggtcttggtgctactgaaattgtcacccagaatttgaatcctgaccctccccactgcaagcccagggagccccagcccaagatggccagcctgaaactgttggccagggctcctcttgtggccatgtacccagggctggctggcctgccatttgcctctccccggagacagccgttcttctgcaaccacaccccgtgcctagccacaaccccaggctgcagctgctcagaagctccaggcattttgtttctggtgaccgcccctaatgggatatcggtgatcactggtccacccttcctgtcagggcttttctggggctgctcttggaaatgaagtcttaagtactgaataactcccctggggatagctggggcatttgtctagctgggctactttctaacactttgccatagctcagaccacttctcatcgttcagggatggactgcaaccttaatttacttgccggagtgtacattctagtgtggtgtatactggtggctgttgatgatgatttttttttttttacacaattctctgtagactaggagaagaatgcttgtgtttttcggaagtgtgatgcttctctttgactgccaaactcttttatggaatatatctttatattaatgctgttttggtcatttttgtttggggtcactattgagatattgctaagcatctcagtggtaaacgcggctgccagaggaaccaagggatagggtatgtagaccttacagaaggatggatggtaaaggcagtccatcatcagcacaatctgacttacatttcattgagtaattttttttttttttaagattctgtatggcagcactttcagttgcccttgtgtgccggccacagccgcacaagttggcttgtggtttatcccccgctataagtgagagctggagaaacttcaactccataggtctagaggaaacattgttttaggttatttctgtccacccctgtgcgatactatttattgatccaagcagaagagcttggggacactgagtcgaagtggggacatgggattgaagcctgggcactgctgctgcatgagctgtgtgtcctgggtgtgccggcctttctgtgaagggggttggtggcagtgcccacctcactagatgcctctgacccagcctcccctgggggagtgggtggccacagaccctccctgccagagctcctggaaggctcctgcaggcctgacccatctattcctgtagacctggtttaggatgaagtctcggtgcgatttttgcagagttgggtttatctttcaactatagacccttctggctgttctcagccatatcatgtgactctgaatagttggatgaggaatggaaagaaagcaaggatgagagccggtcacgtggcagtctccgcccagcatcggctgtccgcacagaggcacagggcaggcctcctgtgcactccccacctagcactggcctgtcctgaatccccgccttccctggttggaggccagctgtggcatttgcaccctcttctcacctcaccatgcacatgctaactttaaagccttggggtctttcctgtaccccctcctcaaccctggtccaccccctctcaggatcttgtcaacgttatttttcctgtcccgtcttcctatcgctggccttcctttcccatcctaaaaacttgccgaggccctatggctccctccctttctttcccaggcagcttcttatctgggctgtctgtaccccttcctttgcaccacccaccatgccccacgtagctgaaagctgcttatcccaattgtcaactctggccttcttcagcctctgtagcaccagacactgcacctcctgaatgtcctctgcttctctgcttcagaggcccaggctcgccagttctctgacctctcccatatgtctgcttaggactctgctgcagctgtcctcaccagcctccggggaatcccactacccacagggcagggctgtgggctgggctgaaaaaccatctgcatggtccacaagaagcctggcactgggtttccccatgaataacaatgaaaattaatggatgcacaaccttcctggaacgtggaatttctctgggagattccatgcagaggccactggggaggtggcaggcatgcatgtgactgtaggtggctgcagtgttggaaggctcccagcagagcagagagggtgtcagtctcatcagggaacccacctgatggcttctcagccagcagtctcagaggaacatagacgactgctgagaaaggagggaggcagcagtggtcccagcacctgaggcatcctgctgtcatgggaaggtctccgcccaaatgtcagatgcatcagcctgtcacccgctggtccagagctttcagctgtactggtagggggtgggtggtggagtgctgaatgaccttcacaggtgggcctttccagctctagggtcttacgggtgtcggtccacagaaccacggtttttaggttgtgtgtccggggctatgggaacctgtcccccatgatggatcttggtagagacacttccctctgtcatcgtgcccaggaggatgctgcaggtgactacctgcagccctgttctcattcatttggatgccctccagaaatctggggagccatacacctttagagccttttttgctccttatcaagttggcaaggcttggccaattcctgttcaaggctgcattaaaggcatgttcaccatcctggctaatacggtgaaaccccttctctactaaaaatacaaaaaaattagccgggcttggtggcgggtgcctgtagtcccagctactccggaggctgaggcaggggaatggtgtgaacccaggaggcggagcttgcagtgagccgagatcacaccactgcactccagcctgggctcaaaaaagaaaaaaaaaaaaaaaaaaaggcccgttcattctcaaatgcttttggcgtctccagggtgcctcaggaaaacatgaagtgggcattgtagaacttggggctactgtgtaactttggaagaaaaagttaagggtacttttaagtggatactgttttgatgaaattgccaacttcagggagcccagcttggagaaggaggacgtgagtattccttacaaggctccgaaacaattctttcttcacttagttttctttctgtgctctgcatcttatattccagcagggtcttccaatgcatggtttaataactactagaactggccaggtgcagtggctcacgcctgtaatcccagaactttgggaggctaagacaggcagatcacttgaggccaggagttcgagaccagcctggacaacatggtgatacccagtttctactaaaaatacaaaaattagtcgggcatggtgatgtgcacctgtagtcccagctgctcgggaggctgaggcaggagaatcgcttgaacccgggagacagaggttgcaacgagccaagatcgagccactgcgctccggcctgggtgacaggagactccatctcaaaaaataaaattaaaaaaaaactactacaataaattatcaccttggactgtataaaacaacttttaaactagtctttttaaaaagtacacttaaataaaaatctaaacataagagaatgtaaagtgaaaagtgaaagtatgtcttctgttacgcagaggtaactactattaggaatccttcctgaaaatgtccatgcatctactcaggtcatcacacccatggaatcattttacatactattttatgagtgttacttaatatactgatccacagtgcgttttcacggtcacgccatcagttgtaggagtgtgccaagaacagatgggccttgcctttgtaccagaggagtccatttacagttgcaggtaatagaaaacccaattcagactggcctaaacaatgaggggaggttttggctcttgaaactggaaagtcccaaggtggggtgagtttcaggtttgggttgatccaagtggctcagtgacgtcaacaggatcttgtttccatttctctgccttccacagcctccccttcatctatggtggagggaaggagtctaccacagacaaaccccgagcctccccctgatgggtggtgtggtggtgaagccagcaagggaagggatccccggacacacccctcctcatgctttatcccactgaaaccatgcggctgt

SEQ ID NO: 8176 - protein, 167 aa, Homo sapiens; identical to SEQ ID NO: 8170

SEQ ID NO: 8177 - DNA, 2241 bp, Homo sapiens
cgccgctcggacggcccgagtcgcgccctcccgccccgcgccgcggaacttgctctaacttcctcggccgagccgggccgcgccgccgctgccgccgccgcgcgcggattctgcttctcagaagatgcactattatagatactctaacgccaaggtcagctgctggtacaagtacctccttttcagctacaacatcatcttctggaaccagtgctgtggcgcatatggccctgaagactgggacctcaacgtctacttcaattgcagcggtgccagctacagccgagagaagtgcggggtccccttctcctgctgcgtgccagatcctgcgcaaaaagttgtgaacacacagtgtggatatgatgtcaggattcagctgaagagcaagtgggatgagtccatcttcacgaaaggctgcatccaggcgctggaaagctggctcccgcggaacatttacattgtggctggcgtcttcatcgccatctcgctgttgcagatatttggcatcttcctggcaaggacgctgatctcagacatcgaggcagtgaaggccggccatcacttctgaggagcagagttgagggagccgagctgagccacgctgggaggccagagcctttctctgccatcagccctacgtccagagggagaggagccgacacccccagagccagtgccccatcttaagcatcagcgtgacgtgacctctctgtttctgcttgctggtgctgaagaccaagggtcccccttgttacctgcccaaacttgtgactgcatccctctggagtctacccagagacagagaatgtgtctttatgtgggagtggtgactctgaaagacagagagggctcctgtggctgccaggagggcttgactcagaccccctgcagctcaagcatgtctgcaggacaccctggtcccctctccactggcatccagacatctgctttgggtcatccacatctgtgggtgggccgtgggtagagggacccacaggcgtggacagggcatctctctccatcaagcaaagcagcatgggggcctgcccgtaacgggaggcggacgtggccccgctgggcctctgagtgccagcgcagtctgctgggacatgcacatatcaggggttgtttgcaggatcctcagccatgttcaagtgaagtaagcctgagccagtgcgtggactggtgccacgggagtgccttgtccactgtccccctgtgtccaccagctattctcctggcgccggaactgcctctggtcttgatagcattaagccctgatggcgccggtggcgcggtgggcatggttcttcactgagagccggctctccttttcttaaagtgtgtaaatagtttatttataggggtaagaatgttctcacaccatttcacttcctcttcctctcctccagcattctcctctgagcagccttagatagtgtccatggctggagccgaccctttgagtccccttgagtgtcttaagaaccagcccacaacagcctctctttctcctccacatactgcagcctccctccatgcatcccacatacaagcactcccccactccccagcgtggcctcactgtcttctggtcttggtgctactgaaattgtcacccagaatttgaatcctgaccctccccactgcaagcccagggagccccagcccaagatggccagcctgaaactgttggccagggctcctcttgtggccatgtacccagggctggctggcctgccatttgcctctccccggagacagccgttcttctgcaaccacaccccgtgcctagccacaaccccaggctgcagctgctcagaagctccaggcattttgtttctggtgaccgcccctaatgggatatcggtgatcactggtccacccttcctgtcagggcttttctggggctgctcttggaaatgaagtcttaagtactgaataactcccctggggatagctggggcatttgtctagctgggctactttctaacactttgccatagctcagaccacttctcatcgttcagggatggactgcaaccttaatttacttgccggagtgtacattctagtgtggtgtatactggtggctgttgatgatgatttttttttttttacacaattctctgtagactaggagaagaatgcttgtgtttttcggaagtgtgatgcttctctttgactgccaaactcttttatggaatatatctttatattaatgctgttttggtcattttt

SEQ ID NO: 8178 - protein, 147 aa, Homo sapiens
MHYYRYSNAKVSCWYKYLLFSYNIIFWNQCCGAYGPEDWDLNVYFNCSGASYSREKCGVPFSCCVPDPAQKVVNTQCGYDVRIQLKSKWDESIFTKGCIQALESWLPRNIYIVAGVFIAISLLQIFGIFLARTLISDIEAVKAGHHF

SEQ ID NO: 8179 - DNA, 3662 bp, Homo sapiens
cgccgctcggacggcccgagtcgcgccctcccgccccgcgccgcggaacttgctctaacttcctcggccgagccgggccgcgccgccgctgccgccgccgcgcgcggattctgcttctcagaagatgcactattatagatactctaacgccaaggtcagctgctggtacaagtacctccttttcagctacaacatcatcttctggaaccagtgctgtggcgcatatggccctgaagactgggacctcaacgtctacttcaattgcagcggtgccagctacagccgagagaagtgcggggtccccttctcctgctgcgtgccagatcctgcgcaaaaagttgtgaacacacagtgtggatatgatgtcaggattcagctgaagagcaagtgggatgagtccatcttcacgaaaggctgcatccaggcgctggaaagctggctcccgcggaacatttacattgtggctggcgtcttcatcgccatctcgctgttgcagatatttggcatcttcctggcaaggacgctgatctcagacatcgaggcagtgaaggccggccatcacttctgaggagcagagttgagggagccgagctgagccacgctgggaggccagagcctttctctgccatcagccctacgtccagagggagaggagccgacacccccagagccagtgccccatcttaagcatcagcgtgacgtgacctctctgtttctgcttgctggtgctgaagaccaagggtcccccttgttacctgcccaaacttgtgactgcatccctctggagtctacccagagacagagaatgtgtctttatgtgggagtggtgactctgaaagacagagagggctcctgtggctgccaggagggcttgactcagaccccctgcagctcaagcatgtctgcaggacaccctggtcccctctccactggcatccagacatctgctttgggtcatccacatctgtgggtgggccgtgggtagagggacccacaggcgtggacagggcatctctctccatcaagcaaagcagcatgggggcctgcccgtaacgggaggcggacgtggccccgctgggcctctgagtgccagcgcagtctgctgggacatgcacatatcaggggttgtttgcaggatcctcagccatgttcaagtgaagtaagcctgagccagtgcgtggactggtgccacgggagtgccttgtccactgtccccctgtgtccaccagctattctcctggcgccggaactgcctctggtcttgatagcattaagccctgatggcgccggtggcgcggtgggcatggttcttcactgagagccggctctccttttcttaaagtgtgtaaatagtttatttataggggtaagaatgttctcacaccatttcacttcctcttcctctcctccagcattctcctctgagcagccttagatagtgtccatggctggagccgaccctttgagtccccttgagtgtcttaagaaccagcccacaacagcctctctttctcctccacatactgcagcctccctccatgcatcccacatacaagcactcccccactccccagcgtggcctcactgtcttctggtcttggtgctactgaaattgtcacccagaatttgaatcctgaccctccccactgcaagcccagggagccccagcccaagatggccagcctgaaactgttggccagggctcctcttgtggccatgtacccagggctggctggcctgccatttgcctctccccggagacagccgttcttctgcaaccacaccccgtgcctagccacaaccccaggctgcagctgctcagaagctccaggcattttgtttctggtgaccgcccctaatgggatatcggtgatcactggtccacccttcctgtcagggcttttctggggctgctcttggaaatgaagtcttaagtactgaataactcccctggggatagctggggcatttgtctagctgggctactttctaacactttgccatagctcagaccacttctcatcgttcagggatggactgcaaccttaatttacttgccggagtgtacattctagtgtggtgtatactggtggctgttgatgatgatttttttttttttacacaattctctgtagactaggagaagaatgcttgtgtttttcggaagtgtgatgcttctctttgactgccaaactcttttatggaatatatctttatattaatgctgttttggtcatttttgtttggggtcactattgagatattgctaagcatctcagtggtaaacgcggctgccagaggaaccaagggatagggtatgtagaccttacagaaggatggatggtaaaggcagtccatcatcagcacaatctgacttacatttcattgagtaattttttttttttttaagattctgtatggcagcactttcagttgcccttgtgtgccggccacagccgcacaagttggcttgtggtttatcccccgctataagtgagagctggagaaacttcaactccataggtctagaggaaacattgttttaggttatttctgtccacccctgtgcgatactatttattgatccaagcagaagagcttggggacactgagtcgaagtggggacatgggattgaagcctgggcactgctgctgcatgagctgtgtgtcctgggtgtgccggcctttctgtgaagggggttggtggcagtgcccacctcactagatgcctctgacccagcctcccctgggggagtgggtggccacagaccctccctgccagagctcctggaaggctcctgcaggcctgacccatctattcctgtagacctggtttaggatgaagtctcggtgcgatttttgcagagttgggtttatctttcaactatagacccttctggctgttctcagccatatcatgtgactctgaatagttggatgaggaatggaaagaaagcaaggatgagagccggtcacgtggcagtctccgcccagcatcggctgtccgcacagaggcacagggcaggcctcctgtgcactccccacctagcactggcctgtcctgaatccccgccttccctggttggaggccagctgtggcatttgcaccctcttctcacctcaccatgcacatgctaactttaaagccttggggtctttcctgtaccccctcctcaaccctggtccaccccctctcaggatcttgtcaacgttatttttcctgtcccgtcttcctatcgctggccttcctttcccatcctaaaaacttgccgaggccctatggctccctccctttctttcccaggcagcttcttatctgggctgtctgtaccccttcctttgcaccacccaccatgccccacgtagctgaaagctgcttatcccaattgtcaactctggccttcttcagcctctgtagcaccagacactgcacctcctgaatgtcctctgcttctctgcttcagaggcccaggctcgccagttctctgacctctcccatatgtctgcttaggactctgctgcagctgtcctcaccagcctccggggaatcccactacccacagggcagggctgtgggctgggctgaaaaaccatctgcatggtccacaagaagcctggcactgggtttccccatgaataacaatgaaaattaatggatgcac

SEQ ID NO: 8180 - protein, 147 aa, Homo sapiens; identical to SEQ ID NO: 8178

SEQ ID NO: 8181 - DNA, 5777 bp, Homo sapiens
cgccgctcggacggcccgagtcgcgccctcccgccccgcgccgcggaacttgctctaacttcctcggccgagccgggccgcgccgccgctgccgccgccgcgcgcggattctgcttctcagaagatgcactattatagatactctaacgccaaggtcagctgctggtacaagtacctccttttcagctacaacatcatcttctggaaccagtgctgtggcgcatatggccctgaagactgggacctcaacgtctacttcaattgcagcggtgccagctacagccgagagaagtgcggggtccccttctcctgctgcgtgccagatcctgcgcaaaaagttgtgaacacacagtgtggatatgatgtcaggattcagctgaagagcaagtgggatgagtccatcttcacgaaaggctgcatccaggcgctggaaagctggctcccgcggaacatttacattgtggctggcgtcttcatcgccatctcgctgttgcagatatttggcatcttcctggcaaggacgctgatctcagacatcgaggcagtgaaggccggccatcacttctgaggagcagagttgagggagccgagctgagccacgctgggaggccagagcctttctctgccatcagccctacgtccagagggagaggagccgacacccccagagccagtgccccatcttaagcatcagcgtgacgtgacctctctgtttctgcttgctggtgctgaagaccaagggtcccccttgttacctgcccaaacttgtgactgcatccctctggagtctacccagagacagagaatgtgtctttatgtgggagtggtgactctgaaagacagagagggctcctgtggctgccaggagggcttgactcagaccccctgcagctcaagcatgtctgcaggacaccctggtcccctctccactggcatccagacatctgctttgggtcatccacatctgtgggtgggccgtgggtagagggacccacaggcgtggacagggcatctctctccatcaagcaaagcagcatgggggcctgcccgtaacgggaggcggacgtggccccgctgggcctctgagtgccagcgcagtctgctgggacatgcacatatcaggggttgtttgcaggatcctcagccatgttcaagtgaagtaagcctgagccagtgcgtggactggtgccacgggagtgccttgtccactgtccccctgtgtccaccagctattctcctggcgccggaactgcctctggtcttgatagcattaagccctgatggcgccggtggcgcggtgggcatggttcttcactgagagccggctctccttttcttaaagtgtgtaaatagtttatttataggggtaagaatgttctcacaccatttcacttcctcttcctctcctccagcattctcctctgagcagccttagatagtgtccatggctggagccgaccctttgagtccccttgagtgtcttaagaaccagcccacaacagcctctctttctcctccacatactgcagcctccctccatgcatcccacatacaagcactcccccactccccagcgtggcctcactgtcttctggtcttggtgctactgaaattgtcacccagaatttgaatcctgaccctccccactgcaagcccagggagccccagcccaagatggccagcctgaaactgttggccagggctcctcttgtggccatgtacccagggctggctggcctgccatttgcctctccccggagacagccgttcttctgcaaccacaccccgtgcctagccacaaccccaggctgcagctgctcagaagctccaggcattttgtttctggtgaccgcccctaatgggatatcggtgatcactggtccacccttcctgtcagggcttttctggggctgctcttggaaatgaagtcttaagtactgaataactcccctggggatagctggggcatttgtctagctgggctactttctaacactttgccatagctcagaccacttctcatcgttcagggatggactgcaaccttaatttacttgccggagtgtacattctagtgtggtgtatactggtggctgttgatgatgatttttttttttttacacaattctctgtagactaggagaagaatgcttgtgtttttcggaagtgtgatgcttctctttgactgccaaactcttttatggaatatatctttatattaatgctgttttggtcatttttgtttggggtcactattgagatattgctaagcatctcagtggtaaacgcggctgccagaggaaccaagggatagggtatgtagaccttacagaaggatggatggtaaaggcagtccatcatcagcacaatctgacttacatttcattgagtaattttttttttttttaagattctgtatggcagcactttcagttgcccttgtgtgccggccacagccgcacaagttggcttgtggtttatcccccgctataagtgagagctggagaaacttcaactccataggtctagaggaaacattgttttaggttatttctgtccacccctgtgcgatactatttattgatccaagcagaagagcttggggacactgagtcgaagtggggacatgggattgaagcctgggcactgctgctgcatgagctgtgtgtcctgggtgtgccggcctttctgtgaagggggttggtggcagtgcccacctcactagatgcctctgacccagcctcccctgggggagtgggtggccacagaccctccctgccagagctcctggaaggctcctgcaggcctgacccatctattcctgtagacctggtttaggatgaagtctcggtgcgatttttgcagagttgggtttatctttcaactatagacccttctggctgttctcagccatatcatgtgactctgaatagttggatgaggaatggaaagaaagcaaggatgagagccggtcacgtggcagtctccgcccagcatcggctgtccgcacagaggcacagggcaggcctcctgtgcactccccacctagcactggcctgtcctgaatccccgccttccctggttggaggccagctgtggcatttgcaccctcttctcacctcaccatgcacatgctaactttaaagccttggggtctttcctgtaccccctcctcaaccctggtccaccccctctcaggatcttgtcaacgttatttttcctgtcccgtcttcctatcgctggccttcctttcccatcctaaaaacttgccgaggccctatggctccctccctttctttcccaggcagcttcttatctgggctgtctgtaccccttcctttgcaccacccaccatgccccacgtagctgaaagctgcttatcccaattgtcaactctggccttcttcagcctctgtagcaccagacactgcacctcctgaatgtcctctgcttctctgcttcagaggcccaggctcgccagttctctgacctctcccatatgtctgcttaggactctgctgcagctgtcctcaccagcctccggggaatcccactacccacagggcagggctgtgggctgggctgaaaaaccatctgcatggtccacaagaagcctggcactgggtttccccatgaataacaatgaaaattaatggatgcacaaccttcctggaacgtggaatttctctgggagattccatgcagaggccactggggaggtggcaggcatgcatgtgactgtaggtggctgcagtgttggaaggctcccagcagagcagagagggtgtcagtctcatcagggaacccacctgatggcttctcagccagcagtctcagaggaacatagacgactgctgagaaaggagggaggcagcagtggtcccagcacctgaggcatcctgctgtcatgggaaggtctccgcccaaatgtcagatgcatcagcctgtcacccgctggtccagagctttcagctgtactggtagggggtgggtggtggagtgctgaatgaccttcacaggtgggcctttccagctctagggtcttacgggtgtcggtccacagaaccacggtttttaggttgtgtgtccggggctatgggaacctgtcccccatgatggatcttggtagagacacttccctctgtcatcgtgcccaggaggatgctgcaggtgactacctgcagccctgttctcattcatttggatgccctccagaaatctggggagccatacacctttagagccttttttgctccttatcaagttggcaaggcttggccaattcctgttcaaggctgcattaaaggcatgttcaccatcctggctaatacggtgaaaccccttctctactaaaaatacaaaaaaattagccgggcttggtggcgggtgcctgtagtcccagctactccggaggctgaggcaggggaatggtgtgaacccaggaggcggagcttgcagtgagccgagatcacaccactgcactccagcctgggctcaaaaaagaaaaaaaaaaaaaaaaaaaggcccgttcattctcaaatgcttttggcgtctccagggtgcctcaggaaaacatgaagtgggcattgtagaacttggggctactgtgtaactttggaagaaaaagttaagggtacttttaagtggatactgttttgatgaaattgccaacttcagggagcccagcttggagaaggaggacgtgagtattccttacaaggctccgaaacaattctttcttcacttagttttctttctgtgctctgcatcttatattccagcagggtcttccaatgcatggtttaataactactagaactggccaggtgcagtggctcacgcctgtaatcccagaactttgggaggctaagacaggcagatcacttgaggccaggagttcgagaccagcctggacaacatggtgatacccagtttctactaaaaatacaaaaattagtcgggcatggtgatgtgcacctgtagtcccagctgctcgggaggctgaggcaggagaatcgcttgaacccgggagacagaggttgcaacgagccaagatcgagccactgcgctccggcctgggtgacaggagactccatctcaaaaaataaaattaaaaaaaaactactacaataaattatcaccttggactgtataaaacaacttttaaactagtctttttaaaaagtacacttaaataaaaatctaaacataagagaatgtaaagtgaaaagtgaaagtatgtcttctgttacgcagaggtaactactattaggaatccttcctgaaaatgtccatgcatctactcaggtcatcacacccatggaatcattttacatactattttatgagtgttacttaatatactgatccacagtgcgttttcacggtcacgccatcagttgtaggagtgtgccaagaacagatgggccttgcctttgtaccagaggagtccatttacagttgcaggtaatagaaaacccaattcagactggcctaaacaatgaggggaggttttggctcttgaaactggaaagtcccaaggtggggtgagtttcaggtttgggttgatccaagtggctcagtgacgtcaacaggatcttgtttccatttctctgccttccacagcctccccttcatctatggtggagggaaggagtctaccacagacaaaccccgagcctccccctgatgggtggtgtggtggtgaagccagcaagggaagggatccccggacacacccctcctcatgctttatcccactgaaaccatgcggctgt

SEQ ID NO: 8182 - protein, 147 aa, Homo sapiens; identical to SEQ ID NO: 8178

SEQ ID NO: 8183 - DNA, 825 bp, Homo sapiens
aacttgctctaacttcctcggccgagccgggccgcgccgccgctgccgccgccgcgcgcggattctgcttctcagaagatgcactattatagatactctaacgccaaggtcagctgctggtacaagtacctccttttcagctacaacatcatcttctggttggctggagtttcttctggtcttggtgctactgaaattgtcacccagaatttgaatcctgaccctccccactgcaagcccagggagccccagcccaagatggccagcctgaaactgttggccagggctcctcttgtggccatgtacccagggctggctggcctgccatttgcctctccccggagacagccgttcttctgcaaccacaccccgtgcctagccacaaccccaggctgcagctgctcagaagctccaggcattttgtttctggtgaccgcccctaatgggatatcggtgatcactggtccacccttcctgtcagggcttttctggggctgctcttggaaatgaagtcttaagtactgaataactcccctggggatagctggggcatttgtctagctgggctactttctaacactttgccatagctcagaccacttctcatcgttcagggatggactgcaaccttaatttacttgccggagtgtacattctagtgtggtgtatactggtggctgttgatgatgatttttttttttttacacaattctctgtagactaggagaagaatgcttgtgtttttcggaagtgtgatgcttctctttgactgccaaactcttttatggaatatatctttatattaatgctgttttggtcattttt

SEQ ID NO: 8184 - protein, 143 aa, Homo sapiens
MHYYRYSNAKVSCWYKYLLFSYNIIFWLAGVSSGLGATEIVTQNLNPDPPHCKPREPQPKMASLKLLARAPLVAMYPGLAGLPFASPRRQPFFCNHTPCLATTPGCSCSEAPGILFLVTAPNGISVITGPPFLSGLFWGCSWK

SEQ ID NO: 8185 - DNA, 2246 bp, Homo sapiens
aacttgctctaacttcctcggccgagccgggccgcgccgccgctgccgccgccgcgcgcggattctgcttctcagaagatgcactattatagatactctaacgccaaggtcagctgctggtacaagtacctccttttcagctacaacatcatcttctggttggctggagtttcttctggtcttggtgctactgaaattgtcacccagaatttgaatcctgaccctccccactgcaagcccagggagccccagcccaagatggccagcctgaaactgttggccagggctcctcttgtggccatgtacccagggctggctggcctgccatttgcctctccccggagacagccgttcttctgcaaccacaccccgtgcctagccacaaccccaggctgcagctgctcagaagctccaggcattttgtttctggtgaccgcccctaatgggatatcggtgatcactggtccacccttcctgtcagggcttttctggggctgctcttggaaatgaagtcttaagtactgaataactcccctggggatagctggggcatttgtctagctgggctactttctaacactttgccatagctcagaccacttctcatcgttcagggatggactgcaaccttaatttacttgccggagtgtacattctagtgtggtgtatactggtggctgttgatgatgatttttttttttttacacaattctctgtagactaggagaagaatgcttgtgtttttcggaagtgtgatgcttctctttgactgccaaactcttttatggaatatatctttatattaatgctgttttggtcatttttgtttggggtcactattgagatattgctaagcatctcagtggtaaacgcggctgccagaggaaccaagggatagggtatgtagaccttacagaaggatggatggtaaaggcagtccatcatcagcacaatctgacttacatttcattgagtaattttttttttttttaagattctgtatggcagcactttcagttgcccttgtgtgccggccacagccgcacaagttggcttgtggtttatcccccgctataagtgagagctggagaaacttcaactccataggtctagaggaaacattgttttaggttatttctgtccacccctgtgcgatactatttattgatccaagcagaagagcttggggacactgagtcgaagtggggacatgggattgaagcctgggcactgctgctgcatgagctgtgtgtcctgggtgtgccggcctttctgtgaagggggttggtggcagtgcccacctcactagatgcctctgacccagcctcccctgggggagtgggtggccacagaccctccctgccagagctcctggaaggctcctgcaggcctgacccatctattcctgtagacctggtttaggatgaagtctcggtgcgatttttgcagagttgggtttatctttcaactatagacccttctggctgttctcagccatatcatgtgactctgaatagttggatgaggaatggaaagaaagcaaggatgagagccggtcacgtggcagtctccgcccagcatcggctgtccgcacagaggcacagggcaggcctcctgtgcactccccacctagcactggcctgtcctgaatccccgccttccctggttggaggccagctgtggcatttgcaccctcttctcacctcaccatgcacatgctaactttaaagccttggggtctttcctgtaccccctcctcaaccctggtccaccccctctcaggatcttgtcaacgttatttttcctgtcccgtcttcctatcgctggccttcctttcccatcctaaaaacttgccgaggccctatggctccctccctttctttcccaggcagcttcttatctgggctgtctgtaccccttcctttgcaccacccaccatgccccacgtagctgaaagctgcttatcccaattgtcaactctggccttcttcagcctctgtagcaccagacactgcacctcctgaatgtcctctgcttctctgcttcagaggcccaggctcgccagttctctgacctctcccatatgtctgcttaggactctgctgcagctgtcctcaccagcctccggggaatcccactacccacagggcagggctgtgggctgggctgaaaaaccatctgcatggtccacaagaagcctggcactgggtttccccatgaataacaatgaaaattaatggatgcac

SEQ ID NO: 8186 - protein, 143 aa, Homo sapiens; identical to SEQ ID NO: 8184

SEQ ID NO: 8187 - DNA, 2865 bp, Homo sapiens
aacttgctctaacttcctcggccgagccgggccgcgccgccgctgccgccgccgcgcgcggattctgcttctcagaagatgcactattatagatactctaacgccaaggtcagctgctggtacaagtacctccttttcagctacaacatcatcttctggttggctggagttgtcttccttggagtcgggctgtgggcatggagcgaaaagggtgtgctgtccgacctcaccaaagtgacccggatgcatggaatcgaccctgtggtgctggtccaccccctctcaggatcttgtcaacgttatttttcctgtcccgtcttcctatcgctggccttcctttcccatcctaaaaacttgccgaggccctatggctccctccctttctttcccaggcagcttcttatctgggctgtctgtaccccttcctttgcaccacccaccatgccccacgtagctgaaagctgcttatcccaattgtcaactctggccttcttcagcctctgtagcaccagacactgcacctcctgaatgtcctctgcttctctgcttcagaggcccaggctcgccagttctctgacctctcccatatgtctgcttaggactctgctgcagctgtcctcaccagcctccggggaatcccactacccacagggcagggctgtgggctgggctgaaaaaccatctgcatggtccacaagaagcctggcactgggtttccccatgaataacaatgaaaattaatggatgcacaaccttcctggaacgtggaatttctctgggagattccatgcagaggccactggggaggtggcaggcatgcatgtgactgtaggtggctgcagtgttggaaggctcccagcagagcagagagggtgtcagtctcatcagggaacccacctgatggcttctcagccagcagtctcagaggaacatagacgactgctgagaaaggagggaggcagcagtggtcccagcacctgaggcatcctgctgtcatgggaaggtctccgcccaaatgtcagatgcatcagcctgtcacccgctggtccagagctttcagctgtactggtagggggtgggtggtggagtgctgaatgaccttcacaggtgggcctttccagctctagggtcttacgggtgtcggtccacagaaccacggtttttaggttgtgtgtccggggctatgggaacctgtcccccatgatggatcttggtagagacacttccctctgtcatcgtgcccaggaggatgctgcaggtgactacctgcagccctgttctcattcatttggatgccctccagaaatctggggagccatacacctttagagccttttttgctccttatcaagttggcaaggcttggccaattcctgttcaaggctgcattaaaggcatgttcaccatcctggctaatacggtgaaaccccttctctactaaaaatacaaaaaaattagccgggcttggtggcgggtgcctgtagtcccagctactccggaggctgaggcaggggaatggtgtgaacccaggaggcggagcttgcagtgagccgagatcacaccactgcactccagcctgggctcaaaaaagaaaaaaaaaaaaaaaaaaaggcccgttcattctcaaatgcttttggcgtctccagggtgcctcaggaaaacatgaagtgggcattgtagaacttggggctactgtgtaactttggaagaaaaagttaagggtacttttaagtggatactgttttgatgaaattgccaacttcagggagcccagcttggagaaggaggacgtgagtattccttacaaggctccgaaacaattctttcttcacttagttttctttctgtgctctgcatcttatattccagcagggtcttccaatgcatggtttaataactactagaactggccaggtgcagtggctcacgcctgtaatcccagaactttgggaggctaagacaggcagatcacttgaggccaggagttcgagaccagcctggacaacatggtgatacccagtttctactaaaaatacaaaaattagtcgggcatggtgatgtgcacctgtagtcccagctgctcgggaggctgaggcaggagaatcgcttgaacccgggagacagaggttgcaacgagccaagatcgagccactgcgctccggcctgggtgacaggagactccatctcaaaaaataaaattaaaaaaaaactactacaataaattatcaccttggactgtataaaacaacttttaaactagtctttttaaaaagtacacttaaataaaaatctaaacataagagaatgtaaagtgaaaagtgaaagtatgtcttctgttacgcagaggtaactactattaggaatccttcctgaaaatgtccatgcatctactcaggtcatcacacccatggaatcattttacatactattttatgagtgttacttaatatactgatccacagtgcgttttcacggtcacgccatcagttgtaggagtgtgccaagaacagatgggccttgcctttgtaccagaggagtccatttacagttgcaggtaatagaaaacccaattcagactggcctaaacaatgaggggaggttttggctcttgaaactggaaagtcccaaggtggggtgagtttcaggtttgggttgatccaagtggctcagtgacgtcaacaggatcttgtttccatttctctgccttccacagcctccccttcatctatggtggagggaaggagtctaccacagacaaaccccgagcctccccctgatgggtggtgtggtggtgaagccagcaagggaagggatccccggacacacccctcctcatgctttatcccactgaaaccatgcggctgt

SEQ ID NO: 8188 - protein, 149 aa, Homo sapiens
MHYYRYSNAKVSCWYKYLLFSYNIIFWLAGVVFLGVGLWAWSEKGVLSDLTKVTRMHGIDPVVLVHPLSGSCQRYFSCPVFLSLAFLSHPKNLPRPYGSLPFFPRQLLIWAVCTPSFAPPTMPHVAESCLSQLSTLAFFSLCSTRHCTS

SEQ ID NO: 8189 - DNA, 4361 bp, Homo sapiens
aacttgctctaacttcctcggccgagccgggccgcgccgccgctgccgccgccgcgcgcggattctgcttctcagaagatgcactattatagatactctaacgccaaggtcagctgctggtacaagtacctccttttcagctacaacatcatcttctggttggctggagtttcttctggtcttggtgctactgaaattgtcacccagaatttgaatcctgaccctccccactgcaagcccagggagccccagcccaagatggccagcctgaaactgttggccagggctcctcttgtggccatgtacccagggctggctggcctgccatttgcctctccccggagacagccgttcttctgcaaccacaccccgtgcctagccacaaccccaggctgcagctgctcagaagctccaggcattttgtttctggtgaccgcccctaatgggatatcggtgatcactggtccacccttcctgtcagggcttttctggggctgctcttggaaatgaagtcttaagtactgaataactcccctggggatagctggggcatttgtctagctgggctactttctaacactttgccatagctcagaccacttctcatcgttcagggatggactgcaaccttaatttacttgccggagtgtacattctagtgtggtgtatactggtggctgttgatgatgatttttttttttttacacaattctctgtagactaggagaagaatgcttgtgtttttcggaagtgtgatgcttctctttgactgccaaactcttttatggaatatatctttatattaatgctgttttggtcatttttgtttggggtcactattgagatattgctaagcatctcagtggtaaacgcggctgccagaggaaccaagggatagggtatgtagaccttacagaaggatggatggtaaaggcagtccatcatcagcacaatctgacttacatttcattgagtaattttttttttttttaagattctgtatggcagcactttcagttgcccttgtgtgccggccacagccgcacaagttggcttgtggtttatcccccgctataagtgagagctggagaaacttcaactccataggtctagaggaaacattgttttaggttatttctgtccacccctgtgcgatactatttattgatccaagcagaagagcttggggacactgagtcgaagtggggacatgggattgaagcctgggcactgctgctgcatgagctgtgtgtcctgggtgtgccggcctttctgtgaagggggttggtggcagtgcccacctcactagatgcctctgacccagcctcccctgggggagtgggtggccacagaccctccctgccagagctcctggaaggctcctgcaggcctgacccatctattcctgtagacctggtttaggatgaagtctcggtgcgatttttgcagagttgggtttatctttcaactatagacccttctggctgttctcagccatatcatgtgactctgaatagttggatgaggaatggaaagaaagcaaggatgagagccggtcacgtggcagtctccgcccagcatcggctgtccgcacagaggcacagggcaggcctcctgtgcactccccacctagcactggcctgtcctgaatccccgccttccctggttggaggccagctgtggcatttgcaccctcttctcacctcaccatgcacatgctaactttaaagccttggggtctttcctgtaccccctcctcaaccctggtccaccccctctcaggatcttgtcaacgttatttttcctgtcccgtcttcctatcgctggccttcctttcccatcctaaaaacttgccgaggccctatggctccctccctttctttcccaggcagcttcttatctgggctgtctgtaccccttcctttgcaccacccaccatgccccacgtagctgaaagctgcttatcccaattgtcaactctggccttcttcagcctctgtagcaccagacactgcacctcctgaatgtcctctgcttctctgcttcagaggcccaggctcgccagttctctgacctctcccatatgtctgcttaggactctgctgcagctgtcctcaccagcctccggggaatcccactacccacagggcagggctgtgggctgggctgaaaaaccatctgcatggtccacaagaagcctggcactgggtttccccatgaataacaatgaaaattaatggatgcacaaccttcctggaacgtggaatttctctgggagattccatgcagaggccactggggaggtggcaggcatgcatgtgactgtaggtggctgcagtgttggaaggctcccagcagagcagagagggtgtcagtctcatcagggaacccacctgatggcttctcagccagcagtctcagaggaacatagacgactgctgagaaaggagggaggcagcagtggtcccagcacctgaggcatcctgctgtcatgggaaggtctccgcccaaatgtcagatgcatcagcctgtcacccgctggtccagagctttcagctgtactggtagggggtgggtggtggagtgctgaatgaccttcacaggtgggcctttccagctctagggtcttacgggtgtcggtccacagaaccacggtttttaggttgtgtgtccggggctatgggaacctgtcccccatgatggatcttggtagagacacttccctctgtcatcgtgcccaggaggatgctgcaggtgactacctgcagccctgttctcattcatttggatgccctccagaaatctggggagccatacacctttagagccttttttgctccttatcaagttggcaaggcttggccaattcctgttcaaggctgcattaaaggcatgttcaccatcctggctaatacggtgaaaccccttctctactaaaaatacaaaaaaattagccgggcttggtggcgggtgcctgtagtcccagctactccggaggctgaggcaggggaatggtgtgaacccaggaggcggagcttgcagtgagccgagatcacaccactgcactccagcctgggctcaaaaaagaaaaaaaaaaaaaaaaaaaggcccgttcattctcaaatgcttttggcgtctccagggtgcctcaggaaaacatgaagtgggcattgtagaacttggggctactgtgtaactttggaagaaaaagttaagggtacttttaagtggatactgttttgatgaaattgccaacttcagggagcccagcttggagaaggaggacgtgagtattccttacaaggctccgaaacaattctttcttcacttagttttctttctgtgctctgcatcttatattccagcagggtcttccaatgcatggtttaataactactagaactggccaggtgcagtggctcacgcctgtaatcccagaactttgggaggctaagacaggcagatcacttgaggccaggagttcgagaccagcctggacaacatggtgatacccagtttctactaaaaatacaaaaattagtcgggcatggtgatgtgcacctgtagtcccagctgctcgggaggctgaggcaggagaatcgcttgaacccgggagacagaggttgcaacgagccaagatcgagccactgcgctccggcctgggtgacaggagactccatctcaaaaaataaaattaaaaaaaaactactacaataaattatcaccttggactgtataaaacaacttttaaactagtctttttaaaaagtacacttaaataaaaatctaaacataagagaatgtaaagtgaaaagtgaaagtatgtcttctgttacgcagaggtaactactattaggaatccttcctgaaaatgtccatgcatctactcaggtcatcacacccatggaatcattttacatactattttatgagtgttacttaatatactgatccacagtgcgttttcacggtcacgccatcagttgtaggagtgtgccaagaacagatgggccttgcctttgtaccagaggagtccatttacagttgcaggtaatagaaaacccaattcagactggcctaaacaatgaggggaggttttggctcttgaaactggaaagtcccaaggtggggtgagtttcaggtttgggttgatccaagtggctcagtgacgtcaacaggatcttgtttccatttctctgccttccacagcctccccttcatctatggtggagggaaggagtctaccacagacaaaccccgagcctccccctgatgggtggtgtggtggtgaagccagcaagggaagggatccccggacacacccctcctcatgctttatcccactgaaaccatgcggctgt

SEQ ID NO: 8190 - protein, 143 aa, Homo sapiens; identical to SEQ ID NO: 8184

SEQ ID NO: 8191 - DNA, 1644 bp, Homo sapiens
acttgctctaacttcctcggccgagccgggccgcgccgccgctgccgccgccgcgcgcggcgttacatccttactattcaaagtgccatccacagacctgctgatgggcagcatgagcatcacctgggagcttgctgcgctgtagaatcttgaggggtctccatccagatcagctgaatcagagtttgcattgttaacaagattctgcttctcagaagatgcactattatagatactctaacgccaaggtcagctgctggtacaagtacctccttttcagctacaacatcatcttctggttggctggagttgtcttccttggagtcgggctgtgggcatggagcgaaaagggtgtgctgtccgacctcaccaaagtgacccggatgcatggaatcgaccctgtggtgctggtcctgatggtgggcgtggtgatgttcaccctggggttcgccggctgcgtgggggctctgcgggagaatatctgcttgctcaactttttctgtggcaccatcgtgctcatcttcttcctggagctggctgtggccgtgctggccttcctgttccaggactgggtgagggaccggttccgggagttcttcgagagcaacatcaagtcctaccgggacgatatcgatctgcaaaacctcatcgactcccttcagaaagctgtaagcacctccccagcgggcccccgatagagcatgcacctccctgtgctgcctggagctgagtctagcaggggcatcaggccttctctgtgggttgtctgcctgcagcttggcagacagcagggaggccgtggaacaagccactccacctctggtctgttccactttgccggcttgtggttgcctggtgggccagccctttcccattgggattgggcaggcaagtccagctgtacccgaggccacccaccccccacgtgcccggccctcctctttcggccccagatctttccaatcctgcccaatagccataccagctgcaatcctccttaggcgctgcataccgtaaggcacagcttcttccccccggctcatgactcaccatctgacgctattcctatccccttcctccccgggaccttttccccttcctccctgggaccttttccccttcctgtttaagaagccagggctgcctggaggaagctttgtcagatctagtggaatgtgacctccctggaatatgtgcccaggggtttgtctaagcagttccaggctatggcctttactccatctggtccccatccctcttatctctctcatgtgtggctgcacctggacgcttggaccatagctgtcacagccccctggggaggaacccactccttggccatgtcagcctgtgcaatgcaaggctcttgtttgatctgtgtgctgacagaaagcccagcttccttaagaacttttcatgtggaacactttggttttgagaagaaaataaatcagaaaccattaaaaatctatgattcactctcattattaaccaaaacttgttcacctttatttcatgtattatgggatccagcaaaacccatttatgggaccaaagaccctgcctgtattgttattactaatgtgtattagtctgtgaaagtcaccaaatccccgccatgttttgatgcctctcctttctttt

SEQ ID NO: 8192 - protein, 159 aa, Homo sapiens
MHYYRYSNAKVSCWYKYLLFSYNIIFWLAGVVFLGVGLWAWSEKGVLSDLTKVTRMHGIDPVVLVLMVGVVMFTLGFAGCVGALRENICLLNFFCGTIVLIFFLELAVAVLAFLFQDWVRDRFREFFESNIKSYRDDIDLQNLIDSLQKAVSTSPAGPR

SEQ ID NO: 8193 - DNA, 1488 bp, Homo sapiens
ctcggccgagccgggccgcgccgccgctgccgccgccgcgcgcggattctgcttctcagaagatgcactattatagatactctaacgccaaggtcagctgctggtacaagtacctccttttcagctacaacatcatcttctggttggctggagttgtcttccttggagtcgggctgtgggcatggagcgaaaagggtgtgctgtccgacctcaccaaagtgacccggatgcatggaatcgaccctgtggtgctggtcctgatggtgggcgtggtgatgttcaccctggggttcgccggctgcgtgggggctctgcgggagaatatctgcttgctcaactttttctgtggcaccatcgtgctcatcttcttcctggagctggctgtggccgtgctggccttcctgttccaggactgggtgagggaccggttccgggagttcttcgagagcaacatcaagtcctaccgggacgatatcgatctgcaaaacctcatcgactcccttcagaaagctgtaagcacctccccagcgggcccccgatagagcatgcacctccctgtgctgcctggagctgagtctagcaggggcatcaggccttctctgtgggttgtctgcctgcagcttggcagacagcagggaggccgtggaacaagccactccacctctggtctgttccactttgccggcttgtggttgcctggtgggccagccctttcccattgggattgggcaggcaagtccagctgtacccgaggccacccaccccccacgtgcccggccctcctctttcggccccagatctttccaatcctgcccaatagccataccagctgcaatcctccttaggcgctgcataccgtaaggcacagcttcttccccccggctcatgactcaccatctgacgctattcctatccccttcctccccgggaccttttccccttcctccctgggaccttttccccttcctgtttaagaagccagggctgcctggaggaagctttgtcagatctagtggaatgtgacctccctggaatatgtgcccaggggtttgtctaagcagttccaggctatggcctttactccatctggtccccatccctcttatctctctcatgtgtggctgcacctggacgcttggaccatagctgtcacagccccctggggaggaacccactccttggccatgtcagcctgtgcaatgcaaggctcttgtttgatctgtgtgctgacagaaagcccagcttccttaagaacttttcatgtggaacactttggttttgagaagaaaataaatcagaaaccattaaaaatctatgattcactctcattattaaccaaaacttgttcacctttatttcatgtattatgggatccagcaaaacccatttatgggaccaaagaccctgcctgtattgttattactaatgtgtattagtctgtgaaagtcaccaaatccccgccatgttttgatgcctctcctttctttt

SEQ ID NO: 8194 - protein, 159 aa, Homo sapiens; identical to SEQ ID NO: 8192

SEQ ID NO: 8195 - DNA, 2230 bp, Homo sapiens
ctcggccgagccgggccgcgccgccgctgccgccgccgcgcgcggattctgcttctcagaagatgcactattatagatactctaacgccaaggtcagctgctggtacaagtacctccttttcagctacaacatcatcttctggttggctggagttgtcttccttggagtcgggctgtgggcatggagcgaaaagaaccagtgctgtggcgcatatggccctgaagactgggacctcaacgtctacttcaattgcagcggtgccagctacagccgagagaagtgcggggtccccttctcctgctgcgtgccagatcctgcgcaaaaagttgtgaacacacagtgtggatatgatgtcaggattcagctgaagagcaagtgggatgagtccatcttcacgaaaggctgcatccaggcgctggaaagctggctcccgcggaacatttacattgtggctggcgtcttcatcgccatctcgctgttgcagatatttggcatcttcctggcaaggacgctgatctcagacatcgaggcagtgaaggccggccatcacttctgaggagcagagttgagggagccgagctgagccacgctgggaggccagagcctttctctgccatcagccctacgtccagagggagaggagccgacacccccagagccagtgccccatcttaagcatcagcgtgacgtgacctctctgtttctgcttgctggtgctgaagaccaagggtcccccttgttacctgcccaaacttgtgactgcatccctctggagtctacccagagacagagaatgtgtctttatgtgggagtggtgactctgaaagacagagagggctcctgtggctgccaggagggcttgactcagaccccctgcagctcaagcatgtctgcaggacaccctggtcccctctccactggcatccagacatctgctttgggtcatccacatctgtgggtgggccgtgggtagagggacccacaggcgtggacagggcatctctctccatcaagcaaagcagcatgggggcctgcccgtaacgggaggcggacgtggccccgctgggcctctgagtgccagcgcagtctgctgggacatgcacatatcaggggttgtttgcaggatcctcagccatgttcaagtgaagtaagcctgagccagtgcgtggactggtgccacgggagtgccttgtccactgtccccctgtgtccaccagctattctcctggcgccggaactgcctctggtcttgatagcattaagccctgatggcgccggtggcgcggtgggcatggttcttcactgagagccggctctccttttcttaaagtgtgtaaatagtttatttataggggtaagaatgttctcacaccatttcacttcctcttcctctcctccagcattctcctctgagcagccttagatagtgtccatggctggagccgaccctttgagtccccttgagtgtcttaagaaccagcccacaacagcctctctttctcctccacatactgcagcctccctccatgcatcccacatacaagcactcccccactccccagcgtggcctcactgtcttctggtcttggtgctactgaaattgtcacccagaatttgaatcctgaccctccccactgcaagcccagggagccccagcccaagatggccagcctgaaactgttggccagggctcctcttgtggccatgtacccagggctggctggcctgccatttgcctctccccggagacagccgttcttctgcaaccacaccccgtgcctagccacaaccccaggctgcagctgctcagaagctccaggcattttgtttctggtgaccgcccctaatgggatatcggtgatcactggtccacccttcctgtcagggcttttctggggctgctcttggaaatgaagtcttaagtactgaataactcccctggggatagctggggcatttgtctagctgggctactttctaacactttgccatagctcagaccacttctcatcgttcagggatggactgcaaccttaatttacttgccggagtgtacattctagtgtggtgtatactggtggctgttgatgatgatttttttttttttacacaattctctgtagactaggagaagaatgcttgtgtttttcggaagtgtgatgcttctctttgactgccaaactcttttatggaatatatctttatattaatgctgttttggtcattttt

SEQ ID NO: 8196 - protein, 164 aa, Homo sapiens
MHYYRYSNAKVSCWYKYLLFSYNIIFWLAGVVFLGVGLWAWSEKNQCCGAYGPEDWDLNVYFNCSGASYSREKCGVPFSCCVPDPAQKVVNTQCGYDVRIQLKSKWDESIFTKGCIQALESWLPRNIYIVAGVFIAISLLQIFGIFLARTLISDIEAVKAGHHF

SEQ ID NO: 8197 - DNA, 3651 bp, Homo sapiens
ctcggccgagccgggccgcgccgccgctgccgccgccgcgcgcggattctgcttctcagaagatgcactattatagatactctaacgccaaggtcagctgctggtacaagtacctccttttcagctacaacatcatcttctggttggctggagttgtcttccttggagtcgggctgtgggcatggagcgaaaagaaccagtgctgtggcgcatatggccctgaagactgggacctcaacgtctacttcaattgcagcggtgccagctacagccgagagaagtgcggggtccccttctcctgctgcgtgccagatcctgcgcaaaaagttgtgaacacacagtgtggatatgatgtcaggattcagctgaagagcaagtgggatgagtccatcttcacgaaaggctgcatccaggcgctggaaagctggctcccgcggaacatttacattgtggctggcgtcttcatcgccatctcgctgttgcagatatttggcatcttcctggcaaggacgctgatctcagacatcgaggcagtgaaggccggccatcacttctgaggagcagagttgagggagccgagctgagccacgctgggaggccagagcctttctctgccatcagccctacgtccagagggagaggagccgacacccccagagccagtgccccatcttaagcatcagcgtgacgtgacctctctgtttctgcttgctggtgctgaagaccaagggtcccccttgttacctgcccaaacttgtgactgcatccctctggagtctacccagagacagagaatgtgtctttatgtgggagtggtgactctgaaagacagagagggctcctgtggctgccaggagggcttgactcagaccccctgcagctcaagcatgtctgcaggacaccctggtcccctctccactggcatccagacatctgctttgggtcatccacatctgtgggtgggccgtgggtagagggacccacaggcgtggacagggcatctctctccatcaagcaaagcagcatgggggcctgcccgtaacgggaggcggacgtggccccgctgggcctctgagtgccagcgcagtctgctgggacatgcacatatcaggggttgtttgcaggatcctcagccatgttcaagtgaagtaagcctgagccagtgcgtggactggtgccacgggagtgccttgtccactgtccccctgtgtccaccagctattctcctggcgccggaactgcctctggtcttgatagcattaagccctgatggcgccggtggcgcggtgggcatggttcttcactgagagccggctctccttttcttaaagtgtgtaaatagtttatttataggggtaagaatgttctcacaccatttcacttcctcttcctctcctccagcattctcctctgagcagccttagatagtgtccatggctggagccgaccctttgagtccccttgagtgtcttaagaaccagcccacaacagcctctctttctcctccacatactgcagcctccctccatgcatcccacatacaagcactcccccactccccagcgtggcctcactgtcttctggtcttggtgctactgaaattgtcacccagaatttgaatcctgaccctccccactgcaagcccagggagccccagcccaagatggccagcctgaaactgttggccagggctcctcttgtggccatgtacccagggctggctggcctgccatttgcctctccccggagacagccgttcttctgcaaccacaccccgtgcctagccacaaccccaggctgcagctgctcagaagctccaggcattttgtttctggtgaccgcccctaatgggatatcggtgatcactggtccacccttcctgtcagggcttttctggggctgctcttggaaatgaagtcttaagtactgaataactcccctggggatagctggggcatttgtctagctgggctactttctaacactttgccatagctcagaccacttctcatcgttcagggatggactgcaaccttaatttacttgccggagtgtacattctagtgtggtgtatactggtggctgttgatgatgatttttttttttttacacaattctctgtagactaggagaagaatgcttgtgtttttcggaagtgtgatgcttctctttgactgccaaactcttttatggaatatatctttatattaatgctgttttggtcatttttgtttggggtcactattgagatattgctaagcatctcagtggtaaacgcggctgccagaggaaccaagggatagggtatgtagaccttacagaaggatggatggtaaaggcagtccatcatcagcacaatctgacttacatttcattgagtaattttttttttttttaagattctgtatggcagcactttcagttgcccttgtgtgccggccacagccgcacaagttggcttgtggtttatcccccgctataagtgagagctggagaaacttcaactccataggtctagaggaaacattgttttaggttatttctgtccacccctgtgcgatactatttattgatccaagcagaagagcttggggacactgagtcgaagtggggacatgggattgaagcctgggcactgctgctgcatgagctgtgtgtcctgggtgtgccggcctttctgtgaagggggttggtggcagtgcccacctcactagatgcctctgacccagcctcccctgggggagtgggtggccacagaccctccctgccagagctcctggaaggctcctgcaggcctgacccatctattcctgtagacctggtttaggatgaagtctcggtgcgatttttgcagagttgggtttatctttcaactatagacccttctggctgttctcagccatatcatgtgactctgaatagttggatgaggaatggaaagaaagcaaggatgagagccggtcacgtggcagtctccgcccagcatcggctgtccgcacagaggcacagggcaggcctcctgtgcactccccacctagcactggcctgtcctgaatccccgccttccctggttggaggccagctgtggcatttgcaccctcttctcacctcaccatgcacatgctaactttaaagccttggggtctttcctgtaccccctcctcaaccctggtccaccccctctcaggatcttgtcaacgttatttttcctgtcccgtcttcctatcgctggccttcctttcccatcctaaaaacttgccgaggccctatggctccctccctttctttcccaggcagcttcttatctgggctgtctgtaccccttcctttgcaccacccaccatgccccacgtagctgaaagctgcttatcccaattgtcaactctggccttcttcagcctctgtagcaccagacactgcacctcctgaatgtcctctgcttctctgcttcagaggcccaggctcgccagttctctgacctctcccatatgtctgcttaggactctgctgcagctgtcctcaccagcctccggggaatcccactacccacagggcagggctgtgggctgggctgaaaaaccatctgcatggtccacaagaagcctggcactgggtttccccatgaataacaatgaaaattaatggatgcac

SEQ ID NO: 8198 - protein, 164 aa, Homo sapiens; identical to SEQ ID NO: 8196

SEQ ID NO: 8199 - DNA, 5766 bp, Homo sapiens
ctcggccgagccgggccgcgccgccgctgccgccgccgcgcgcggattctgcttctcagaagatgcactattatagatactctaacgccaaggtcagctgctggtacaagtacctccttttcagctacaacatcatcttctggttggctggagttgtcttccttggagtcgggctgtgggcatggagcgaaaagaaccagtgctgtggcgcatatggccctgaagactgggacctcaacgtctacttcaattgcagcggtgccagctacagccgagagaagtgcggggtccccttctcctgctgcgtgccagatcctgcgcaaaaagttgtgaacacacagtgtggatatgatgtcaggattcagctgaagagcaagtgggatgagtccatcttcacgaaaggctgcatccaggcgctggaaagctggctcccgcggaacatttacattgtggctggcgtcttcatcgccatctcgctgttgcagatatttggcatcttcctggcaaggacgctgatctcagacatcgaggcagtgaaggccggccatcacttctgaggagcagagttgagggagccgagctgagccacgctgggaggccagagcctttctctgccatcagccctacgtccagagggagaggagccgacacccccagagccagtgccccatcttaagcatcagcgtgacgtgacctctctgtttctgcttgctggtgctgaagaccaagggtcccccttgttacctgcccaaacttgtgactgcatccctctggagtctacccagagacagagaatgtgtctttatgtgggagtggtgactctgaaagacagagagggctcctgtggctgccaggagggcttgactcagaccccctgcagctcaagcatgtctgcaggacaccctggtcccctctccactggcatccagacatctgctttgggtcatccacatctgtgggtgggccgtgggtagagggacccacaggcgtggacagggcatctctctccatcaagcaaagcagcatgggggcctgcccgtaacgggaggcggacgtggccccgctgggcctctgagtgccagcgcagtctgctgggacatgcacatatcaggggttgtttgcaggatcctcagccatgttcaagtgaagtaagcctgagccagtgcgtggactggtgccacgggagtgccttgtccactgtccccctgtgtccaccagctattctcctggcgccggaactgcctctggtcttgatagcattaagccctgatggcgccggtggcgcggtgggcatggttcttcactgagagccggctctccttttcttaaagtgtgtaaatagtttatttataggggtaagaatgttctcacaccatttcacttcctcttcctctcctccagcattctcctctgagcagccttagatagtgtccatggctggagccgaccctttgagtccccttgagtgtcttaagaaccagcccacaacagcctctctttctcctccacatactgcagcctccctccatgcatcccacatacaagcactcccccactccccagcgtggcctcactgtcttctggtcttggtgctactgaaattgtcacccagaatttgaatcctgaccctccccactgcaagcccagggagccccagcccaagatggccagcctgaaactgttggccagggctcctcttgtggccatgtacccagggctggctggcctgccatttgcctctccccggagacagccgttcttctgcaaccacaccccgtgcctagccacaaccccaggctgcagctgctcagaagctccaggcattttgtttctggtgaccgcccctaatgggatatcggtgatcactggtccacccttcctgtcagggcttttctggggctgctcttggaaatgaagtcttaagtactgaataactcccctggggatagctggggcatttgtctagctgggctactttctaacactttgccatagctcagaccacttctcatcgttcagggatggactgcaaccttaatttacttgccggagtgtacattctagtgtggtgtatactggtggctgttgatgatgatttttttttttttacacaattctctgtagactaggagaagaatgcttgtgtttttcggaagtgtgatgcttctctttgactgccaaactcttttatggaatatatctttatattaatgctgttttggtcatttttgtttggggtcactattgagatattgctaagcatctcagtggtaaacgcggctgccagaggaaccaagggatagggtatgtagaccttacagaaggatggatggtaaaggcagtccatcatcagcacaatctgacttacatttcattgagtaattttttttttttttaagattctgtatggcagcactttcagttgcccttgtgtgccggccacagccgcacaagttggcttgtggtttatcccccgctataagtgagagctggagaaacttcaactccataggtctagaggaaacattgttttaggttatttctgtccacccctgtgcgatactatttattgatccaagcagaagagcttggggacactgagtcgaagtggggacatgggattgaagcctgggcactgctgctgcatgagctgtgtgtcctgggtgtgccggcctttctgtgaagggggttggtggcagtgcccacctcactagatgcctctgacccagcctcccctgggggagtgggtggccacagaccctccctgccagagctcctggaaggctcctgcaggcctgacccatctattcctgtagacctggtttaggatgaagtctcggtgcgatttttgcagagttgggtttatctttcaactatagacccttctggctgttctcagccatatcatgtgactctgaatagttggatgaggaatggaaagaaagcaaggatgagagccggtcacgtggcagtctccgcccagcatcggctgtccgcacagaggcacagggcaggcctcctgtgcactccccacctagcactggcctgtcctgaatccccgccttccctggttggaggccagctgtggcatttgcaccctcttctcacctcaccatgcacatgctaactttaaagccttggggtctttcctgtaccccctcctcaaccctggtccaccccctctcaggatcttgtcaacgttatttttcctgtcccgtcttcctatcgctggccttcctttcccatcctaaaaacttgccgaggccctatggctccctccctttctttcccaggcagcttcttatctgggctgtctgtaccccttcctttgcaccacccaccatgccccacgtagctgaaagctgcttatcccaattgtcaactctggccttcttcagcctctgtagcaccagacactgcacctcctgaatgtcctctgcttctctgcttcagaggcccaggctcgccagttctctgacctctcccatatgtctgcttaggactctgctgcagctgtcctcaccagcctccggggaatcccactacccacagggcagggctgtgggctgggctgaaaaaccatctgcatggtccacaagaagcctggcactgggtttccccatgaataacaatgaaaattaatggatgcacaaccttcctggaacgtggaatttctctgggagattccatgcagaggccactggggaggtggcaggcatgcatgtgactgtaggtggctgcagtgttggaaggctcccagcagagcagagagggtgtcagtctcatcagggaacccacctgatggcttctcagccagcagtctcagaggaacatagacgactgctgagaaaggagggaggcagcagtggtcccagcacctgaggcatcctgctgtcatgggaaggtctccgcccaaatgtcagatgcatcagcctgtcacccgctggtccagagctttcagctgtactggtagggggtgggtggtggagtgctgaatgaccttcacaggtgggcctttccagctctagggtcttacgggtgtcggtccacagaaccacggtttttaggttgtgtgtccggggctatgggaacctgtcccccatgatggatcttggtagagacacttccctctgtcatcgtgcccaggaggatgctgcaggtgactacctgcagccctgttctcattcatttggatgccctccagaaatctggggagccatacacctttagagccttttttgctccttatcaagttggcaaggcttggccaattcctgttcaaggctgcattaaaggcatgttcaccatcctggctaatacggtgaaaccccttctctactaaaaatacaaaaaaattagccgggcttggtggcgggtgcctgtagtcccagctactccggaggctgaggcaggggaatggtgtgaacccaggaggcggagcttgcagtgagccgagatcacaccactgcactccagcctgggctcaaaaaagaaaaaaaaaaaaaaaaaaaggcccgttcattctcaaatgcttttggcgtctccagggtgcctcaggaaaacatgaagtgggcattgtagaacttggggctactgtgtaactttggaagaaaaagttaagggtacttttaagtggatactgttttgatgaaattgccaacttcagggagcccagcttggagaaggaggacgtgagtattccttacaaggctccgaaacaattctttcttcacttagttttctttctgtgctctgcatcttatattccagcagggtcttccaatgcatggtttaataactactagaactggccaggtgcagtggctcacgcctgtaatcccagaactttgggaggctaagacaggcagatcacttgaggccaggagttcgagaccagcctggacaacatggtgatacccagtttctactaaaaatacaaaaattagtcgggcatggtgatgtgcacctgtagtcccagctgctcgggaggctgaggcaggagaatcgcttgaacccgggagacagaggttgcaacgagccaagatcgagccactgcgctccggcctgggtgacaggagactccatctcaaaaaataaaattaaaaaaaaactactacaataaattatcaccttggactgtataaaacaacttttaaactagtctttttaaaaagtacacttaaataaaaatctaaacataagagaatgtaaagtgaaaagtgaaagtatgtcttctgttacgcagaggtaactactattaggaatccttcctgaaaatgtccatgcatctactcaggtcatcacacccatggaatcattttacatactattttatgagtgttacttaatatactgatccacagtgcgttttcacggtcacgccatcagttgtaggagtgtgccaagaacagatgggccttgcctttgtaccagaggagtccatttacagttgcaggtaatagaaaacccaattcagactggcctaaacaatgaggggaggttttggctcttgaaactggaaagtcccaaggtggggtgagtttcaggtttgggttgatccaagtggctcagtgacgtcaacaggatcttgtttccatttctctgccttccacagcctccccttcatctatggtggagggaaggagtctaccacagacaaaccccgagcctccccctgatgggtggtgtggtggtgaagccagcaagggaagggatccccggacacacccctcctcatgctttatcccactgaaaccatgcggctgt

SEQ ID NO: 8200 - protein, 164 aa, Homo sapiens; identical to SEQ ID NO: 8196

SEQ ID NO: 8201 - DNA, 2488 bp, Homo sapiens
gccgggccgcgccgccgctgccgccgccgcgcgcggattctgcttctcagaagatgcactattatagatactctaacgccaaggtcagctgctggtacaagtacctccttttcagctacaacatcatcttctggggtgtgctgtccgacctcaccaaagtgacccggatgcatggaatcgaccctgtggtgctggtcctgatggtgggcgtggtgatgttcaccctggggttcgccggctgcgtgggggctctgcgggagaatatctgcttgctcaactttttctgtggcaccatcgtgctcatcttcttcctggagctggctgtggccgtgctggccttcctgttccaggactgggtgagggaccggttccgggagttcttcgagagcaacatcaagtcctaccgggacgatatcgatctgcaaaacctcatcgactcccttcagaaagctaaccagtgctgtggcgcatatggccctgaagactgggacctcaacgtctacttcaattgcagcggtgccagctacagccgagagaagtgcggggtccccttctcctgctgcgtgccagatcctgcgcaaaaagttgtgaacacacagtgtggatatgatgtcaggattcagctgaagagcaagtgggatgagtccatcttcacgaaaggctgcatccaggcgctggaaagctggctcccgcggaacatttacattgtggctggcgtcttcatcgccatctcgctgttgcagatatttggcatcttcctggcaaggacgctgatctcagacatcgaggcagtgaaggccggccatcacttctgaggagcagagttgagggagccgagctgagccacgctgggaggccagagcctttctctgccatcagccctacgtccagagggagaggagccgacacccccagagccagtgccccatcttaagcatcagcgtgacgtgacctctctgtttctgcttgctggtgctgaagaccaagggtcccccttgttacctgcccaaacttgtgactgcatccctctggagtctacccagagacagagaatgtgtctttatgtgggagtggtgactctgaaagacagagagggctcctgtggctgccaggagggcttgactcagaccccctgcagctcaagcatgtctgcaggacaccctggtcccctctccactggcatccagacatctgctttgggtcatccacatctgtgggtgggccgtgggtagagggacccacaggcgtggacagggcatctctctccatcaagcaaagcagcatgggggcctgcccgtaacgggaggcggacgtggccccgctgggcctctgagtgccagcgcagtctgctgggacatgcacatatcaggggttgtttgcaggatcctcagccatgttcaagtgaagtaagcctgagccagtgcgtggactggtgccacgggagtgccttgtccactgtccccctgtgtccaccagctattctcctggcgccggaactgcctctggtcttgatagcattaagccctgatggcgccggtggcgcggtgggcatggttcttcactgagagccggctctccttttcttaaagtgtgtaaatagtttatttataggggtaagaatgttctcacaccatttcacttcctcttcctctcctccagcattctcctctgagcagccttagatagtgtccatggctggagccgaccctttgagtccccttgagtgtcttaagaaccagcccacaacagcctctctttctcctccacatactgcagcctccctccatgcatcccacatacaagcactcccccactccccagcgtggcctcactgtcttctggtcttggtgctactgaaattgtcacccagaatttgaatcctgaccctccccactgcaagcccagggagccccagcccaagatggccagcctgaaactgttggccagggctcctcttgtggccatgtacccagggctggctggcctgccatttgcctctccccggagacagccgttcttctgcaaccacaccccgtgcctagccacaaccccaggctgcagctgctcagaagctccaggcattttgtttctggtgaccgcccctaatgggatatcggtgatcactggtccacccttcctgtcagggcttttctggggctgctcttggaaatgaagtcttaagtactgaataactcccctggggatagctggggcatttgtctagctgggctactttctaacactttgccatagctcagaccacttctcatcgttcagggatggactgcaaccttaatttacttgccggagtgtacattctagtgtggtgtatactggtggctgttgatgatgatttttttttttttacacaattctctgtagactaggagaagaatgcttgtgtttttcggaagtgtgatgcttctctttgactgccaaactcttttatggaatatatctttatattaatgctgttttggtcattttt

SEQ ID NO: 8202 - protein, 253 aa, Homo sapiens
MHYYRYSNAKVSCWYKYLLFSYNIIFWGVLSDLTKVTRMHGIDPVVLVLMVGVVMFTLGFAGCVGALRENICLLNFFCGTIVLIFFLELAVAVLAFLFQDWVRDRFREFFESNIKSYRDDIDLQNLIDSLQKANQCCGAYGPEDWDLNVYFNCSGASYSREKCGVPFSCCVPDPAQKVVNTQCGYDVRIQLKSKWDESIFTKGCIQALESWLPRNIYIVAGVFIAISLLQIFGIFLARTLISDIEAVKAGHHF

SEQ ID NO: 8203 - DNA, 673 bp, Homo sapiens
gggcaggctggggttgaaactcttcaccccttgcggtctgtactgcctcccaactgagcagccagggagaaggcctagagcctgtgcctttcagctagatagctggaggaactggctcctccctccttaggctgtgctggcctgagctgggagcctgagagctggggcagttgtctctaaagtggcttctgggattctggtaagaggacttggggtggagtcgaaagcagggagccctgtgagttgagacgaactcttgcaatgttgccttggctggtctcgaactcatcttctgggttcaagctgtccgtctgcctcggactcccaaagtgctaggattacagcgttacatccttactattcaaagtgccatccacagacctgctgatgggcagcatgagcatcacctgggagcttgctgcgctgtagaatcttgaggggtctccatccagatcagctgaatcagagtttgcattgttaacaagattctgcttctcagaagatgcactattatagatactctaacgccaaggtcagctgctggtacaagtacctccttttcagctacaacatcatcttctggttggctggagttgtcttccttggagtcgggctgtgggcatggagcgaaaagggtgtgctgtccgacctcaccaaagtgacccggatgcat

SEQ ID NO: 8204 - protein, 56 aa, Homo sapiens
MHYYRYSNAKVSCWYKYLLFSYNIIFWLAGVVFLGVGLWAWSEKGVLSDLTKVTRM

SEQ ID NO: 8205 - DNA, 1230 bp, Homo sapiens
gcgttacatccttactattcaaagtgccatccacagacctgctgatgggcagcatgagcatcactgggcctctgagtgccagcgcagtctgctgggacatgcacatatcaggggttgtttgcaggatcctcagccatgttcaagtgaagtaagcctgagccagtgcgtggactggtgccacgggagtgccttgtccactgtccccctgtgtccaccagctattctcctggcgccggaactgcctctggtcttgatagcattaagccctgatggcgccggtggcgcggtgggcatggttcttcactgagagccggctctccttttcttaaagtgtgtaaatagtttatttataggggtaagaatgttctcacaccatttcacttcctcttcctctcctccagcattctcctctgagcagccttagatagtgtccatggctggagccgaccctttgagtccccttgagtgtcttaagaaccagcccacaacagcctctctttctcctccacatactgcagcctccctccatgcatcccacatacaagcactcccccactccccagcgtggcctcactgtcttctggtcttggtgctactgaaattgtcacccagaatttgaatcctgaccctccccactgcaagcccagggagccccagcccaagatggccagcctgaaactgttggccagggctcctcttgtggccatgtacccagggctggctggcctgccatttgcctctccccggagacagccgttcttctgcaaccacaccccgtgcctagccacaaccccaggctgcagctgctcagaagctccaggcattttgtttctggtgaccgcccctaatgggatatcggtgatcactggtccacccttcctgtcagggcttttctggggctgctcttggaaatgaagtcttaagtactgaataactcccctggggatagctggggcatttgtctagctgggctactttctaacactttgccatagctcagaccacttctcatcgttcagggatggactgcaaccttaatttacttgccggagtgtacattctagtgtggtgtatactggtggctgttgatgatgatttttttttttttacacaattctctgtagactaggagaagaatgcttgtgtttttcggaagtgtgatgcttctctttgactgccaaactcttttatggaatatatctttatattaatgctgttttggtcattttt

SEQ ID NO: 8206 - protein, 35 aa, Homo sapiens
MGSMSITGPLSASAVCWDMHISGVVCRILSHVQVK

SEQ ID NO: 8207 - DNA, 2651 bp, Homo sapiens
gcgttacatccttactattcaaagtgccatccacagacctgctgatgggcagcatgagcatcactgggcctctgagtgccagcgcagtctgctgggacatgcacatatcaggggttgtttgcaggatcctcagccatgttcaagtgaagtaagcctgagccagtgcgtggactggtgccacgggagtgccttgtccactgtccccctgtgtccaccagctattctcctggcgccggaactgcctctggtcttgatagcattaagccctgatggcgccggtggcgcggtgggcatggttcttcactgagagccggctctccttttcttaaagtgtgtaaatagtttatttataggggtaagaatgttctcacaccatttcacttcctcttcctctcctccagcattctcctctgagcagccttagatagtgtccatggctggagccgaccctttgagtccccttgagtgtcttaagaaccagcccacaacagcctctctttctcctccacatactgcagcctccctccatgcatcccacatacaagcactcccccactccccagcgtggcctcactgtcttctggtcttggtgctactgaaattgtcacccagaatttgaatcctgaccctccccactgcaagcccagggagccccagcccaagatggccagcctgaaactgttggccagggctcctcttgtggccatgtacccagggctggctggcctgccatttgcctctccccggagacagccgttcttctgcaaccacaccccgtgcctagccacaaccccaggctgcagctgctcagaagctccaggcattttgtttctggtgaccgcccctaatgggatatcggtgatcactggtccacccttcctgtcagggcttttctggggctgctcttggaaatgaagtcttaagtactgaataactcccctggggatagctggggcatttgtctagctgggctactttctaacactttgccatagctcagaccacttctcatcgttcagggatggactgcaaccttaatttacttgccggagtgtacattctagtgtggtgtatactggtggctgttgatgatgatttttttttttttacacaattctctgtagactaggagaagaatgcttgtgtttttcggaagtgtgatgcttctctttgactgccaaactcttttatggaatatatctttatattaatgctgttttggtcatttttgtttggggtcactattgagatattgctaagcatctcagtggtaaacgcggctgccagaggaaccaagggatagggtatgtagaccttacagaaggatggatggtaaaggcagtccatcatcagcacaatctgacttacatttcattgagtaattttttttttttttaagattctgtatggcagcactttcagttgcccttgtgtgccggccacagccgcacaagttggcttgtggtttatcccccgctataagtgagagctggagaaacttcaactccataggtctagaggaaacattgttttaggttatttctgtccacccctgtgcgatactatttattgatccaagcagaagagcttggggacactgagtcgaagtggggacatgggattgaagcctgggcactgctgctgcatgagctgtgtgtcctgggtgtgccggcctttctgtgaagggggttggtggcagtgcccacctcactagatgcctctgacccagcctcccctgggggagtgggtggccacagaccctccctgccagagctcctggaaggctcctgcaggcctgacccatctattcctgtagacctggtttaggatgaagtctcggtgcgatttttgcagagttgggtttatctttcaactatagacccttctggctgttctcagccatatcatgtgactctgaatagttggatgaggaatggaaagaaagcaaggatgagagccggtcacgtggcagtctccgcccagcatcggctgtccgcacagaggcacagggcaggcctcctgtgcactccccacctagcactggcctgtcctgaatccccgccttccctggttggaggccagctgtggcatttgcaccctcttctcacctcaccatgcacatgctaactttaaagccttggggtctttcctgtaccccctcctcaaccctggtccaccccctctcaggatcttgtcaacgttatttttcctgtcccgtcttcctatcgctggccttcctttcccatcctaaaaacttgccgaggccctatggctccctccctttctttcccaggcagcttcttatctgggctgtctgtaccccttcctttgcaccacccaccatgccccacgtagctgaaagctgcttatcccaattgtcaactctggccttcttcagcctctgtagcaccagacactgcacctcctgaatgtcctctgcttctctgcttcagaggcccaggctcgccagttctctgacctctcccatatgtctgcttaggactctgctgcagctgtcctcaccagcctccggggaatcccactacccacagggcagggctgtgggctgggctgaaaaaccatctgcatggtccacaagaagcctggcactgggtttccccatgaataacaatgaaaattaatggatgcac

SEQ ID NO: 8208 - protein, 35 aa, Homo sapiens; identical to SEQ ID NO: 8206

SEQ ID NO: 8209 - DNA, 4766 bp, Homo sapiens
gcgttacatccttactattcaaagtgccatccacagacctgctgatgggcagcatgagcatcactgggcctctgagtgccagcgcagtctgctgggacatgcacatatcaggggttgtttgcaggatcctcagccatgttcaagtgaagtaagcctgagccagtgcgtggactggtgccacgggagtgccttgtccactgtccccctgtgtccaccagctattctcctggcgccggaactgcctctggtcttgatagcattaagccctgatggcgccggtggcgcggtgggcatggttcttcactgagagccggctctccttttcttaaagtgtgtaaatagtttatttataggggtaagaatgttctcacaccatttcacttcctcttcctctcctccagcattctcctctgagcagccttagatagtgtccatggctggagccgaccctttgagtccccttgagtgtcttaagaaccagcccacaacagcctctctttctcctccacatactgcagcctccctccatgcatcccacatacaagcactcccccactccccagcgtggcctcactgtcttctggtcttggtgctactgaaattgtcacccagaatttgaatcctgaccctccccactgcaagcccagggagccccagcccaagatggccagcctgaaactgttggccagggctcctcttgtggccatgtacccagggctggctggcctgccatttgcctctccccggagacagccgttcttctgcaaccacaccccgtgcctagccacaaccccaggctgcagctgctcagaagctccaggcattttgtttctggtgaccgcccctaatgggatatcggtgatcactggtccacccttcctgtcagggcttttctggggctgctcttggaaatgaagtcttaagtactgaataactcccctggggatagctggggcatttgtctagctgggctactttctaacactttgccatagctcagaccacttctcatcgttcagggatggactgcaaccttaatttacttgccggagtgtacattctagtgtggtgtatactggtggctgttgatgatgatttttttttttttacacaattctctgtagactaggagaagaatgcttgtgtttttcggaagtgtgatgcttctctttgactgccaaactcttttatggaatatatctttatattaatgctgttttggtcatttttgtttggggtcactattgagatattgctaagcatctcagtggtaaacgcggctgccagaggaaccaagggatagggtatgtagaccttacagaaggatggatggtaaaggcagtccatcatcagcacaatctgacttacatttcattgagtaattttttttttttttaagattctgtatggcagcactttcagttgcccttgtgtgccggccacagccgcacaagttggcttgtggtttatcccccgctataagtgagagctggagaaacttcaactccataggtctagaggaaacattgttttaggttatttctgtccacccctgtgcgatactatttattgatccaagcagaagagcttggggacactgagtcgaagtggggacatgggattgaagcctgggcactgctgctgcatgagctgtgtgtcctgggtgtgccggcctttctgtgaagggggttggtggcagtgcccacctcactagatgcctctgacccagcctcccctgggggagtgggtggccacagaccctccctgccagagctcctggaaggctcctgcaggcctgacccatctattcctgtagacctggtttaggatgaagtctcggtgcgatttttgcagagttgggtttatctttcaactatagacccttctggctgttctcagccatatcatgtgactctgaatagttggatgaggaatggaaagaaagcaaggatgagagccggtcacgtggcagtctccgcccagcatcggctgtccgcacagaggcacagggcaggcctcctgtgcactccccacctagcactggcctgtcctgaatccccgccttccctggttggaggccagctgtggcatttgcaccctcttctcacctcaccatgcacatgctaactttaaagccttggggtctttcctgtaccccctcctcaaccctggtccaccccctctcaggatcttgtcaacgttatttttcctgtcccgtcttcctatcgctggccttcctttcccatcctaaaaacttgccgaggccctatggctccctccctttctttcccaggcagcttcttatctgggctgtctgtaccccttcctttgcaccacccaccatgccccacgtagctgaaagctgcttatcccaattgtcaactctggccttcttcagcctctgtagcaccagacactgcacctcctgaatgtcctctgcttctctgcttcagaggcccaggctcgccagttctctgacctctcccatatgtctgcttaggactctgctgcagctgtcctcaccagcctccggggaatcccactacccacagggcagggctgtgggctgggctgaaaaaccatctgcatggtccacaagaagcctggcactgggtttccccatgaataacaatgaaaattaatggatgcacaaccttcctggaacgtggaatttctctgggagattccatgcagaggccactggggaggtggcaggcatgcatgtgactgtaggtggctgcagtgttggaaggctcccagcagagcagagagggtgtcagtctcatcagggaacccacctgatggcttctcagccagcagtctcagaggaacatagacgactgctgagaaaggagggaggcagcagtggtcccagcacctgaggcatcctgctgtcatgggaaggtctccgcccaaatgtcagatgcatcagcctgtcacccgctggtccagagctttcagctgtactggtagggggtgggtggtggagtgctgaatgaccttcacaggtgggcctttccagctctagggtcttacgggtgtcggtccacagaaccacggtttttaggttgtgtgtccggggctatgggaacctgtcccccatgatggatcttggtagagacacttccctctgtcatcgtgcccaggaggatgctgcaggtgactacctgcagccctgttctcattcatttggatgccctccagaaatctggggagccatacacctttagagccttttttgctccttatcaagttggcaaggcttggccaattcctgttcaaggctgcattaaaggcatgttcaccatcctggctaatacggtgaaaccccttctctactaaaaatacaaaaaaattagccgggcttggtggcgggtgcctgtagtcccagctactccggaggctgaggcaggggaatggtgtgaacccaggaggcggagcttgcagtgagccgagatcacaccactgcactccagcctgggctcaaaaaagaaaaaaaaaaaaaaaaaaaggcccgttcattctcaaatgcttttggcgtctccagggtgcctcaggaaaacatgaagtgggcattgtagaacttggggctactgtgtaactttggaagaaaaagttaagggtacttttaagtggatactgttttgatgaaattgccaacttcagggagcccagcttggagaaggaggacgtgagtattccttacaaggctccgaaacaattctttcttcacttagttttctttctgtgctctgcatcttatattccagcagggtcttccaatgcatggtttaataactactagaactggccaggtgcagtggctcacgcctgtaatcccagaactttgggaggctaagacaggcagatcacttgaggccaggagttcgagaccagcctggacaacatggtgatacccagtttctactaaaaatacaaaaattagtcgggcatggtgatgtgcacctgtagtcccagctgctcgggaggctgaggcaggagaatcgcttgaacccgggagacagaggttgcaacgagccaagatcgagccactgcgctccggcctgggtgacaggagactccatctcaaaaaataaaattaaaaaaaaactactacaataaattatcaccttggactgtataaaacaacttttaaactagtctttttaaaaagtacacttaaataaaaatctaaacataagagaatgtaaagtgaaaagtgaaagtatgtcttctgttacgcagaggtaactactattaggaatccttcctgaaaatgtccatgcatctactcaggtcatcacacccatggaatcattttacatactattttatgagtgttacttaatatactgatccacagtgcgttttcacggtcacgccatcagttgtaggagtgtgccaagaacagatgggccttgcctttgtaccagaggagtccatttacagttgcaggtaatagaaaacccaattcagactggcctaaacaatgaggggaggttttggctcttgaaactggaaagtcccaaggtggggtgagtttcaggtttgggttgatccaagtggctcagtgacgtcaacaggatcttgtttccatttctctgccttccacagcctccccttcatctatggtggagggaaggagtctaccacagacaaaccccgagcctccccctgatgggtggtgtggtggtgaagccagcaagggaagggatccccggacacacccctcctcatgctttatcccactgaaaccatgcggctgt

SEQ ID NO: 8210 - protein, 35 aa, Homo sapiens; identical to SEQ ID NO: 8206

SEQ ID NO: 8211 - DNA, 463 bp, Homo sapiens
aaatcctcctggggccttcggagatccttccatctggaccagtgcacagaattccctttacatcttttgggatacaccctaaagaagatccagtctttgttcaccttcacgagtttcttcaatgtgaaagctacaggaggctttgttcaaagaaactctgacccagaaacccaacatggaagcaggcagagcaggacacttttatcttcaggtggctgggggaaaggaaggcttcacaaggtgcacactaaaaaccatgggcctactgtgactgacgccatgctccacaggacagcagaacggctcaggagctgcctccagaatcatatggcaactagttcaacagaactgtgatagacttggaaatgcatgttttgaagagctgtcattcacagcagcttgaaaaagcccccactggccaaatctggaacaatctgagcggcaaaataaacaataataacaa

SEQ ID NO: 8212 - protein, 31 aa, Homo sapiens
MEAGRAGHFYLQVAGGKEGFTRCTLKTMGLL

SEQ ID NO: 8213 - DNA, 257 bp, Homo sapiens
ataaaaatttgtaagcatgtgcttaaaggccaaagtggaatgttaagagcatgaaaatggctgcatggggtggtggtggacttacaagtgattttccaaaaaggtttccagcatcacacttaccattaccacctttgtattataaatgaaaatggggccgctgctggttggaggtgcccctgctgggaaggagaatgcttgctacaatatataaggctggcagtcatcataaacagggctccttggcttcagtgttg

SEQ ID NO: 8214 - protein, 32 aa, Homo sapiens
MKMAAWGGGGLTSDFPKRFPASHLPLPPLYYK

SEQ ID NO: 8215 - DNA, 601 bp, Homo sapiens
agttggctggagttgtcttccttggagtcgggctgtgggcatggagcgaaaagggtgtgctgtccgacctcaccaaagtgacccagggctggctggcctgccatttgcctctccccggagacagccgttcttctgcaaccacaccccgtgcctagccacaaccccaggctgcagctgctcagaagctccaggcattttgtttctggtgaccgcccctaatgggatatcggtgatcactggtccacccttcctgtcagggcttttctggggctgctcttggaaatgaagtcttaagtactgaataactcccctggggatagctggggcatttgtctagctgggctactttctaacactttgccatagctcagaccacttctcatcgttcagggatggactgcaaccttaatttacttgccggagtgtacattctagtgtggtgtatactggtggctgttgatgatgatttttttttttttacacaattctctgtagactaggagaagaatgcttgtgtttttcggaagtgtgatgcttctctttgactgccaaactcttttatggaatatatctttatattaatgctgttttggtcattttt

SEQ ID NO: 8216 - protein, 81 aa, Homo sapiens
MERKGCAVRPHQSDPGLAGLPFASPRRQPFFCNHTPCLATTPGCSCSEAPGILFLVTAPNGISVITGPPFLSGLFWGCSWK

SEQ ID NO: 8217 - DNA, 2022 bp, Homo sapiens
agttggctggagttgtcttccttggagtcgggctgtgggcatggagcgaaaagggtgtgctgtccgacctcaccaaagtgacccagggctggctggcctgccatttgcctctccccggagacagccgttcttctgcaaccacaccccgtgcctagccacaaccccaggctgcagctgctcagaagctccaggcattttgtttctggtgaccgcccctaatgggatatcggtgatcactggtccacccttcctgtcagggcttttctggggctgctcttggaaatgaagtcttaagtactgaataactcccctggggatagctggggcatttgtctagctgggctactttctaacactttgccatagctcagaccacttctcatcgttcagggatggactgcaaccttaatttacttgccggagtgtacattctagtgtggtgtatactggtggctgttgatgatgatttttttttttttacacaattctctgtagactaggagaagaatgcttgtgtttttcggaagtgtgatgcttctctttgactgccaaactcttttatggaatatatctttatattaatgctgttttggtcatttttgtttggggtcactattgagatattgctaagcatctcagtggtaaacgcggctgccagaggaaccaagggatagggtatgtagaccttacagaaggatggatggtaaaggcagtccatcatcagcacaatctgacttacatttcattgagtaattttttttttttttaagattctgtatggcagcactttcagttgcccttgtgtgccggccacagccgcacaagttggcttgtggtttatcccccgctataagtgagagctggagaaacttcaactccataggtctagaggaaacattgttttaggttatttctgtccacccctgtgcgatactatttattgatccaagcagaagagcttggggacactgagtcgaagtggggacatgggattgaagcctgggcactgctgctgcatgagctgtgtgtcctgggtgtgccggcctttctgtgaagggggttggtggcagtgcccacctcactagatgcctctgacccagcctcccctgggggagtgggtggccacagaccctccctgccagagctcctggaaggctcctgcaggcctgacccatctattcctgtagacctggtttaggatgaagtctcggtgcgatttttgcagagttgggtttatctttcaactatagacccttctggctgttctcagccatatcatgtgactctgaatagttggatgaggaatggaaagaaagcaaggatgagagccggtcacgtggcagtctccgcccagcatcggctgtccgcacagaggcacagggcaggcctcctgtgcactccccacctagcactggcctgtcctgaatccccgccttccctggttggaggccagctgtggcatttgcaccctcttctcacctcaccatgcacatgctaactttaaagccttggggtctttcctgtaccccctcctcaaccctggtccaccccctctcaggatcttgtcaacgttatttttcctgtcccgtcttcctatcgctggccttcctttcccatcctaaaaacttgccgaggccctatggctccctccctttctttcccaggcagcttcttatctgggctgtctgtaccccttcctttgcaccacccaccatgccccacgtagctgaaagctgcttatcccaattgtcaactctggccttcttcagcctctgtagcaccagacactgcacctcctgaatgtcctctgcttctctgcttcagaggcccaggctcgccagttctctgacctctcccatatgtctgcttaggactctgctgcagctgtcctcaccagcctccggggaatcccactacccacagggcagggctgtgggctgggctgaaaaaccatctgcatggtccacaagaagcctggcactgggtttccccatgaataacaatgaaaattaatggatgcac

SEQ ID NO: 8218 - protein, 81 aa, Homo sapiens; identical to SEQ ID NO: 8216

SEQ ID NO: 8219 - DNA, 4137 bp, Homo sapiens
agttggctggagttgtcttccttggagtcgggctgtgggcatggagcgaaaagggtgtgctgtccgacctcaccaaagtgacccagggctggctggcctgccatttgcctctccccggagacagccgttcttctgcaaccacaccccgtgcctagccacaaccccaggctgcagctgctcagaagctccaggcattttgtttctggtgaccgcccctaatgggatatcggtgatcactggtccacccttcctgtcagggcttttctggggctgctcttggaaatgaagtcttaagtactgaataactcccctggggatagctggggcatttgtctagctgggctactttctaacactttgccatagctcagaccacttctcatcgttcagggatggactgcaaccttaatttacttgccggagtgtacattctagtgtggtgtatactggtggctgttgatgatgatttttttttttttacacaattctctgtagactaggagaagaatgcttgtgtttttcggaagtgtgatgcttctctttgactgccaaactcttttatggaatatatctttatattaatgctgttttggtcatttttgtttggggtcactattgagatattgctaagcatctcagtggtaaacgcggctgccagaggaaccaagggatagggtatgtagaccttacagaaggatggatggtaaaggcagtccatcatcagcacaatctgacttacatttcattgagtaattttttttttttttaagattctgtatggcagcactttcagttgcccttgtgtgccggccacagccgcacaagttggcttgtggtttatcccccgctataagtgagagctggagaaacttcaactccataggtctagaggaaacattgttttaggttatttctgtccacccctgtgcgatactatttattgatccaagcagaagagcttggggacactgagtcgaagtggggacatgggattgaagcctgggcactgctgctgcatgagctgtgtgtcctgggtgtgccggcctttctgtgaagggggttggtggcagtgcccacctcactagatgcctctgacccagcctcccctgggggagtgggtggccacagaccctccctgccagagctcctggaaggctcctgcaggcctgacccatctattcctgtagacctggtttaggatgaagtctcggtgcgatttttgcagagttgggtttatctttcaactatagacccttctggctgttctcagccatatcatgtgactctgaatagttggatgaggaatggaaagaaagcaaggatgagagccggtcacgtggcagtctccgcccagcatcggctgtccgcacagaggcacagggcaggcctcctgtgcactccccacctagcactggcctgtcctgaatccccgccttccctggttggaggccagctgtggcatttgcaccctcttctcacctcaccatgcacatgctaactttaaagccttggggtctttcctgtaccccctcctcaaccctggtccaccccctctcaggatcttgtcaacgttatttttcctgtcccgtcttcctatcgctggccttcctttcccatcctaaaaacttgccgaggccctatggctccctccctttctttcccaggcagcttcttatctgggctgtctgtaccccttcctttgcaccacccaccatgccccacgtagctgaaagctgcttatcccaattgtcaactctggccttcttcagcctctgtagcaccagacactgcacctcctgaatgtcctctgcttctctgcttcagaggcccaggctcgccagttctctgacctctcccatatgtctgcttaggactctgctgcagctgtcctcaccagcctccggggaatcccactacccacagggcagggctgtgggctgggctgaaaaaccatctgcatggtccacaagaagcctggcactgggtttccccatgaataacaatgaaaattaatggatgcacaaccttcctggaacgtggaatttctctgggagattccatgcagaggccactggggaggtggcaggcatgcatgtgactgtaggtggctgcagtgttggaaggctcccagcagagcagagagggtgtcagtctcatcagggaacccacctgatggcttctcagccagcagtctcagaggaacatagacgactgctgagaaaggagggaggcagcagtggtcccagcacctgaggcatcctgctgtcatgggaaggtctccgcccaaatgtcagatgcatcagcctgtcacccgctggtccagagctttcagctgtactggtagggggtgggtggtggagtgctgaatgaccttcacaggtgggcctttccagctctagggtcttacgggtgtcggtccacagaaccacggtttttaggttgtgtgtccggggctatgggaacctgtcccccatgatggatcttggtagagacacttccctctgtcatcgtgcccaggaggatgctgcaggtgactacctgcagccctgttctcattcatttggatgccctccagaaatctggggagccatacacctttagagccttttttgctccttatcaagttggcaaggcttggccaattcctgttcaaggctgcattaaaggcatgttcaccatcctggctaatacggtgaaaccccttctctactaaaaatacaaaaaaattagccgggcttggtggcgggtgcctgtagtcccagctactccggaggctgaggcaggggaatggtgtgaacccaggaggcggagcttgcagtgagccgagatcacaccactgcactccagcctgggctcaaaaaagaaaaaaaaaaaaaaaaaaaggcccgttcattctcaaatgcttttggcgtctccagggtgcctcaggaaaacatgaagtgggcattgtagaacttggggctactgtgtaactttggaagaaaaagttaagggtacttttaagtggatactgttttgatgaaattgccaacttcagggagcccagcttggagaaggaggacgtgagtattccttacaaggctccgaaacaattctttcttcacttagttttctttctgtgctctgcatcttatattccagcagggtcttccaatgcatggtttaataactactagaactggccaggtgcagtggctcacgcctgtaatcccagaactttgggaggctaagacaggcagatcacttgaggccaggagttcgagaccagcctggacaacatggtgatacccagtttctactaaaaatacaaaaattagtcgggcatggtgatgtgcacctgtagtcccagctgctcgggaggctgaggcaggagaatcgcttgaacccgggagacagaggttgcaacgagccaagatcgagccactgcgctccggcctgggtgacaggagactccatctcaaaaaataaaattaaaaaaaaactactacaataaattatcaccttggactgtataaaacaacttttaaactagtctttttaaaaagtacacttaaataaaaatctaaacataagagaatgtaaagtgaaaagtgaaagtatgtcttctgttacgcagaggtaactactattaggaatccttcctgaaaatgtccatgcatctactcaggtcatcacacccatggaatcattttacatactattttatgagtgttacttaatatactgatccacagtgcgttttcacggtcacgccatcagttgtaggagtgtgccaagaacagatgggccttgcctttgtaccagaggagtccatttacagttgcaggtaatagaaaacccaattcagactggcctaaacaatgaggggaggttttggctcttgaaactggaaagtcccaaggtggggtgagtttcaggtttgggttgatccaagtggctcagtgacgtcaacaggatcttgtttccatttctctgccttccacagcctccccttcatctatggtggagggaaggagtctaccacagacaaaccccgagcctccccctgatgggtggtgtggtggtgaagccagcaagggaagggatccccggacacacccctcctcatgctttatcccactgaaaccatgcggctgt

SEQ ID NO: 8220 - protein, 81 aa, Homo sapiens; identical to SEQ ID NO: 8216

SEQ ID NO: 8221 - DNA, 519 bp, Homo sapiens
agaagacgtctctcgttaaggggacagctgcaggagtgtaggtgccttgttctggcctccgtgtggaggcagtagtgacaaagagggaggcaggcctggggcaggggcgaggctctgtcctccaggcattttgtttctggtgaccgcccctaatgggatatcggtgatcactggtccacccttcctgtcagggcttttctggggctgctcttggaaatgaagtcttaagtactgaataactcccctggggatagctggggcatttgtctagctgggctactttctaacactttgccatagctcagaccacttctcatcgttcagggatggactgcaaccttaatttacttgccggagtgtacattctagtgtggtgtatactggtggctgttgatgatgatttttttttttttacacaattctctgtagactaggagaagaatgcttgtgtttttcggaagtgtgatgcttctctttgactgccaaactcttttatggaatatatctttatattaatgc

SEQ ID NO: 8222 - protein, 35 aa, Homo sapiens [sequence omitted]

SEQ ID NO: 8223 - DNA, 1956 bp, Homo sapiens
agaagacgtctctcgttaaggggacagctgcaggagtgtaggtgccttgttctggcctccgtgtggaggcagtagtgacaaagagggaggcaggcctggggcaggggcgaggctctgtcctccaggcattttgtttctggtgaccgcccctaatgggatatcggtgatcactggtccacccttcctgtcagggcttttctggggctgctcttggaaatgaagtcttaagtactgaataactcccctggggatagctggggcatttgtctagctgggctactttctaacactttgccatagctcagaccacttctcatcgttcagggatggactgcaaccttaatttacttgccggagtgtacattctagtgtggtgtatactggtggctgttgatgatgatttttttttttttacacaattctctgtagactaggagaagaatgcttgtgtttttcggaagtgtgatgcttctctttgactgccaaactcttttatggaatatatctttatattaatgctgttttggtcatttttgtttggggtcactattgagatattgctaagcatctcagtggtaaacgcggctgccagaggaaccaagggatagggtatgtagaccttacagaaggatggatggtaaaggcagtccatcatcagcacaatctgacttacatttcattgagtaattttttttttttttaagattctgtatggcagcactttcagttgcccttgtgtgccggccacagccgcacaagttggcttgtggtttatcccccgctataagtgagagctggagaaacttcaactccataggtctagaggaaacattgttttaggttatttctgtccacccctgtgcgatactatttattgatccaagcagaagagcttggggacactgagtcgaagtggggacatgggattgaagcctgggcactgctgctgcatgagctgtgtgtcctgggtgtgccggcctttctgtgaagggggttggtggcagtgcccacctcactagatgcctctgacccagcctcccctgggggagtgggtggccacagaccctccctgccagagctcctggaaggctcctgcaggcctgacccatctattcctgtagacctggtttaggatgaagtctcggtgcgatttttgcagagttgggtttatctttcaactatagacccttctggctgttctcagccatatcatgtgactctgaatagttggatgaggaatggaaagaaagcaaggatgagagccggtcacgtggcagtctccgcccagcatcggctgtccgcacagaggcacagggcaggcctcctgtgcactccccacctagcactggcctgtcctgaatccccgccttccctggttggaggccagctgtggcatttgcaccctcttctcacctcaccatgcacatgctaactttaaagccttggggtctttcctgtaccccctcctcaaccctggtccaccccctctcaggatcttgtcaacgttatttttcctgtcccgtcttcctatcgctggccttcctttcccatcctaaaaacttgccgaggccctatggctccctccctttctttcccaggcagcttcttatctgggctgtctgtaccccttcctttgcaccacccaccatgccccacgtagctgaaagctgcttatcccaattgtcaactctggccttcttcagcctctgtagcaccagacactgcacctcctgaatgtcctctgcttctctgcttcagaggcccaggctcgccagttctctgacctctcccatatgtctgcttaggactctgctgcagctgtcctcaccagcctccggggaatcccactacccacagggcagggctgtgggctgggctgaaaaaccatctgcatggtccacaagaagcctggcactgggtttccccatgaataacaatgaaaattaatggatgcac

SEQ ID NO: 8224 - protein, 104 aa, Homo sapiens
MHMLTLKPWGLSCTPSSTLVHPLSGSCQRYFSCPVFLSLAFLSHPKNLPRPYGSLPFFPRQLLIWAVCTPSFAPPTMPHVAESCLSQLSTLAFFSLCSTRHCTS

SEQ ID NO: 8225 - DNA, 4071 bp, Homo sapiens
agaagacgtctctcgttaaggggacagctgcaggagtgtaggtgccttgttctggcctccgtgtggaggcagtagtgacaaagagggaggcaggcctggggcaggggcgaggctctgtcctccaggcattttgtttctggtgaccgcccctaatgggatatcggtgatcactggtccacccttcctgtcagggcttttctggggctgctcttggaaatgaagtcttaagtactgaataactcccctggggatagctggggcatttgtctagctgggctactttctaacactttgccatagctcagaccacttctcatcgttcagggatggactgcaaccttaatttacttgccggagtgtacattctagtgtggtgtatactggtggctgttgatgatgatttttttttttttacacaattctctgtagactaggagaagaatgcttgtgtttttcggaagtgtgatgcttctctttgactgccaaactcttttatggaatatatctttatattaatgctgttttggtcatttttgtttggggtcactattgagatattgctaagcatctcagtggtaaacgcggctgccagaggaaccaagggatagggtatgtagaccttacagaaggatggatggtaaaggcagtccatcatcagcacaatctgacttacatttcattgagtaattttttttttttttaagattctgtatggcagcactttcagttgcccttgtgtgccggccacagccgcacaagttggcttgtggtttatcccccgctataagtgagagctggagaaacttcaactccataggtctagaggaaacattgttttaggttatttctgtccacccctgtgcgatactatttattgatccaagcagaagagcttggggacactgagtcgaagtggggacatgggattgaagcctgggcactgctgctgcatgagctgtgtgtcctgggtgtgccggcctttctgtgaagggggttggtggcagtgcccacctcactagatgcctctgacccagcctcccctgggggagtgggtggccacagaccctccctgccagagctcctggaaggctcctgcaggcctgacccatctattcctgtagacctggtttaggatgaagtctcggtgcgatttttgcagagttgggtttatctttcaactatagacccttctggctgttctcagccatatcatgtgactctgaatagttggatgaggaatggaaagaaagcaaggatgagagccggtcacgtggcagtctccgcccagcatcggctgtccgcacagaggcacagggcaggcctcctgtgcactccccacctagcactggcctgtcctgaatccccgccttccctggttggaggccagctgtggcatttgcaccctcttctcacctcaccatgcacatgctaactttaaagccttggggtctttcctgtaccccctcctcaaccctggtccaccccctctcaggatcttgtcaacgttatttttcctgtcccgtcttcctatcgctggccttcctttcccatcctaaaaacttgccgaggccctatggctccctccctttctttcccaggcagcttcttatctgggctgtctgtaccccttcctttgcaccacccaccatgccccacgtagctgaaagctgcttatcccaattgtcaactctggccttcttcagcctctgtagcaccagacactgcacctcctgaatgtcctctgcttctctgcttcagaggcccaggctcgccagttctctgacctctcccatatgtctgcttaggactctgctgcagctgtcctcaccagcctccggggaatcccactacccacagggcagggctgtgggctgggctgaaaaaccatctgcatggtccacaagaagcctggcactgggtttccccatgaataacaatgaaaattaatggatgcacaaccttcctggaacgtggaatttctctgggagattccatgcagaggccactggggaggtggcaggcatgcatgtgactgtaggtggctgcagtgttggaaggctcccagcagagcagagagggtgtcagtctcatcagggaacccacctgatggcttctcagccagcagtctcagaggaacatagacgactgctgagaaaggagggaggcagcagtggtcccagcacctgaggcatcctgctgtcatgggaaggtctccgcccaaatgtcagatgcatcagcctgtcacccgctggtccagagctttcagctgtactggtagggggtgggtggtggagtgctgaatgaccttcacaggtgggcctttccagctctagggtcttacgggtgtcggtccacagaaccacggtttttaggttgtgtgtccggggctatgggaacctgtcccccatgatggatcttggtagagacacttccctctgtcatcgtgcccaggaggatgctgcaggtgactacctgcagccctgttctcattcatttggatgccctccagaaatctggggagccatacacctttagagccttttttgctccttatcaagttggcaaggcttggccaattcctgttcaaggctgcattaaaggcatgttcaccatcctggctaatacggtgaaaccccttctctactaaaaatacaaaaaaattagccgggcttggtggcgggtgcctgtagtcccagctactccggaggctgaggcaggggaatggtgtgaacccaggaggcggagcttgcagtgagccgagatcacaccactgcactccagcctgggctcaaaaaagaaaaaaaaaaaaaaaaaaaggcccgttcattctcaaatgcttttggcgtctccagggtgcctcaggaaaacatgaagtgggcattgtagaacttggggctactgtgtaactttggaagaaaaagttaagggtacttttaagtggatactgttttgatgaaattgccaacttcagggagcccagcttggagaaggaggacgtgagtattccttacaaggctccgaaacaattctttcttcacttagttttctttctgtgctctgcatcttatattccagcagggtcttccaatgcatggtttaataactactagaactggccaggtgcagtggctcacgcctgtaatcccagaactttgggaggctaagacaggcagatcacttgaggccaggagttcgagaccagcctggacaacatggtgatacccagtttctactaaaaatacaaaaattagtcgggcatggtgatgtgcacctgtagtcccagctgctcgggaggctgaggcaggagaatcgcttgaacccgggagacagaggttgcaacgagccaagatcgagccactgcgctccggcctgggtgacaggagactccatctcaaaaaataaaattaaaaaaaaactactacaataaattatcaccttggactgtataaaacaacttttaaactagtctttttaaaaagtacacttaaataaaaatctaaacataagagaatgtaaagtgaaaagtgaaagtatgtcttctgttacgcagaggtaactactattaggaatccttcctgaaaatgtccatgcatctactcaggtcatcacacccatggaatcattttacatactattttatgagtgttacttaatatactgatccacagtgcgttttcacggtcacgccatcagttgtaggagtgtgccaagaacagatgggccttgcctttgtaccagaggagtccatttacagttgcaggtaatagaaaacccaattcagactggcctaaacaatgaggggaggttttggctcttgaaactggaaagtcccaaggtggggtgagtttcaggtttgggttgatccaagtggctcagtgacgtcaacaggatcttgtttccatttctctgccttccacagcctccccttcatctatggtggagggaaggagtctaccacagacaaaccccgagcctccccctgatgggtggtgtggtggtgaagccagcaagggaagggatccccggacacacccctcctcatgctttatcccactgaaaccatgcggctgt

SEQ ID NO: 8226 - protein, 104 aa, Homo sapiens; identical to SEQ ID NO: 8224

SEQ ID NO: 8227 - DNA, 2602 bp, Homo sapiens
attacctctgtaaagagcctgtctacaaatacagtcaccttctgaagtcctgggggttaggacttcagtgtatggattttgaggacacaatttagctcctaacacctctaaaattaggggctaatactccatcatgttgccatggaggaggctgataggtgtgagggggctggggccgattgccctgtgtggggtgggcagggctggggtgtgtgctgggatggttactgacaccccaccggggttagcagtggagggagctggttggctggcgactgttgcctgctggctctgtctcctggagctgagcttactggtgggatgcccgctccgagaagcacccttcttctcttcttaggagactctggacccccttctccaggtttctctccctttagaggcacattttcctccaagccttcaagccccttctctttctccagatgtggatggtggggaagggtatcttgagaaagttgggctttaaatctctggagacctgaaaggaaacagccagggagcctttggtcagacaggtggtgcgatggcacagtgcccagcgaggggcagaggctgagaggagctgacgagcatctcctggagagtcctccttgcctgcctcctggatccctcgttcccaccctgctttgccctgctccttaccagagctcactaggggatcaggtggggacatcgtgtgtgccaaaggctcagacccctgtggtgttttcctgcagctgaagagcaagtgggatgagtccatcttcacgaaaggctgcatccaggcgctggaaagctggctcccgcggaacatttacattgtggctggcgtcttcatcgccatctcgctgttgcagatatttggcatcttcctggcaaggacgctgatctcagacatcgaggcagtgaaggccggccatcacttctgaggagcagagttgagggagccgagctgagccacgctgggaggccagagcctttctctgccatcagccctacgtccagagggagaggagccgacacccccagagccagtgccccatcttaagcatcagcgtgacgtgacctctctgtttctgcttgctggtgctgaagaccaagggtcccccttgttacctgcccaaacttgtgactgcatccctctggagtctacccagagacagagaatgtgtctttatgtgggagtggtgactctgaaagacagagagggctcctgtggctgccaggagggcttgactcagaccccctgcagctcaagcatgtctgcaggacaccctggtcccctctccactggcatccagacatctgctttgggtcatccacatctgtgggtgggccgtgggtagagggacccacaggcgtggacagggcatctctctccatcaagcaaagcagcatgggggcctgcccgtaacgggaggcggacgtggccccgctgggcctctgagtgccagcgcagtctgctgggacatgcacatatcaggggttgtttgcaggatcctcagccatgttcaagtgaagtaagcctgagccagtgcgtggactggtgccacgggagtgccttgtccactgtccccctgtgtccaccagctattctcctggcgccggaactgcctctggtcttgatagcattaagccctgatggcgccggtggcgcggtgggcatggttcttcactgagagccggctctccttttcttaaagtgtgtaaatagtttatttataggggtaagaatgttctcacaccatttcacttcctcttcctctcctccagcattctcctctgagcagccttagatagtgtccatggctggagccgaccctttgagtccccttgagtgtcttaagaaccagcccacaacagcctctctttctcctccacatactgcagcctccctccatgcatcccacatacaagcactcccccactccccagcgtggcctcactgtcttctggtcttggtgctactgaaattgtcacccagaatttgaatcctgaccctccccactgcaagcccagggagccccagcccaagatggccagcctgaaactgttggccagggctcctcttgtggccatgtacccagggctggctggcctgccatttgcctctccccggagacagccgttcttctgcaaccacaccccgtgcctagccacaaccccaggctgcagctgctcagaagctccaggcattttgtttctggtgaccgcccctaatgggatatcggtgatcactggtccacccttcctgtcagggcttttctggggctgctcttggaaatgaagtcttaagtactgaataactcccctggggatagctggggcatttgtctagctgggctactttctaacactttgccatagctcagaccacttctcatcgttcagggatggactgcaaccttaatttacttgccggagtgtacattctagtgtggtgtatactggtggctgttgatgatgatttttttttttttacacaattctctgtagactaggagaagaatgcttgtgtttttcggaagtgtgatgcttctctttgactgccaaactcttttatggaatatatctttatattaatgctgttttggtcattttt

SEQ ID NO: 8228 - protein, 44 aa, Homo sapiens
MSPSSRKAASRRWKAGSRGTFTLWLASSSPSRCCRYLASSWQGR

SEQ ID NO: 8229 - DNA, 729 bp, Homo sapiens
ggggttaggacttcagtgtatggattttgaggacacaatttagctcctaacacctctaaaattaggggctaatactccatcatgttgccatggaggaggctgataggtgtgagggggctggggccgattgcccactgcaagcccagggagccccagcccaagatggccagcctgaaactgttggccagggctcctcttgtggccatgtacccagggctggctggcctgccatttgcctctccccggagacagccgttcttctgcaaccacaccccgtgcctagccacaaccccaggctgcagctgctcagaagctccaggcattttgtttctggtgaccgcccctaatgggatatcggtgatcactggtccacccttcctgtcagggcttttctggggctgctcttggaaatgaagtcttaagtactgaataactcccctggggatagctggggcatttgtctagctgggctactttctaacactttgccatagctcagaccacttctcatcgttcagggatggactgcaaccttaatttacttgccggagtgtacattctagtgtggtgtatactggtggctgttgatgatgatttttttttttttacacaattctctgtagactaggagaagaatgcttgtgtttttcggaagtgtgatgcttctctttgactgccaaactcttttatggaatatatctttatattaatgctgttttggtcattttt

SEQ ID NO: 8230 - protein, 110 aa, Homo sapiens
MLPWRRLIGVRGLGPIAHCKPREPQPKMASLKLLARAPLVAMYPGLAGLPFASPRRQPFFCNHTPCLATTPGCSCSEAPGILFLVTAPNGISVITGPPFLSGLFWGCSWK

SEQ ID NO: 8231 - DNA, 2098 bp, Homo sapiens
cctctaaaattaggggctaatactccatcatgttgccatggaggaggctgataggtgtgagggggctggggccgattgcccactgcaagcccagggagccccagcccaagatggccagcctgaaactgttggccagggctcctcttgtggccatgtacccagggctggctggcctgccatttgcctctccccggagacagccgttcttctgcaaccacaccccgtgcctagccacaaccccaggctgcagctgctcagaagctccaggcattttgtttctggtgaccgcccctaatgggatatcggtgatcactggtccacccttcctgtcagggcttttctggggctgctcttggaaatgaagtcttaagtactgaataactcccctggggatagctggggcatttgtctagctgggctactttctaacactttgccatagctcagaccacttctcatcgttcagggatggactgcaaccttaatttacttgccggagtgtacattctagtgtggtgtatactggtggctgttgatgatgatttttttttttttacacaattctctgtagactaggagaagaatgcttgtgtttttcggaagtgtgatgcttctctttgactgccaaactcttttatggaatatatctttatattaatgctgttttggtcatttttgtttggggtcactattgagatattgctaagcatctcagtggtaaacgcggctgccagaggaaccaagggatagggtatgtagaccttacagaaggatggatggtaaaggcagtccatcatcagcacaatctgacttacatttcattgagtaattttttttttttttaagattctgtatggcagcactttcagttgcccttgtgtgccggccacagccgcacaagttggcttgtggtttatcccccgctataagtgagagctggagaaacttcaactccataggtctagaggaaacattgttttaggttatttctgtccacccctgtgcgatactatttattgatccaagcagaagagcttggggacactgagtcgaagtggggacatgggattgaagcctgggcactgctgctgcatgagctgtgtgtcctgggtgtgccggcctttctgtgaagggggttggtggcagtgcccacctcactagatgcctctgacccagcctcccctgggggagtgggtggccacagaccctccctgccagagctcctggaaggctcctgcaggcctgacccatctattcctgtagacctggtttaggatgaagtctcggtgcgatttttgcagagttgggtttatctttcaactatagacccttctggctgttctcagccatatcatgtgactctgaatagttggatgaggaatggaaagaaagcaaggatgagagccggtcacgtggcagtctccgcccagcatcggctgtccgcacagaggcacagggcaggcctcctgtgcactccccacctagcactggcctgtcctgaatccccgccttccctggttggaggccagctgtggcatttgcaccctcttctcacctcaccatgcacatgctaactttaaagccttggggtctttcctgtaccccctcctcaaccctggtccaccccctctcaggatcttgtcaacgttatttttcctgtcccgtcttcctatcgctggccttcctttcccatcctaaaaacttgccgaggccctatggctccctccctttctttcccaggcagcttcttatctgggctgtctgtaccccttcctttgcaccacccaccatgccccacgtagctgaaagctgcttatcccaattgtcaactctggccttcttcagcctctgtagcaccagacactgcacctcctgaatgtcctctgcttctctgcttcagaggcccaggctcgccagttctctgacctctcccatatgtctgcttaggactctgctgcagctgtcctcaccagcctccggggaatcccactacccacagggcagggctgtgggctgggctgaaaaaccatctgcatggtccacaagaagcctggcactgggtttccccatgaataacaatgaaaattaatggatgcac

SEQ ID NO: 8232 - protein, 110 aa, Homo sapiens; identical to SEQ ID NO: 8230

SEQ ID NO: 8233 - DNA, 4213 bp, Homo sapiens
cctctaaaattaggggctaatactccatcatgttgccatggaggaggctgataggtgtgagggggctggggccgattgcccactgcaagcccagggagccccagcccaagatggccagcctgaaactgttggccagggctcctcttgtggccatgtacccagggctggctggcctgccatttgcctctccccggagacagccgttcttctgcaaccacaccccgtgcctagccacaaccccaggctgcagctgctcagaagctccaggcattttgtttctggtgaccgcccctaatgggatatcggtgatcactggtccacccttcctgtcagggcttttctggggctgctcttggaaatgaagtcttaagtactgaataactcccctggggatagctggggcatttgtctagctgggctactttctaacactttgccatagctcagaccacttctcatcgttcagggatggactgcaaccttaatttacttgccggagtgtacattctagtgtggtgtatactggtggctgttgatgatgatttttttttttttacacaattctctgtagactaggagaagaatgcttgtgtttttcggaagtgtgatgcttctctttgactgccaaactcttttatggaatatatctttatattaatgctgttttggtcatttttgtttggggtcactattgagatattgctaagcatctcagtggtaaacgcggctgccagaggaaccaagggatagggtatgtagaccttacagaaggatggatggtaaaggcagtccatcatcagcacaatctgacttacatttcattgagtaattttttttttttttaagattctgtatggcagcactttcagttgcccttgtgtgccggccacagccgcacaagttggcttgtggtttatcccccgctataagtgagagctggagaaacttcaactccataggtctagaggaaacattgttttaggttatttctgtccacccctgtgcgatactatttattgatccaagcagaagagcttggggacactgagtcgaagtggggacatgggattgaagcctgggcactgctgctgcatgagctgtgtgtcctgggtgtgccggcctttctgtgaagggggttggtggcagtgcccacctcactagatgcctctgacccagcctcccctgggggagtgggtggccacagaccctccctgccagagctcctggaaggctcctgcaggcctgacccatctattcctgtagacctggtttaggatgaagtctcggtgcgatttttgcagagttgggtttatctttcaactatagacccttctggctgttctcagccatatcatgtgactctgaatagttggatgaggaatggaaagaaagcaaggatgagagccggtcacgtggcagtctccgcccagcatcggctgtccgcacagaggcacagggcaggcctcctgtgcactccccacctagcactggcctgtcctgaatccccgccttccctggttggaggccagctgtggcatttgcaccctcttctcacctcaccatgcacatgctaactttaaagccttggggtctttcctgtaccccctcctcaaccctggtccaccccctctcaggatcttgtcaacgttatttttcctgtcccgtcttcctatcgctggccttcctttcccatcctaaaaacttgccgaggccctatggctccctccctttctttcccaggcagcttcttatctgggctgtctgtaccccttcctttgcaccacccaccatgccccacgtagctgaaagctgcttatcccaattgtcaactctggccttcttcagcctctgtagcaccagacactgcacctcctgaatgtcctctgcttctctgcttcagaggcccaggctcgccagttctctgacctctcccatatgtctgcttaggactctgctgcagctgtcctcaccagcctccggggaatcccactacccacagggcagggctgtgggctgggctgaaaaaccatctgcatggtccacaagaagcctggcactgggtttccccatgaataacaatgaaaattaatggatgcacaaccttcctggaacgtggaatttctctgggagattccatgcagaggccactggggaggtggcaggcatgcatgtgactgtaggtggctgcagtgttggaaggctcccagcagagcagagagggtgtcagtctcatcagggaacccacctgatggcttctcagccagcagtctcagaggaacatagacgactgctgagaaaggagggaggcagcagtggtcccagcacctgaggcatcctgctgtcatgggaaggtctccgcccaaatgtcagatgcatcagcctgtcacccgctggtccagagctttcagctgtactggtagggggtgggtggtggagtgctgaatgaccttcacaggtgggcctttccagctctagggtcttacgggtgtcggtccacagaaccacggtttttaggttgtgtgtccggggctatgggaacctgtcccccatgatggatcttggtagagacacttccctctgtcatcgtgcccaggaggatgctgcaggtgactacctgcagccctgttctcattcatttggatgccctccagaaatctggggagccatacacctttagagccttttttgctccttatcaagttggcaaggcttggccaattcctgttcaaggctgcattaaaggcatgttcaccatcctggctaatacggtgaaaccccttctctactaaaaatacaaaaaaattagccgggcttggtggcgggtgcctgtagtcccagctactccggaggctgaggcaggggaatggtgtgaacccaggaggcggagcttgcagtgagccgagatcacaccactgcactccagcctgggctcaaaaaagaaaaaaaaaaaaaaaaaaaggcccgttcattctcaaatgcttttggcgtctccagggtgcctcaggaaaacatgaagtgggcattgtagaacttggggctactgtgtaactttggaagaaaaagttaagggtacttttaagtggatactgttttgatgaaattgccaacttcagggagcccagcttggagaaggaggacgtgagtattccttacaaggctccgaaacaattctttcttcacttagttttctttctgtgctctgcatcttatattccagcagggtcttccaatgcatggtttaataactactagaactggccaggtgcagtggctcacgcctgtaatcccagaactttgggaggctaagacaggcagatcacttgaggccaggagttcgagaccagcctggacaacatggtgatacccagtttctactaaaaatacaaaaattagtcgggcatggtgatgtgcacctgtagtcccagctgctcgggaggctgaggcaggagaatcgcttgaacccgggagacagaggttgcaacgagccaagatcgagccactgcgctccggcctgggtgacaggagactccatctcaaaaaataaaattaaaaaaaaactactacaataaattatcaccttggactgtataaaacaacttttaaactagtctttttaaaaagtacacttaaataaaaatctaaacataagagaatgtaaagtgaaaagtgaaagtatgtcttctgttacgcagaggtaactactattaggaatccttcctgaaaatgtccatgcatctactcaggtcatcacacccatggaatcattttacatactattttatgagtgttacttaatatactgatccacagtgcgttttcacggtcacgccatcagttgtaggagtgtgccaagaacagatgggccttgcctttgtaccagaggagtccatttacagttgcaggtaatagaaaacccaattcagactggcctaaacaatgaggggaggttttggctcttgaaactggaaagtcccaaggtggggtgagtttcaggtttgggttgatccaagtggctcagtgacgtcaacaggatcttgtttccatttctctgccttccacagcctccccttcatctatggtggagggaaggagtctaccacagacaaaccccgagcctccccctgatgggtggtgtggtggtgaagccagcaagggaagggatccccggacacacccctcctcatgctttatcccactgaaaccatgcggctgt

SEQ ID NO: 8234 - protein, 110 aa, Homo sapiens; identical to SEQ ID NO: 8230

SEQ ID NO: 8235 - DNA, 1666 bp, Homo sapiens
gcccgctccgagaagcacccttcttctcttcttaggagactctggacccccttctccaggtttctctccctttagaggcacattttcctccaaagccagtgccccatcttaagcatcagcgtgacgtgacctctctgtttctgcttgctggtgctgaagaccaagggtcccccttgttacctgcccaaacttgtgactgcatccctctggagtctacccagagacagagaatgtgtctttatgtgggagtggtgactctgaaagacagagagggctcctgtggctgccaggagggcttgactcagaccccctgcagctcaagcatgtctgcaggacaccctggtcccctctccactggcatccagacatctgctttgggtcatccacatctgtgggtgggccgtgggtagagggacccacaggcgtggacagggcatctctctccatcaagcaaagcagcatgggggcctgcccgtaacgggaggcggacgtggccccgctgggcctctgagtgccagcgcagtctgctgggacatgcacatatcaggggttgtttgcaggatcctcagccatgttcaagtgaagtaagcctgagccagtgcgtggactggtgccacgggagtgccttgtccactgtccccctgtgtccaccagctattctcctggcgccggaactgcctctggtcttgatagcattaagccctgatggcgccggtggcgcggtgggcatggttcttcactgagagccggctctccttttcttaaagtgtgtaaatagtttatttataggggtaagaatgttctcacaccatttcacttcctcttcctctcctccagcattctcctctgagcagccttagatagtgtccatggctggagccgaccctttgagtccccttgagtgtcttaagaaccagcccacaacagcctctctttctcctccacatactgcagcctccctccatgcatcccacatacaagcactcccccactccccagcgtggcctcactgtcttctggtcttggtgctactgaaattgtcacccagaatttgaatcctgaccctccccactgcaagcccagggagccccagcccaagatggccagcctgaaactgttggccagggctcctcttgtggccatgtacccagggctggctggcctgccatttgcctctccccggagacagccgttcttctgcaaccacaccccgtgcctagccacaaccccaggctgcagctgctcagaagctccaggcattttgtttctggtgaccgcccctaatgggatatcggtgatcactggtccacccttcctgtcagggcttttctggggctgctcttggaaatgaagtcttaagtactgaataactcccctggggatagctggggcatttgtctagctgggctactttctaacactttgccatagctcagaccacttctcatcgttcagggatggactgcaaccttaatttacttgccggagtgtacattctagtgtggtgtatactggtggctgttgatgatgatttttttttttttacacaattctctgtagactaggagaagaatgcttgtgtttttcggaagtgtgatgcttctctttgactgccaaactcttttatggaatatatctttatattaatgctgttttggtcattttt

SEQ ID NO: 8236 - protein, 83 aa, Homo sapiens [sequence omitted]

SEQ ID NO: 8237 - DNA, 3087 bp, Homo sapiens
gcccgctccgagaagcacccttcttctcttcttaggagactctggacccccttctccaggtttctctccctttagaggcacattttcctccaaagccagtgccccatcttaagcatcagcgtgacgtgacctctctgtttctgcttgctggtgctgaagaccaagggtcccccttgttacctgcccaaacttgtgactgcatccctctggagtctacccagagacagagaatgtgtctttatgtgggagtggtgactctgaaagacagagagggctcctgtggctgccaggagggcttgactcagaccccctgcagctcaagcatgtctgcaggacaccctggtcccctctccactggcatccagacatctgctttgggtcatccacatctgtgggtgggccgtgggtagagggacccacaggcgtggacagggcatctctctccatcaagcaaagcagcatgggggcctgcccgtaacgggaggcggacgtggccccgctgggcctctgagtgccagcgcagtctgctgggacatgcacatatcaggggttgtttgcaggatcctcagccatgttcaagtgaagtaagcctgagccagtgcgtggactggtgccacgggagtgccttgtccactgtccccctgtgtccaccagctattctcctggcgccggaactgcctctggtcttgatagcattaagccctgatggcgccggtggcgcggtgggcatggttcttcactgagagccggctctccttttcttaaagtgtgtaaatagtttatttataggggtaagaatgttctcacaccatttcacttcctcttcctctcctccagcattctcctctgagcagccttagatagtgtccatggctggagccgaccctttgagtccccttgagtgtcttaagaaccagcccacaacagcctctctttctcctccacatactgcagcctccctccatgcatcccacatacaagcactcccccactccccagcgtggcctcactgtcttctggtcttggtgctactgaaattgtcacccagaatttgaatcctgaccctccccactgcaagcccagggagccccagcccaagatggccagcctgaaactgttggccagggctcctcttgtggccatgtacccagggctggctggcctgccatttgcctctccccggagacagccgttcttctgcaaccacaccccgtgcctagccacaaccccaggctgcagctgctcagaagctccaggcattttgtttctggtgaccgcccctaatgggatatcggtgatcactggtccacccttcctgtcagggcttttctggggctgctcttggaaatgaagtcttaagtactgaataactcccctggggatagctggggcatttgtctagctgggctactttctaacactttgccatagctcagaccacttctcatcgttcagggatggactgcaaccttaatttacttgccggagtgtacattctagtgtggtgtatactggtggctgttgatgatgatttttttttttttacacaattctctgtagactaggagaagaatgcttgtgtttttcggaagtgtgatgcttctctttgactgccaaactcttttatggaatatatctttatattaatgctgttttggtcatttttgtttggggtcactattgagatattgctaagcatctcagtggtaaacgcggctgccagaggaaccaagggatagggtatgtagaccttacagaaggatggatggtaaaggcagtccatcatcagcacaatctgacttacatttcattgagtaattttttttttttttaagattctgtatggcagcactttcagttgcccttgtgtgccggccacagccgcacaagttggcttgtggtttatcccccgctataagtgagagctggagaaacttcaactccataggtctagaggaaacattgttttaggttatttctgtccacccctgtgcgatactatttattgatccaagcagaagagcttggggacactgagtcgaagtggggacatgggattgaagcctgggcactgctgctgcatgagctgtgtgtcctgggtgtgccggcctttctgtgaagggggttggtggcagtgcccacctcactagatgcctctgacccagcctcccctgggggagtgggtggccacagaccctccctgccagagctcctggaaggctcctgcaggcctgacccatctattcctgtagacctggtttaggatgaagtctcggtgcgatttttgcagagttgggtttatctttcaactatagacccttctggctgttctcagccatatcatgtgactctgaatagttggatgaggaatggaaagaaagcaaggatgagagccggtcacgtggcagtctccgcccagcatcggctgtccgcacagaggcacagggcaggcctcctgtgcactccccacctagcactggcctgtcctgaatccccgccttccctggttggaggccagctgtggcatttgcaccctcttctcacctcaccatgcacatgctaactttaaagccttggggtctttcctgtaccccctcctcaaccctggtccaccccctctcaggatcttgtcaacgttatttttcctgtcccgtcttcctatcgctggccttcctttcccatcctaaaaacttgccgaggccctatggctccctccctttctttcccaggcagcttcttatctgggctgtctgtaccccttcctttgcaccacccaccatgccccacgtagctgaaagctgcttatcccaattgtcaactctggccttcttcagcctctgtagcaccagacactgcacctcctgaatgtcctctgcttctctgcttcagaggcccaggctcgccagttctctgacctctcccatatgtctgcttaggactctgctgcagctgtcctcaccagcctccggggaatcccactacccacagggcagggctgtgggctgggctgaaaaaccatctgcatggtccacaagaagcctggcactgggtttccccatgaataacaatgaaaattaatggatgcac

SEQ ID NO: 8238 - protein, 104 aa, Homo sapiens; identical to SEQ ID NO: 8224

SEQ ID NO: 8239 - DNA, 5202 bp, Homo sapiens
gcccgctccgagaagcacccttcttctcttcttaggagactctggacccccttctccaggtttctctccctttagaggcacattttcctccaaagccagtgccccatcttaagcatcagcgtgacgtgacctctctgtttctgcttgctggtgctgaagaccaagggtcccccttgttacctgcccaaacttgtgactgcatccctctggagtctacccagagacagagaatgtgtctttatgtgggagtggtgactctgaaagacagagagggctcctgtggctgccaggagggcttgactcagaccccctgcagctcaagcatgtctgcaggacaccctggtcccctctccactggcatccagacatctgctttgggtcatccacatctgtgggtgggccgtgggtagagggacccacaggcgtggacagggcatctctctccatcaagcaaagcagcatgggggcctgcccgtaacgggaggcggacgtggccccgctgggcctctgagtgccagcgcagtctgctgggacatgcacatatcaggggttgtttgcaggatcctcagccatgttcaagtgaagtaagcctgagccagtgcgtggactggtgccacgggagtgccttgtccactgtccccctgtgtccaccagctattctcctggcgccggaactgcctctggtcttgatagcattaagccctgatggcgccggtggcgcggtgggcatggttcttcactgagagccggctctccttttcttaaagtgtgtaaatagtttatttataggggtaagaatgttctcacaccatttcacttcctcttcctctcctccagcattctcctctgagcagccttagatagtgtccatggctggagccgaccctttgagtccccttgagtgtcttaagaaccagcccacaacagcctctctttctcctccacatactgcagcctccctccatgcatcccacatacaagcactcccccactccccagcgtggcctcactgtcttctggtcttggtgctactgaaattgtcacccagaatttgaatcctgaccctccccactgcaagcccagggagccccagcccaagatggccagcctgaaactgttggccagggctcctcttgtggccatgtacccagggctggctggcctgccatttgcctctccccggagacagccgttcttctgcaaccacaccccgtgcctagccacaaccccaggctgcagctgctcagaagctccaggcattttgtttctggtgaccgcccctaatgggatatcggtgatcactggtccacccttcctgtcagggcttttctggggctgctcttggaaatgaagtcttaagtactgaataactcccctggggatagctggggcatttgtctagctgggctactttctaacactttgccatagctcagaccacttctcatcgttcagggatggactgcaaccttaatttacttgccggagtgtacattctagtgtggtgtatactggtggctgttgatgatgatttttttttttttacacaattctctgtagactaggagaagaatgcttgtgtttttcggaagtgtgatgcttctctttgactgccaaactcttttatggaatatatctttatattaatgctgttttggtcatttttgtttggggtcactattgagatattgctaagcatctcagtggtaaacgcggctgccagaggaaccaagggatagggtatgtagaccttacagaaggatggatggtaaaggcagtccatcatcagcacaatctgacttacatttcattgagtaattttttttttttttaagattctgtatggcagcactttcagttgcccttgtgtgccggccacagccgcacaagttggcttgtggtttatcccccgctataagtgagagctggagaaacttcaactccataggtctagaggaaacattgttttaggttatttctgtccacccctgtgcgatactatttattgatccaagcagaagagcttggggacactgagtcgaagtggggacatgggattgaagcctgggcactgctgctgcatgagctgtgtgtcctgggtgtgccggcctttctgtgaagggggttggtggcagtgcccacctcactagatgcctctgacccagcctcccctgggggagtgggtggccacagaccctccctgccagagctcctggaaggctcctgcaggcctgacccatctattcctgtagacctggtttaggatgaagtctcggtgcgatttttgcagagttgggtttatctttcaactatagacccttctggctgttctcagccatatcatgtgactctgaatagttggatgaggaatggaaagaaagcaaggatgagagccggtcacgtggcagtctccgcccagcatcggctgtccgcacagaggcacagggcaggcctcctgtgcactccccacctagcactggcctgtcctgaatccccgccttccctggttggaggccagctgtggcatttgcaccctcttctcacctcaccatgcacatgctaactttaaagccttggggtctttcctgtaccccctcctcaaccctggtccaccccctctcaggatcttgtcaacgttatttttcctgtcccgtcttcctatcgctggccttcctttcccatcctaaaaacttgccgaggccctatggctccctccctttctttcccaggcagcttcttatctgggctgtctgtaccccttcctttgcaccacccaccatgccccacgtagctgaaagctgcttatcccaattgtcaactctggccttcttcagcctctgtagcaccagacactgcacctcctgaatgtcctctgcttctctgcttcagaggcccaggctcgccagttctctgacctctcccatatgtctgcttaggactctgctgcagctgtcctcaccagcctccggggaatcccactacccacagggcagggctgtgggctgggctgaaaaaccatctgcatggtccacaagaagcctggcactgggtttccccatgaataacaatgaaaattaatggatgcacaaccttcctggaacgtggaatttctctgggagattccatgcagaggccactggggaggtggcaggcatgcatgtgactgtaggtggctgcagtgttggaaggctcccagcagagcagagagggtgtcagtctcatcagggaacccacctgatggcttctcagccagcagtctcagaggaacatagacgactgctgagaaaggagggaggcagcagtggtcccagcacctgaggcatcctgctgtcatgggaaggtctccgcccaaatgtcagatgcatcagcctgtcacccgctggtccagagctttcagctgtactggtagggggtgggtggtggagtgctgaatgaccttcacaggtgggcctttccagctctagggtcttacgggtgtcggtccacagaaccacggtttttaggttgtgtgtccggggctatgggaacctgtcccccatgatggatcttggtagagacacttccctctgtcatcgtgcccaggaggatgctgcaggtgactacctgcagccctgttctcattcatttggatgccctccagaaatctggggagccatacacctttagagccttttttgctccttatcaagttggcaaggcttggccaattcctgttcaaggctgcattaaaggcatgttcaccatcctggctaatacggtgaaaccccttctctactaaaaatacaaaaaaattagccgggcttggtggcgggtgcctgtagtcccagctactccggaggctgaggcaggggaatggtgtgaacccaggaggcggagcttgcagtgagccgagatcacaccactgcactccagcctgggctcaaaaaagaaaaaaaaaaaaaaaaaaaggcccgttcattctcaaatgcttttggcgtctccagggtgcctcaggaaaacatgaagtgggcattgtagaacttggggctactgtgtaactttggaagaaaaagttaagggtacttttaagtggatactgttttgatgaaattgccaacttcagggagcccagcttggagaaggaggacgtgagtattccttacaaggctccgaaacaattctttcttcacttagttttctttctgtgctctgcatcttatattccagcagggtcttccaatgcatggtttaataactactagaactggccaggtgcagtggctcacgcctgtaatcccagaactttgggaggctaagacaggcagatcacttgaggccaggagttcgagaccagcctggacaacatggtgatacccagtttctactaaaaatacaaaaattagtcgggcatggtgatgtgcacctgtagtcccagctgctcgggaggctgaggcaggagaatcgcttgaacccgggagacagaggttgcaacgagccaagatcgagccactgcgctccggcctgggtgacaggagactccatctcaaaaaataaaattaaaaaaaaactactacaataaattatcaccttggactgtataaaacaacttttaaactagtctttttaaaaagtacacttaaataaaaatctaaacataagagaatgtaaagtgaaaagtgaaagtatgtcttctgttacgcagaggtaactactattaggaatccttcctgaaaatgtccatgcatctactcaggtcatcacacccatggaatcattttacatactattttatgagtgttacttaatatactgatccacagtgcgttttcacggtcacgccatcagttgtaggagtgtgccaagaacagatgggccttgcctttgtaccagaggagtccatttacagttgcaggtaatagaaaacccaattcagactggcctaaacaatgaggggaggttttggctcttgaaactggaaagtcccaaggtggggtgagtttcaggtttgggttgatccaagtggctcagtgacgtcaacaggatcttgtttccatttctctgccttccacagcctccccttcatctatggtggagggaaggagtctaccacagacaaaccccgagcctccccctgatgggtggtgtggtggtgaagccagcaagggaagggatccccggacacacccctcctcatgctttatcccactgaaaccatgcggctgt

SEQ ID NO: 8240 - protein, 104 aa, Homo sapiens; identical to SEQ ID NO: 8224

SEQ ID NO: 8241 - DNA, 3425 bp, Homo sapiens
tggagagtcctccttgcctgcctcctggatccctcgttcccaccctgctttgccctgctccttaccagagctcactaggggatcaggtggggacatcgtgtgtgccaaaggctcagacccctgtggtgttttcctgcagctgaagagcaagtgggatgagtccatcttcacgaaaggctgcatccaggcgctggaaagctggctcccgcggaacatttacattgtggctggcgtcttcatcgccatctcgctgttgcagatatttggcatcttcctggcaaggacgctgatctcagacatcgaggcagtgaaggccggccatcacttctgaggagcagagttgagggagccgagctgagccacgctgggaggccagagcctttctctgccatcagccctacgtccagagggagaggagccgacacccccagagccagtgccccatcttaagcatcagcgtgacgtgacctctctgtttctgcttgctggtgctgaagaccaagggtcccccttgttacctgcccaaacttgtgactgcatccctctggagtctacccagagacagagaatgtgtctttatgtgggagtggtgactctgaaagacagagagggctcctgtggctgccaggagggcttgactcagaccccctgcagctcaagcatgtctgcaggacaccctggtcccctctccactggcatccagacatctgctttgggtcatccacatctgtgggtgggccgtgggtagagggacccacaggcgtggacagggcatctctctccatcaagcaaagcagcatgggggcctgcccgtaacgggaggcggacgtggccccgctgggcctctgagtgccagcgcagtctgctgggacatgcacatatcaggggttgtttgcaggatcctcagccatgttcaagtgaagtaagcctgagccagtgcgtggactggtgccacgggagtgccttgtccactgtccccctgtgtccaccagctattctcctggcgccggaactgcctctggtcttgatagcattaagccctgatggcgccggtggcgcggtgggcatggttcttcactgagagccggctctccttttcttaaagtgtgtaaatagtttatttataggggtaagaatgttctcacaccatttcacttcctcttcctctcctccagcattctcctctgagcagccttagatagtgtccatggctggagccgaccctttgagtccccttgagtgtcttaagaaccagcccacaacagcctctctttctcctccacatactgcagcctccctccatgcatcccacatacaagcactcccccactccccagcgtggcctcactgtcttctggtcttggtgctactgaaattgtcacccagaatttgaatcctgaccctccccactgcaagcccagggagccccagcccaagatggccagcctgaaactgttggccagggctcctcttgtggccatgtacccagggctggctggcctgccatttgcctctccccggagacagccgttcttctgcaaccacaccccgtgcctagccacaaccccaggctgcagctgctcagaagctccaggcattttgtttctggtgaccgcccctaatgggatatcggtgatcactggtccacccttcctgtcagggcttttctggggctgctcttggaaatgaagtcttaagtactgaataactcccctggggatagctggggcatttgtctagctgggctactttctaacactttgccatagctcagaccacttctcatcgttcagggatggactgcaaccttaatttacttgccggagtgtacattctagtgtggtgtatactggtggctgttgatgatgatttttttttttttacacaattctctgtagactaggagaagaatgcttgtgtttttcggaagtgtgatgcttctctttgactgccaaactcttttatggaatatatctttatattaatgctgttttggtcatttttgtttggggtcactattgagatattgctaagcatctcagtggtaaacgcggctgccagaggaaccaagggatagggtatgtagaccttacagaaggatggatggtaaaggcagtccatcatcagcacaatctgacttacatttcattgagtaattttttttttttttaagattctgtatggcagcactttcagttgcccttgtgtgccggccacagccgcacaagttggcttgtggtttatcccccgctataagtgagagctggagaaacttcaactccataggtctagaggaaacattgttttaggttatttctgtccacccctgtgcgatactatttattgatccaagcagaagagcttggggacactgagtcgaagtggggacatgggattgaagcctgggcactgctgctgcatgagctgtgtgtcctgggtgtgccggcctttctgtgaagggggttggtggcagtgcccacctcactagatgcctctgacccagcctcccctgggggagtgggtggccacagaccctccctgccagagctcctggaaggctcctgcaggcctgacccatctattcctgtagacctggtttaggatgaagtctcggtgcgatttttgcagagttgggtttatctttcaactatagacccttctggctgttctcagccatatcatgtgactctgaatagttggatgaggaatggaaagaaagcaaggatgagagccggtcacgtggcagtctccgcccagcatcggctgtccgcacagaggcacagggcaggcctcctgtgcactccccacctagcactggcctgtcctgaatccccgccttccctggttggaggccagctgtggcatttgcaccctcttctcacctcaccatgcacatgctaactttaaagccttggggtctttcctgtaccccctcctcaaccctggtccaccccctctcaggatcttgtcaacgttatttttcctgtcccgtcttcctatcgctggccttcctttcccatcctaaaaacttgccgaggccctatggctccctccctttctttcccaggcagcttcttatctgggctgtctgtaccccttcctttgcaccacccaccatgccccacgtagctgaaagctgcttatcccaattgtcaactctggccttcttcagcctctgtagcaccagacactgcacctcctgaatgtcctctgcttctctgcttcagaggcccaggctcgccagttctctgacctctcccatatgtctgcttaggactctgctgcagctgtcctcaccagcctccggggaatcccactacccacagggcagggctgtgggctgggctgaaaaaccatctgcatggtccacaagaagcctggcactgggtttccccatgaataacaatgaaaattaatggatgcac

SEQ ID NO: 8242 - protein, 44 aa, Homo sapiens; identical to SEQ ID NO: 8228

SEQ ID NO: 8243 - DNA, 5540 bp, Homo sapiens
tggagagtcctccttgcctgcctcctggatccctcgttcccaccctgctttgccctgctccttaccagagctcactaggggatcaggtggggacatcgtgtgtgccaaaggctcagacccctgtggtgttttcctgcagctgaagagcaagtgggatgagtccatcttcacgaaaggctgcatccaggcgctggaaagctggctcccgcggaacatttacattgtggctggcgtcttcatcgccatctcgctgttgcagatatttggcatcttcctggcaaggacgctgatctcagacatcgaggcagtgaaggccggccatcacttctgaggagcagagttgagggagccgagctgagccacgctgggaggccagagcctttctctgccatcagccctacgtccagagggagaggagccgacacccccagagccagtgccccatcttaagcatcagcgtgacgtgacctctctgtttctgcttgctggtgctgaagaccaagggtcccccttgttacctgcccaaacttgtgactgcatccctctggagtctacccagagacagagaatgtgtctttatgtgggagtggtgactctgaaagacagagagggctcctgtggctgccaggagggcttgactcagaccccctgcagctcaagcatgtctgcaggacaccctggtcccctctccactggcatccagacatctgctttgggtcatccacatctgtgggtgggccgtgggtagagggacccacaggcgtggacagggcatctctctccatcaagcaaagcagcatgggggcctgcccgtaacgggaggcggacgtggccccgctgggcctctgagtgccagcgcagtctgctgggacatgcacatatcaggggttgtttgcaggatcctcagccatgttcaagtgaagtaagcctgagccagtgcgtggactggtgccacgggagtgccttgtccactgtccccctgtgtccaccagctattctcctggcgccggaactgcctctggtcttgatagcattaagccctgatggcgccggtggcgcggtgggcatggttcttcactgagagccggctctccttttcttaaagtgtgtaaatagtttatttataggggtaagaatgttctcacaccatttcacttcctcttcctctcctccagcattctcctctgagcagccttagatagtgtccatggctggagccgaccctttgagtccccttgagtgtcttaagaaccagcccacaacagcctctctttctcctccacatactgcagcctccctccatgcatcccacatacaagcactcccccactccccagcgtggcctcactgtcttctggtcttggtgctactgaaattgtcacccagaatttgaatcctgaccctccccactgcaagcccagggagccccagcccaagatggccagcctgaaactgttggccagggctcctcttgtggccatgtacccagggctggctggcctgccatttgcctctccccggagacagccgttcttctgcaaccacaccccgtgcctagccacaaccccaggctgcagctgctcagaagctccaggcattttgtttctggtgaccgcccctaatgggatatcggtgatcactggtccacccttcctgtcagggcttttctggggctgctcttggaaatgaagtcttaagtactgaataactcccctggggatagctggggcatttgtctagctgggctactttctaacactttgccatagctcagaccacttctcatcgttcagggatggactgcaaccttaatttacttgccggagtgtacattctagtgtggtgtatactggtggctgttgatgatgatttttttttttttacacaattctctgtagactaggagaagaatgcttgtgtttttcggaagtgtgatgcttctctttgactgccaaactcttttatggaatatatctttatattaatgctgttttggtcatttttgtttggggtcactattgagatattgctaagcatctcagtggtaaacgcggctgccagaggaaccaagggatagggtatgtagaccttacagaaggatggatggtaaaggcagtccatcatcagcacaatctgacttacatttcattgagtaattttttttttttttaagattctgtatggcagcactttcagttgcccttgtgtgccggccacagccgcacaagttggcttgtggtttatcccccgctataagtgagagctggagaaacttcaactccataggtctagaggaaacattgttttaggttatttctgtccacccctgtgcgatactatttattgatccaagcagaagagcttggggacactgagtcgaagtggggacatgggattgaagcctgggcactgctgctgcatgagctgtgtgtcctgggtgtgccggcctttctgtgaagggggttggtggcagtgcccacctcactagatgcctctgacccagcctcccctgggggagtgggtggccacagaccctccctgccagagctcctggaaggctcctgcaggcctgacccatctattcctgtagacctggtttaggatgaagtctcggtgcgatttttgcagagttgggtttatctttcaactatagacccttctggctgttctcagccatatcatgtgactctgaatagttggatgaggaatggaaagaaagcaaggatgagagccggtcacgtggcagtctccgcccagcatcggctgtccgcacagaggcacagggcaggcctcctgtgcactccccacctagcactggcctgtcctgaatccccgccttccctggttggaggccagctgtggcatttgcaccctcttctcacctcaccatgcacatgctaactttaaagccttggggtctttcctgtaccccctcctcaaccctggtccaccccctctcaggatcttgtcaacgttatttttcctgtcccgtcttcctatcgctggccttcctttcccatcctaaaaacttgccgaggccctatggctccctccctttctttcccaggcagcttcttatctgggctgtctgtaccccttcctttgcaccacccaccatgccccacgtagctgaaagctgcttatcccaattgtcaactctggccttcttcagcctctgtagcaccagacactgcacctcctgaatgtcctctgcttctctgcttcagaggcccaggctcgccagttctctgacctctcccatatgtctgcttaggactctgctgcagctgtcctcaccagcctccggggaatcccactacccacagggcagggctgtgggctgggctgaaaaaccatctgcatggtccacaagaagcctggcactgggtttccccatgaataacaatgaaaattaatggatgcacaaccttcctggaacgtggaatttctctgggagattccatgcagaggccactggggaggtggcaggcatgcatgtgactgtaggtggctgcagtgttggaaggctcccagcagagcagagagggtgtcagtctcatcagggaacccacctgatggcttctcagccagcagtctcagaggaacatagacgactgctgagaaaggagggaggcagcagtggtcccagcacctgaggcatcctgctgtcatgggaaggtctccgcccaaatgtcagatgcatcagcctgtcacccgctggtccagagctttcagctgtactggtagggggtgggtggtggagtgctgaatgaccttcacaggtgggcctttccagctctagggtcttacgggtgtcggtccacagaaccacggtttttaggttgtgtgtccggggctatgggaacctgtcccccatgatggatcttggtagagacacttccctctgtcatcgtgcccaggaggatgctgcaggtgactacctgcagccctgttctcattcatttggatgccctccagaaatctggggagccatacacctttagagccttttttgctccttatcaagttggcaaggcttggccaattcctgttcaaggctgcattaaaggcatgttcaccatcctggctaatacggtgaaaccccttctctactaaaaatacaaaaaaattagccgggcttggtggcgggtgcctgtagtcccagctactccggaggctgaggcaggggaatggtgtgaacccaggaggcggagcttgcagtgagccgagatcacaccactgcactccagcctgggctcaaaaaagaaaaaaaaaaaaaaaaaaaggcccgttcattctcaaatgcttttggcgtctccagggtgcctcaggaaaacatgaagtgggcattgtagaacttggggctactgtgtaactttggaagaaaaagttaagggtacttttaagtggatactgttttgatgaaattgccaacttcagggagcccagcttggagaaggaggacgtgagtattccttacaaggctccgaaacaattctttcttcacttagttttctttctgtgctctgcatcttatattccagcagggtcttccaatgcatggtttaataactactagaactggccaggtgcagtggctcacgcctgtaatcccagaactttgggaggctaagacaggcagatcacttgaggccaggagttcgagaccagcctggacaacatggtgatacccagtttctactaaaaatacaaaaattagtcgggcatggtgatgtgcacctgtagtcccagctgctcgggaggctgaggcaggagaatcgcttgaacccgggagacagaggttgcaacgagccaagatcgagccactgcgctccggcctgggtgacaggagactccatctcaaaaaataaaattaaaaaaaaactactacaataaattatcaccttggactgtataaaacaacttttaaactagtctttttaaaaagtacacttaaataaaaatctaaacataagagaatgtaaagtgaaaagtgaaagtatgtcttctgttacgcagaggtaactactattaggaatccttcctgaaaatgtccatgcatctactcaggtcatcacacccatggaatcattttacatactattttatgagtgttacttaatatactgatccacagtgcgttttcacggtcacgccatcagttgtaggagtgtgccaagaacagatgggccttgcctttgtaccagaggagtccatttacagttgcaggtaatagaaaacccaattcagactggcctaaacaatgaggggaggttttggctcttgaaactggaaagtcccaaggtggggtgagtttcaggtttgggttgatccaagtggctcagtgacgtcaacaggatcttgtttccatttctctgccttccacagcctccccttcatctatggtggagggaaggagtctaccacagacaaaccccgagcctccccctgatgggtggtgtggtggtgaagccagcaagggaagggatccccggacacacccctcctcatgctttatcccactgaaaccatgcggctgt

SEQ ID NO: 8244 - protein, 44 aa, Homo sapiens; identical to SEQ ID NO: 8228

SEQ ID NO: 8245 - DNA, 2894 bp, Homo sapiens
cagatatttggcatcttcctggcaaggacgctgatctcagacatcgaggcagtgaaggccggccatcacttctgaggagcagagttgagggagccgagctgagccacgctgggaggccagagcctttctctgccatcagccctacgtccagagggagaggagccgacacccccagagccagtgccccatcttaagcatcagcgtgacgtgacctctctgtttctgcttgctggtgctgaagaccaagggtcccccttgttacctgcccaaacttgtgactgcatccctctggagtctacccagagacagagaatgtgtctttatgtgggagtggtgactctgaaagacagagagggctcctgtggctgccaggagggcttgactcagaccccctgcagctcaagcatgtctgcaggacaccctggtcccctctccactggcatccagacatctgctttgggtcatccacatctgtgggtgggccgtgggtagagggacccacaggcgtggacagggcatctctctccatcaagcaaagcagcatgggggcctgcccgtaacgggaggcggacgtggccccgctgggcctctgagtgccagcgcagtctgctgggacatgcacatatcaggggttgtttgcaggatcctcagccatgttcaagtgaagtaagcctgagccagtgcgtggactggtgccacgggagtgccttgtccactgtccccctgtgtccaccagctattctcctggcgccggaactgcctctggtcttgatagcattaagccctgatggcgccggtggcgcggtgggcatggttcttcactgagagccggctctccttttcttaaagtgtgtaaatagtttatttataggggtaagaatgttctcacaccatttcacttcctcttcctctcctccagcattctcctctgagcagccttagatagtgtccatggctggagccgaccctttgagtccccttgagtgtcttaagaaccagcccacaacagcctctctttctcctccacatactgcagcctccctccatgcatcccacatacaagcactcccccactccccagcgtggcctcactgtcttctggtcttggtgctactgaaattgtcacccagaatttgaatcctgacctcttggaaatgaagtcttaagtactgaataactcccctggggatagctggggcatttgtctagctgggctactttctaacactttgccatagctcagaccacttctcatcgttcagggatggactgcaaccttaatttacttgccggagtgtacattctagtgtggtgtatactggtggctgttgatgatgatttttttttttttacacaattctctgtagactaggagaagaatgcttgtgtttttcggaagtgtgatgcttctctttgactgccaaactcttttatggaatatatctttatattaatgctgttttggtcatttttgtttggggtcactattgagatattgctaagcatctcagtggtaaacgcggctgccagaggaaccaagggatagggtatgtagaccttacagaaggatggatggtaaaggcagtccatcatcagcacaatctgacttacatttcattgagtaattttttttttttttaagattctgtatggcagcactttcagttgcccttgtgtgccggccacagccgcacaagttggcttgtggtttatcccccgctataagtgagagctggagaaacttcaactccataggtctagaggaaacattgttttaggttatttctgtccacccctgtgcgatactatttattgatccaagcagaagagcttggggacactgagtcgaagtggggacatgggattgaagcctgggcactgctgctgcatgagctgtgtgtcctgggtgtgccggcctttctgtgaagggggttggtggcagtgcccacctcactagatgcctctgacccagcctcccctgggggagtgggtggccacagaccctccctgccagagctcctggaaggctcctgcaggcctgacccatctattcctgtagacctggtttaggatgaagtctcggtgcgatttttgcagagttgggtttatctttcaactatagacccttctggctgttctcagccatatcatgtgactctgaatagttggatgaggaatggaaagaaagcaaggatgagagccggtcacgtggcagtctccgcccagcatcggctgtccgcacagaggcacagggcaggcctcctgtgcactccccacctagcactggcctgtcctgaatccccgccttccctggttggaggccagctgtggcatttgcaccctcttctcacctcaccatgcacatgctaactttaaagccttggggtctttcctgtaccccctcctcaaccctggtccaccccctctcaggatcttgtcaacgttatttttcctgtcccgtcttcctatcgctggccttcctttcccatcctaaaaacttgccgaggccctatggctccctccctttctttcccaggcagcttcttatctgggctgtctgtaccccttcctttgcaccacccaccatgccccacgtagctgaaagctgcttatcccaattgtcaactctggccttcttcagcctctgtagcaccagacactgcacctcctgaatgtcctctgcttctctgcttcagaggcccaggctcgccagttctctgacctctcccatatgtctgcttaggactctgctgcagctgtcctcaccagcctccggggaatcccactacccacagggcagggctgtgggctgggctgaaaaaccatctgcatggtccacaagaagcctggcactgggtttccccatgaataacaatgaaaattaatggatgcac

SEQ ID NO: 8246 - protein, 104 aa, Homo sapiens; identical to SEQ ID NO: 8224

SEQ ID NO: 8247 - DNA, 5009 bp, Homo sapiens
cagatatttggcatcttcctggcaaggacgctgatctcagacatcgaggcagtgaaggccggccatcacttctgaggagcagagttgagggagccgagctgagccacgctgggaggccagagcctttctctgccatcagccctacgtccagagggagaggagccgacacccccagagccagtgccccatcttaagcatcagcgtgacgtgacctctctgtttctgcttgctggtgctgaagaccaagggtcccccttgttacctgcccaaacttgtgactgcatccctctggagtctacccagagacagagaatgtgtctttatgtgggagtggtgactctgaaagacagagagggctcctgtggctgccaggagggcttgactcagaccccctgcagctcaagcatgtctgcaggacaccctggtcccctctccactggcatccagacatctgctttgggtcatccacatctgtgggtgggccgtgggtagagggacccacaggcgtggacagggcatctctctccatcaagcaaagcagcatgggggcctgcccgtaacgggaggcggacgtggccccgctgggcctctgagtgccagcgcagtctgctgggacatgcacatatcaggggttgtttgcaggatcctcagccatgttcaagtgaagtaagcctgagccagtgcgtggactggtgccacgggagtgccttgtccactgtccccctgtgtccaccagctattctcctggcgccggaactgcctctggtcttgatagcattaagccctgatggcgccggtggcgcggtgggcatggttcttcactgagagccggctctccttttcttaaagtgtgtaaatagtttatttataggggtaagaatgttctcacaccatttcacttcctcttcctctcctccagcattctcctctgagcagccttagatagtgtccatggctggagccgaccctttgagtccccttgagtgtcttaagaaccagcccacaacagcctctctttctcctccacatactgcagcctccctccatgcatcccacatacaagcactcccccactccccagcgtggcctcactgtcttctggtcttggtgctactgaaattgtcacccagaatttgaatcctgacctcttggaaatgaagtcttaagtactgaataactcccctggggatagctggggcatttgtctagctgggctactttctaacactttgccatagctcagaccacttctcatcgttcagggatggactgcaaccttaatttacttgccggagtgtacattctagtgtggtgtatactggtggctgttgatgatgatttttttttttttacacaattctctgtagactaggagaagaatgcttgtgtttttcggaagtgtgatgcttctctttgactgccaaactcttttatggaatatatctttatattaatgctgttttggtcatttttgtttggggtcactattgagatattgctaagcatctcagtggtaaacgcggctgccagaggaaccaagggatagggtatgtagaccttacagaaggatggatggtaaaggcagtccatcatcagcacaatctgacttacatttcattgagtaattttttttttttttaagattctgtatggcagcactttcagttgcccttgtgtgccggccacagccgcacaagttggcttgtggtttatcccccgctataagtgagagctggagaaacttcaactccataggtctagaggaaacattgttttaggttatttctgtccacccctgtgcgatactatttattgatccaagcagaagagcttggggacactgagtcgaagtggggacatgggattgaagcctgggcactgctgctgcatgagctgtgtgtcctgggtgtgccggcctttctgtgaagggggttggtggcagtgcccacctcactagatgcctctgacccagcctcccctgggggagtgggtggccacagaccctccctgccagagctcctggaaggctcctgcaggcctgacccatctattcctgtagacctggtttaggatgaagtctcggtgcgatttttgcagagttgggtttatctttcaactatagacccttctggctgttctcagccatatcatgtgactctgaatagttggatgaggaatggaaagaaagcaaggatgagagccggtcacgtggcagtctccgcccagcatcggctgtccgcacagaggcacagggcaggcctcctgtgcactccccacctagcactggcctgtcctgaatccccgccttccctggttggaggccagctgtggcatttgcaccctcttctcacctcaccatgcacatgctaactttaaagccttggggtctttcctgtaccccctcctcaaccctggtccaccccctctcaggatcttgtcaacgttatttttcctgtcccgtcttcctatcgctggccttcctttcccatcctaaaaacttgccgaggccctatggctccctccctttctttcccaggcagcttcttatctgggctgtctgtaccccttcctttgcaccacccaccatgccccacgtagctgaaagctgcttatcccaattgtcaactctggccttcttcagcctctgtagcaccagacactgcacctcctgaatgtcctctgcttctctgcttcagaggcccaggctcgccagttctctgacctctcccatatgtctgcttaggactctgctgcagctgtcctcaccagcctccggggaatcccactacccacagggcagggctgtgggctgggctgaaaaaccatctgcatggtccacaagaagcctggcactgggtttccccatgaataacaatgaaaattaatggatgcacaaccttcctggaacgtggaatttctctgggagattccatgcagaggccactggggaggtggcaggcatgcatgtgactgtaggtggctgcagtgttggaaggctcccagcagagcagagagggtgtcagtctcatcagggaacccacctgatggcttctcagccagcagtctcagaggaacatagacgactgctgagaaaggagggaggcagcagtggtcccagcacctgaggcatcctgctgtcatgggaaggtctccgcccaaatgtcagatgcatcagcctgtcacccgctggtccagagctttcagctgtactggtagggggtgggtggtggagtgctgaatgaccttcacaggtgggcctttccagctctagggtcttacgggtgtcggtccacagaaccacggtttttaggttgtgtgtccggggctatgggaacctgtcccccatgatggatcttggtagagacacttccctctgtcatcgtgcccaggaggatgctgcaggtgactacctgcagccctgttctcattcatttggatgccctccagaaatctggggagccatacacctttagagccttttttgctccttatcaagttggcaaggcttggccaattcctgttcaaggctgcattaaaggcatgttcaccatcctggctaatacggtgaaaccccttctctactaaaaatacaaaaaaattagccgggcttggtggcgggtgcctgtagtcccagctactccggaggctgaggcaggggaatggtgtgaacccaggaggcggagcttgcagtgagccgagatcacaccactgcactccagcctgggctcaaaaaagaaaaaaaaaaaaaaaaaaaggcccgttcattctcaaatgcttttggcgtctccagggtgcctcaggaaaacatgaagtgggcattgtagaacttggggctactgtgtaactttggaagaaaaagttaagggtacttttaagtggatactgttttgatgaaattgccaacttcagggagcccagcttggagaaggaggacgtgagtattccttacaaggctccgaaacaattctttcttcacttagttttctttctgtgctctgcatcttatattccagcagggtcttccaatgcatggtttaataactactagaactggccaggtgcagtggctcacgcctgtaatcccagaactttgggaggctaagacaggcagatcacttgaggccaggagttcgagaccagcctggacaacatggtgatacccagtttctactaaaaatacaaaaattagtcgggcatggtgatgtgcacctgtagtcccagctgctcgggaggctgaggcaggagaatcgcttgaacccgggagacagaggttgcaacgagccaagatcgagccactgcgctccggcctgggtgacaggagactccatctcaaaaaataaaattaaaaaaaaactactacaataaattatcaccttggactgtataaaacaacttttaaactagtctttttaaaaagtacacttaaataaaaatctaaacataagagaatgtaaagtgaaaagtgaaagtatgtcttctgttacgcagaggtaactactattaggaatccttcctgaaaatgtccatgcatctactcaggtcatcacacccatggaatcattttacatactattttatgagtgttacttaatatactgatccacagtgcgttttcacggtcacgccatcagttgtaggagtgtgccaagaacagatgggccttgcctttgtaccagaggagtccatttacagttgcaggtaatagaaaacccaattcagactggcctaaacaatgaggggaggttttggctcttgaaactggaaagtcccaaggtggggtgagtttcaggtttgggttgatccaagtggctcagtgacgtcaacaggatcttgtttccatttctctgccttccacagcctccccttcatctatggtggagggaaggagtctaccacagacaaaccccgagcctccccctgatgggtggtgtggtggtgaagccagcaagggaagggatccccggacacacccctcctcatgctttatcccactgaaaccatgcggctgt

SEQ ID NO: 8248 - protein, 104 aa, Homo sapiens; identical to SEQ ID NO: 8224

SEQ ID NO: 8249 - DNA, 2198 bp, Homo sapiens
gggcctctgagtgccagcgcagtctgctgggacatgcacatatcaggggttgtttgcaggatcctcagccatgttcaagtgaagtaagcctgagccagtgcgtggactggtgccacgggagtgccttgtccactgtccccctgtgtccaccagctattctcctggcgccggaactgcctctggtcttgatagcattaagccctgatggcgccggtggcgcggtgggcatggttcttcactgagagccggctctccttttcttaaagtgtgtaaatagtttatttataggggtaagaatgttctcacaccatttcacttcctcttcctctcctccagcattctcctctgagcagccttagatagtgtccatggctggagccgaccctttgagtccccttgagtgtcttaagaaccagcccacaacagcctctctttctcctccacatactgcagcctccctccatgcatcccacatacaagcactcccccactccccagcgtggcctcactgtcttctggtcttggtgctactgaaattgtcacccagaatttgaatcctgaccctccccactgcaagcccagggagccccagcccaagatggccagcctgaaactgttggccagggctcctcttgtggccatgtacccagggctggctggcctgccatttgcctctccccggagacagccgttcttctgcaaccacaccccgtgcctagccacaaccccaggctgcagctgctcagaagctccaggcattttgtttctggtgaccgcccctaatgggatatcggtgatcactggtccacccttcctgtcagggcttttctggggctgctcttggaaatgaagtcttaagtactgaataactcccctggggatagctggggcatttgtctagctgggctactttctaacactttgccatagctcagaccacttctcatcgttcattctcaaatgcttttggcgtctccagggtgcctcaggaaaacatgaagtgggcattgtagaacttggggctactgtgtaactttggaagaaaaagttaagggtacttttaagtggatactgttttgatgaaattgccaacttcagggagcccagcttggagaaggaggacgtgagtattccttacaaggctccgaaacaattctttcttcacttagttttctttctgtgctctgcatcttatattccagcagggtcttccaatgcatggtttaataactactagaactggccaggtgcagtggctcacgcctgtaatcccagaactttgggaggctaagacaggcagatcacttgaggccaggagttcgagaccagcctggacaacatggtgatacccagtttctactaaaaatacaaaaattagtcgggcatggtgatgtgcacctgtagtcccagctgctcgggaggctgaggcaggagaatcgcttgaacccgggagacagaggttgcaacgagccaagatcgagccactgcgctccggcctgggtgacaggagactccatctcaaaaaataaaattaaaaaaaaactactacaataaattatcaccttggactgtataaaacaacttttaaactagtctttttaaaaagtacacttaaataaaaatctaaacataagagaatgtaaagtgaaaagtgaaagtatgtcttctgttacgcagaggtaactactattaggaatccttcctgaaaatgtccatgcatctactcaggtcatcacacccatggaatcattttacatactattttatgagtgttacttaatatactgatccacagtgcgttttcacggtcacgccatcagttgtaggagtgtgccaagaacagatgggccttgcctttgtaccagaggagtccatttacagttgcaggtaatagaaaacccaattcagactggcctaaacaatgaggggaggttttggctcttgaaactggaaagtcccaaggtggggtgagtttcaggtttgggttgatccaagtggctcagtgacgtcaacaggatcttgtttccatttctctgccttccacagcctccccttcatctatggtggagggaaggagtctaccacagacaaaccccgagcctccccctgatgggtggtgtggtggtgaagccagcaagggaagggatccccggacacacccctcctcatgctttatcccactgaaaccatgcggctgt

SEQ ID NO: 8250 - protein, 83 aa, Homo sapiens [sequence omitted]

SEQ ID NO: 8251 - DNA, 1605 bp, Homo sapiens
cttagatagtgtccatggctggagccgaccctttgagtccccttgagtgtcttaagaaccagcccacaacagcctctctttctcctccacatactgcagcctccctccatgcatcccacatacaagcactcccccactccccagcgtggcctcactgtcttctggtcttggtgctactgaaattgtcacccagaatttgaatcctgaccctccccactgcaagcccagggagccccagcccaagatggccagcctgaaactgttggccagggctcctcttgtggccatgtacccagggctggctggcctgccatttgcctctccccggagacagccgttcttctgcaaccacaccccgtgcctagccacaaccccaggctgcagctgctcagaagctccaggcattttgtttctggtgaccgcccctaatgggatatcggtgatcactggtccacccttcctgtcagggcttttctggggctgctcttggaaatgaagtcttaagtactgaataactcccctggggatagctggggcatttgtctagctgggctactttctaacactttgccatagctcagaccacttctcatcgttcagggatggactgcaaccttaatttacttgccggagtgtacattctagtgtggtgtatactggtggctgttgatgatgatttttttttttttacacaattctctgtagactaggagaagaatgcttgtgtttttcggaagtgtgatgcttctctttgactgccaaactcttttatggaatatatctttatattaatgctgttttggtcatttttgtttggggtcactattgagatattgctaagcatctcagtggtaaacgcggctgccagaggaaccaagggatagggtatgtagaccttacagaaggatggatggtaaaggcagtccatcatcagcacaatctgacttacatttcacaataaattatcaccttggactgtataaaacaacttttaaactagtctttttaaaaagtacacttaaataaaaatctaaacataagagaatgtaaagtgaaaagtgaaagtatgtcttctgttacgcagaggtaactactattaggaatccttcctgaaaatgtccatgcatctactcaggtcatcacacccatggaatcattttacatactattttatgagtgttacttaatatactgatccacagtgcgttttcacggtcacgccatcagttgtaggagtgtgccaagaacagatgggccttgcctttgtaccagaggagtccatttacagttgcaggtaatagaaaacccaattcagactggcctaaacaatgaggggaggttttggctcttgaaactggaaagtcccaaggtggggtgagtttcaggtttgggttgatccaagtggctcagtgacgtcaacaggatcttgtttccatttctctgccttccacagcctccccttcatctatggtggagggaaggagtctaccacagacaaaccccgagcctccccctgatgggtggtgtggtggtgaagccagcaagggaagggatccccggacacacccctcctcatgctttatcccactgaaaccatgcggctgt

SEQ ID NO: 8252 - protein, 39 aa, Homo sapiens
MDGKGSPSSAQSDLHFTINYHLGLYKTTFKLVFLKSTLK

SEQ ID NO: 8253 - DNA, 3350 bp, Homo sapiens
gaaggatggatggtaaaggcagtccatcatcagcacaatctgacttacatttcattgagtaattttttttttttttaagattctgtatggcagcactttcagttgcccttgtgtgccggccacagccgcacaagttggcttgtggtttatcccccgctataagtgagagctggagaaacttcaactccataggtctagaggaaacattgttttaggttatttctgtccacccctgtgcgatactatttattgatccaagcagaagagcttggggacactgagtcgaagtggggacatgggattgaagcctgggcactgctgctgcatgagctgtgtgtcctgggtgtgccggcctttctgtgaagggggttggtggcagtgcccacctcactagatgcctctgacccagcctcccctgggggagtgggtggccacagaccctccctgccagagctcctggaaggctcctgcaggcctgacccatctattcctgtagacctggtttaggatgaagtctcggtgcgatttttgcagagttgggtttatctttcaactatagacccttctggctgttctcagccatatcatgtgactctgaatagttggatgaggaatggaaagaaagcaaggatgagagccggtcacgtggcagtctccgcccagcatcggctgtccgcacagaggcacagggcaggcctcctgtgcactccccacctagcactggcctgtcctgaatccccgccttccctggttggaggccagctgtggcatttgcaccctcttctcacctcaccatgcacatgctaactttaaagccttggggtctttcctgtaccccctcctcaaccctggtccaccccctctcaggatcttgtcaacgttatttttcctgtcccgtcttcctatcgctggccttcctttcccatcctaaaaacttgccgaggccctatggctccctccctttctttcccaggcagcttcttatctgggctgtctgtaccccttcctttgcaccacccaccatgccccacgtagctgaaagctgcttatcccaattgtcaactctggccttcttcagcctctgtagcaccagacactgcacctcctgaatgtcctctgcttctctgcttcagaggcccaggctcgccagttctctgacctctcccatatgtctgcttaggactctgctgcagctgtcctcaccagcctccggggaatcccactacccacagggcagggctgtgggctgggctgaaaaaccatctgcatggtccacaagaagcctggcactgggtttccccatgaataacaatgaaagtggctgcagtgttggaaggctcccagcagagcagagagggtgtcagtctcatcagggaacccacctgatggcttctcagccagcagtctcagaggaacatagacgactgctgagaaaggagggaggcagcagtggtcccagcacctgaggcatcctgctgtcatgggaaggtctccgcccaaatgtcagatgcatcagcctgtcacccgctggtccagagctttcagctgtactggtagggggtgggtggtggagtgctgaatgaccttcacaggtgggcctttccagctctagggtcttacgggtgtcggtccacagaaccacggtttttaggttgtgtgtccggggctatgggaacctgtcccccatgatggatcttggtagagacacttccctctgtcatcgtgcccaggaggatgctgcaggtgactacctgcagccctgttctcattcatttggatgccctccagaaatctggggagccatacacctttagagccttttttgctccttatcaagttggcaaggcttggccaattcctgttcaaggctgcattaaaggcatgttcaccatcctggctaatacggtgaaaccccttctctactaaaaatacaaaaaaattagccgggcttggtggcgggtgcctgtagtcccagctactccggaggctgaggcaggggaatggtgtgaacccaggaggcggagcttgcagtgagccgagatcacaccactgcactccagcctgggctcaaaaaagaaaaaaaaaaaaaaaaaaaggcccgttcattctcaaatgcttttggcgtctccagggtgcctcaggaaaacatgaagtgggcattgtagaacttggggctactgtgtaactttggaagaaaaagttaagggtacttttaagtggatactgttttgatgaaattgccaacttcagggagcccagcttggagaaggaggacgtgagtattccttacaaggctccgaaacaattctttcttcacttagttttctttctgtgctctgcatcttatattccagcagggtcttccaatgcatggtttaataactactagaactggccaggtgcagtggctcacgcctgtaatcccagaactttgggaggctaagacaggcagatcacttgaggccaggagttcgagaccagcctggacaacatggtgatacccagtttctactaaaaatacaaaaattagtcgggcatggtgatgtgcacctgtagtcccagctgctcgggaggctgaggcaggagaatcgcttgaacccgggagacagaggttgcaacgagccaagatcgagccactgcgctccggcctgggtgacaggagactccatctcaaaaaataaaattaaaaaaaaactactacaataaattatcaccttggactgtataaaacaacttttaaactagtctttttaaaaagtacacttaaataaaaatctaaacataagagaatgtaaagtgaaaagtgaaagtatgtcttctgttacgcagaggtaactactattaggaatccttcctgaaaatgtccatgcatctactcaggtcatcacacccatggaatcattttacatactattttatgagtgttacttaatatactgatccacagtgcgttttcacggtcacgccatcagttgtaggagtgtgccaagaacagatgggccttgcctttgtaccagaggagtccatttacagttgcaggtaatagaaaacccaattcagactggcctaaacaatgaggggaggttttggctcttgaaactggaaagtcccaaggtggggtgagtttcaggtttgggttgatccaagtggctcagtgacgtcaacaggatcttgtttccatttctctgccttccacagcctccccttcatctatggtggagggaaggagtctaccacagacaaaccccgagcctccccctgatgggtggtgtggtggtgaagccagcaagggaagggatccccggacacacccctcctcatgctttatcccactgaaaccatgcggctgt

SEQ ID NO: 8254 - protein, 118 aa, Homo sapiens [sequence omitted]

SEQ ID NO: 8255 - DNA, 5880 bp, Homo sapiens
cgggagcccgaccgcgctgggctgggctgggctgggctggggcgggcgcagggcgcaggggcgggcgcgcgggggaagacgcacgggcgggctcggctctcccggggagcggcccgggactgcaccgggaccagcgcctccccgcttcgcgctgccctcggcctcgccccgggcccgggtggatgagccgcgcgcccgggggacatggaagcgctgacgctgtggcttctcccctggatatgccagtgcgtgtcggtgcgggccgactccatcatccacatcggtgccatcttcgaggagaacgcggccaaggacgacagggtgttccagttggcggtatccgacctgagcctcaacgatgacatcctgcagagcgagaagatcacctactccatcaaggtcatcgaggccaacaacccattccaggctgtgcaggaagcctgtgacctcatgacccaggggattttggccttggtcacgtccactggctgtgcatctgccaatgccctgcagtccctcacggatgccatgcacatcccacacctctttgtccagcgcaacccgggagggtcgccacgcaccgcatgccacctgaaccccagccccgatggtgaggcctacacactggcttcgagaccacccgtccgcctcaatgatgtcatgctcaggctggtgacggagctgcgctggcagaagttcgtcatgttctacgacagcgagtatgatatccgtgggcttcaaagctttctggaccaggcctcgcggctgggccttgacgtctctttacaaaaggtggacaagaacattagccacgtattcaccagcctcttcaccacgatgaagacagaggagctgaatcgctaccgggacacgcttcgccgcgccatcctgctgctcagcccacagggagcccactccttcatcaacgaggccgtggagaccaacctggcttccaaggacagccactgggtctttgtgaatgaggaaatcagtgacccggagatcctggatctggtccatagtgcccttggaaggatgaccgtggtccggcaaatctttccgtctgcaaaggacaatcagaaatgcacgaggaacaaccaccgcatctcctccctgctctgcgacccccaggaaggctacctccagatgctgcagatctccaacctctatctgtatgacagtgttctgatgctggccaacgcctttcacaggaagctggaggaccggaagtggcatagcatggcgagcctcaactgcatacggaaatccactaagccatggaatggtgggaggtccatgctggataccatcaaaaagggccacatcactggcctcactggggtgatggagtttcgggaggacagttcgaatccctatgtccagtttgaaatccttggcactacctatagtgagacttttggcaaagacatgcgcaagttggcgacatgggactcagagaagggcttgaatggcagcttgcaagagaggcccatgggcagccgcctccaaggattgactcttaaagtggtgactgtcttggaagagcctttcgtgatggtggctgagaacatcctaggacagcccaagcgctacaaagggttctccatagatgtcctggatgcactggccaaggctctgggctttaaatatgagatttaccaagcccctgatggcaggtacggtcaccagctccataacacctcctggaacgggatgatcggggagctcatcagcaagagagcagacttggccatctctgccatcaccatcaccccagagagggagagcgttgtggacttcagcaagcggtacatggactattcagtggggattctaattaagaagcccgaggagaaaatcagcatcttctccctctttgctccatttgatttcgctgtgtgggcctgcattgcagcagccatccctgtggttggtgtgctgatatttgtgttgaacaggatacaggctgtgagggctcagagtgctgcccagcccaggccgtcagcttctgccactctgcacagcgccatctggattgtctatggagccttcgtacagcaaggtggcgaatcttccgtgaactccatggccatgcgcatcgtgatgggcagctggtggctcttcacgctcattgtgtgctcctcctacacagccaaccttgctgccttcctcacagtgtccaggatggacaaccccataaggactttccaggacctgtccaaacaagtggaaatgtcttatggcactgtccgggattctgctgtatatgagtacttccgagccaagggcaccaaccccctggagcaggacagcacgtttgctgaactctggcggaccatcagcaagaacggaggggctgacaactgcgtgtccagtccttcagaaggcatcaggaaggcaaagaaggggaactacgccttcctgtgggatgtggccgtggtggaatacgcagccctgacggatgacgactgctcggtgactgtcatcggcaacagcatcagcagcaagggttacgggattgccctgcagcatggcagcccctacagggacctcttctcccagaggatcctggagctgcaggacacaggggacctggatgtgctgaagcagaagtggtggccgcacatgggccgctgtgacctcaccagccatgccagcgcccaggccgacggcaaatccctcaagctgcacagcttcgccggggtcttctgcatcctggccattggcctgctcctggcctgcctggtggctgccctggagttgtggtggaacagcaaccggtgccaccaggagacccccaaggaggacaaagaagtgaacttggagcaggtccaccggcgcatgaacagcctcatggatgaagacattgctcacaagcagatttccccagcgtcgattgagctctcggccctggagatggggggcctggctcccacccagaccttggagccgacacgggagtaccagaacacccagctctcggtcagcacctttctgccagagcagagcagccatggcaccagccggacactctcatcagggcccagcagcaacctgccgctgccgctgagcagctcggcgaccatgccctccatgcagtgcaaacacaggtcacccaacggggggctgttccggcagagcccggtgaagacccccatccccatgtccttccagcccgtgcctggaggcgtccttccagaggctctggacacctcccacgggacctccatctgactgcgccgcctgccctcctgcccaccctcccacccacccgaccagcagagctttttaatacaagaaaacaacaacacaaaccacacacactcgcacacacacacatacacagagactctttcatttttcttgtacatatgtgtaaataatgacagaatggagtggggtaaaagtgtattttgaatattcccaattttcgaagtcagtaaaaaaacacaaaaactgtatgaatgactttgtaaattttgttctatatgaataaaaaggcaaattacttgtgatcattctgaagtgccaaaggagcccccccattcctgggcctttctgagggcaggaggggcgaccagataaggagcccctctctgctgggggagaagggaagacgaggaaccccacatgccactcgctgccttgtcccacagcttgctgccccatttctttgctcctggcacctcgtcccttttagtccctcagcttgataaagagtgagtttggagcccgcattgggctggcccactgggttgctgtgctgtagggtgatcggctgttctgggtagcctggggctgaggaggtgccctggactcagggctatcctgtcctgtcttggatcttgcgggacgagttagtcaccgctgtgtgtgttgcagtgtgcctctgccccatgggcccgagagaagctgacaattacccatagtgaggtaattgagggctttgatactgagctgttctcatatcatactgttggccttgtttttcattttcttttcaaaattagaagaatcaaaaagtgatagaatattgggggaaggagggcagactccatcgtttcctcagggagactgggcggaggtggggttggtctggaagaaggtccatgggggcagggagttgcgaggtggggttagttgcatggaccaggtgaggtggtggaacaaaaggccaggtagaggaagaatattcccttgggtttggacccatggtcccaggtgagagaaggaagtgaggccatagatgcagggagtagaagctttgtggtgtcaggcaaacggactctgttagtaagagttgggggaggtgcccaggtgggtggaccagtactccaggtgatggggcatgctgagaaatagagaaaagagaccatgtttatttgggtaggaggaagccttgccttgcgccttaggtgagaagcataagtgtaactcccatccaccagggaagttgcttgtagccccaaaagtaaaggcctatctctgggtcataaatcctgcaggcagtccaacaaacagggctggctccagcacaaactctcccttccacctttacgaccctctccagaccagacctggagtcctcttcaagcagcaatccaacccagagcaggggccctccccactcaggcatctgataacctctgagatttccaggcctatccctgtgcaggtacagctgcagggaagcccagttttctaagcctaggaccacctaacagcgccccctccttcagttgccctttctgaggcaactaaactacagaatcagggaaagaaccattaggagtggaactgggggaatctgagttgtgtcacttcagttcctctcctaaagacaaaggttagtctgatctccagacccgtcagaatggaatacacagcccacatctgtcactgaaggaggtggagctcccacagccagcagtaatcagggagctgagagcctggttctgtgatcatggagaaatacaaagtcctattgattgcttcttctatagccttgtagagtttctagagagatgtatttatgagggtgataactagcccaggattgatttctttcctaaagtccctagtgacatgattgagcagtaaagaacggccaaatcacacagtcagctaaaagcactgtggggaagagagtgtttataattatgttatttattgctggatgctgagaatggtctgatattcgtgctacctaggcaatccattgacatttctccaatcagagcatgtggaccttggagccaggcatgctcagagaagcctaggtgggctaccatgaccccgaggaagagcaggctttgttttccatcagcacgttgggggccctgccctgaatggtcaatttttcacatatatatctctctatttttttaatcaaactctggtctcactgccttatctcacaccaactctgtttcctcattgccccctgagatggcctgtcttctggggtatagcttggatgtcttcttggatggttctgcttagaatgagtgtcaaggaggaaagagagggagatggaggaccagcatcttcaagagaagtattctgcttatacaaaatccttaacacctcatggtgttattcttcaccatgtttatatatatatatatatatttttttttttttttagaattttctacccttggcatgaggggaaatgattgatattcaagcaagttctctaggaaaaaaaaaaacttcccaactcagatttctgtgtcagctcagaatgtatctttttttcatgctttgctctttggatttataactctgtttagactattccatacattttaggtatattttgtgccttcagacactgcaaataataatcagcatttggattaaagttgtttaataata

SEQ ID NO: 8256 - protein, 1009 aa, Homo sapiens; identical to SEQ ID NO: 1188

SEQ ID NO: 8257 - DNA, 3517 bp, Homo sapiens
cgggagcccgaccgcgctgggctgggctgggctgggctggggcgggcgcagggcgcaggggcgggcgcgcgggggaagacgcacgggcgggctcggctctcccggggagcggcccgggactgcaccgggaccagcgcctccccgcttcgcgctgccctcggcctcgccccgggcccgggtggatgagccgcgcgcccgggggacatggaagcgctgacgctgtggcttctcccctggatatgccagtgcgtgtcggtgcgggccgactccatcatccacatcggtgccatcttcgaggagaacgcggccaaggacgacagggtgttccagttggcggtatccgacctgagcctcaacgatgacatcctgcagagcgagaagatcacctactccatcaaggtcatcgaggccaacaacccattccaggctgtgcaggaagcctgtgacctcatgacccaggggattttggccttggtcacgtccactggctgtgcatctgccaatgccctgcagtccctcacggatgccatgcacatcccacacctctttgtccagcgcaacccgggagggtcgccacgcaccgcatgccacctgaaccccagccccgatggtgaggcctacacactggcttcgagaccacccgtccgcctcaatgatgtcatgctcaggctggtgacggagctgcgctggcagaagttcgtcatgttctacgacagcgagtatgatatccgtgggcttcaaagctttctggaccaggcctcgcggctgggccttgacgtctctttacaaaaggtggacaagaacattagccacgtattcaccagcctcttcaccacgatgaagacagaggagctgaatcgctaccgggacacgcttcgccgcgccatcctgctgctcagcccacagggagcccactccttcatcaacgaggccgtggagaccaacctggcttccaaggacagccactgggtctttgtgaatgaggaaatcagtgacccggagatcctggatctggtccatagtgcccttggaaggatgaccgtggtccggcaaatctttccgtctgcaaaggacaatcagaaatgcacgaggaacaaccaccgcatctcctccctgctctgcgacccccaggaaggctacctccagatgctgcagatctccaacctctatctgtatgacagtgttctgatgctggccaacgcctttcacaggaagctggaggaccggaagtggcatagcatggcgagcctcaactgcatacggaaatccactaagccatggaatggtgggaggtccatgctggataccatcaaaaagggccacatcactggcctcactggggtgatggagtttcgggaggacagttcgaatccctatgtccagtttgaaatccttggcactacctatagtgagacttttggcaaagacatgcgcaagttggcgacatgggactcagagaagggcttgaatggcagcttgcaagagaggcccatgggcagccgcctccaaggattgactcttaaagtggtgactgtcttggaagagcctttcgtgatggtggctgagaacatcctaggacagcccaagcgctacaaagggttctccatagatgtcctggatgcactggccaaggctctgggctttaaatatgagatttaccaagcccctgatggcaggtacggtcaccagctccataacacctcctggaacgggatgatcggggagctcatcagcaagagagcagacttggccatctctgccatcaccatcaccccagagagggagagcgttgtggacttcagcaagcggtacatggactattcagtggggattctaattaagaagcccgaggagaaaatcagcatcttctccctctttgctccatttgatttcgctgtgtgggcctgcattgcagcagccatccctgtggttggtgtgctgatatttgtgttgaacaggatacaggctgtgagggctcagagtgctgcccagcccaggccgtcagcttctgccactctgcacagcgccatctggattgtctatggagccttcgtacagcaaggtggcgaatcttccgtgaactccatggccatgcgcatcgtgatgggcagctggtggctcttcacgctcattgtgtgctcctcctacacagccaaccttgctgccttcctcacagtgtccaggatggacaaccccataaggactttccaggacctgtccaaacaagtggaaatgtcttatggcactgtccgggattctgctgtatatgagtacttccgagccaagggcaccaaccccctggagcaggacagcacgtttgctgaactctggcggaccatcagcaagaacggaggggctgacaactgcgtgtccagtccttcagaaggcatcaggaaggcaaagaaggggaactacgccttcctgtgggatgtggccgtggtggaatacgcagccctgacggatgacgactgctcggtgactgtcatcggcaacagcatcagcagcaagggttacgggattgccctgcagcatggcagcccctacagggacctcttctcccagaggatcctggagctgcaggacacaggggacctggatgtgctgaagcagaagtggtggccgcacatgggccgctgtgacctcaccagccatgccagcgcccaggccgacggcaaatccctcaagctgcacagcttcgccggggtcttctgcatcctggccattggcctgctcctggcctgcctggtggctgccctggagttgtggtggaacagcaaccggtgccaccaggagacccccaaggaggacaaagaagtgaacttggagcaggtccaccggcgcatgaacagcctcatggatgaagacattgctcacaagcagatttccccagcgtcgattgagctctcggccctggagatggggggcctggctcccacccagaccttggagccgacacgggagtaccagaacacccagctctcggtcagcacctttctgccagagcagagcagccatggcaccagccggacactctcatcagggcccagcagcaacctgccgctgccgctgagcagctcggcgaccatgccctccatgcagtgcaaacacaggtcacccaacggggggctgttccggcagagcccggtgaagacccccatccccatgtccttccagcccgtgcctggaggcgtccttccagaggctctggacacctcccacgggacctccatctgactgcgccgcctgccctcctgcccaccctcccacccacccgaccagcagagctttttaatacaagaaaacaacaacacaaaccacacacactcgcacacacacacatacacagagactctttcatttttcttgtacatatgtgtaaataatgacagaatggagtggggtaaaagtgtattttgaatattcccaattttcgaagtcagtaaaaaaacacaaaaactgtatgaatgactttgtaaattttgttctatatgaataaaaaggcaaattacttgtgatc

SEQ ID NO: 8258 - protein, 1009 aa, Homo sapiens; identical to SEQ ID NO: 1188

SEQ ID NO: 8259 - DNA, 3350 bp, Homo sapiens
cgggagcccgaccgcgctgggctgggctgggctgggctggggcgggcgcagggcgcaggggcgggcgcgcgggggaagacgcacgggcgggctcggctctcccggggagcggcccgggactgcaccgggaccagcgcctccccgcttcgcgctgccctcggcctcgccccgggcccgggtggatgagccgcgcgcccgggggacatggaagcgctgacgctgtggcttctcccctggatatgccagtgcgtgtcggtgcgggccgactccatcatccacatcggtgccatcttcgaggagaacgcggccaaggacgacagggtgttccagttggcggtatccgacctgagcctcaacgatgacatcctgcagagcgagaagatcacctactccatcaaggtcatcgaggccaacaacccattccaggctgtgcaggaagcctgtgacctcatgacccaggggattttggccttggtcacgtccactggctgtgcatctgccaatgccctgcagtccctcacggatgccatgcacatcccacacctctttgtccagcgcaacccgggagggtcgccacgcaccgcatgccacctgaaccccagccccgatggtgaggcctacacactggcttcgagaccacccgtccgcctcaatgatgtcatgctcaggctggtgacggagctgcgctggcagaagttcgtcatgttctacgacagcgagtatgatatccgtgggcttcaaagctttctggaccaggcctcgcggctgggccttgacgtctctttacaaaaggtggacaagaacattagccacgtattcaccagcctcttcaccacgatgaagacagaggagctgaatcgctaccgggacacgcttcgccgcgccatcctgctgctcagcccacagggagcccactccttcatcaacgaggccgtggagaccaacctggcttccaaggacagccactgggtctttgtgaatgaggaaatcagtgacccggagatcctggatctggtccatagtgcccttggaaggatgaccgtggtccggcaaatctttccgtctgcaaaggacaatcagaaatgcacgaggaacaaccaccgcatctcctccctgctctgcgacccccaggaaggctacctccagatgctgcagatctccaacctctatctgtatgacagtgttctgatgctggccaacgcctttcacaggaagctggaggaccggaagtggcatagcatggcgagcctcaactgcatacggaaatccactaagccatggaatggtgggaggtccatgctggataccatcaaaaagggccacatcactggcctcactggggtgatggagtttcgggaggacagttcgaatccctatgtccagtttgaaatccttggcactacctatagtgagacttttggcaaagacatgcgcaagttggcgacatgggactcagagaagggcttgaatggcagcttgcaagagaggcccatgggcagccgcctccaaggattgactcttaaagtggtgactgtcttggaagagcctttcgtgatggtggctgagaacatcctaggacagcccaagcgctacaaagggttctccatagatgtcctggatgcactggccaaggctctgggctttaaatatgagatttaccaagcccctgatggcaggtacggtcaccagctccataacacctcctggaacgggatgatcggggagctcatcagcaagagagcagacttggccatctctgccatcaccatcaccccagagagggagagcgttgtggacttcagcaagcggtacatggactattcagtggggattctaattaagaagcccgaggagaaaatcagcatcttctccctctttgctccatttgatttcgctgtgtgggcctgcattgcagcagccatccctgtggttggtgtgctgatatttgtgttgaacaggatacaggctgtgagggctcagagtgctgcccagcccaggccgtcagcttctgccactctgcacagcgccatctggattgtctatggagccttcgtacagcaaggtggcgaatcttccgtgaactccatggccatgcgcatcgtgatgggcagctggtggctcttcacgctcattgtgtgctcctcctacacagccaaccttgctgccttcctcacagtgtccaggatggacaaccccataaggactttccaggacctgtccaaacaagtggaaatgtcttatggcactgtccgggattctgctgtatatgagtacttccgagccaagggcaccaaccccctggagcaggacagcacgtttgctgaactctggcggaccatcagcaagaacggaggggctgacaactgcgtgtccagtccttcagaaggcatcaggaaggatcctggagctgcaggacacaggggacctggatgtgctgaagcagaagtggtggccgcacatgggccgctgtgacctcaccagccatgccagcgcccaggccgacggcaaatccctcaagctgcacagcttcgccggggtcttctgcatcctggccattggcctgctcctggcctgcctggtggctgccctggagttgtggtggaacagcaaccggtgccaccaggagacccccaaggaggacaaagaagtgaacttggagcaggtccaccggcgcatgaacagcctcatggatgaagacattgctcacaagcagatttccccagcgtcgattgagctctcggccctggagatggggggcctggctcccacccagaccttggagccgacacgggagtaccagaacacccagctctcggtcagcacctttctgccagagcagagcagccatggcaccagccggacactctcatcagggcccagcagcaacctgccgctgccgctgagcagctcggcgaccatgccctccatgcagtgcaaacacaggtcacccaacggggggctgttccggcagagcccggtgaagacccccatccccatgtccttccagcccgtgcctggaggcgtccttccagaggctctggacacctcccacgggacctccatctgactgcgccgcctgccctcctgcccaccctcccacccacccgaccagcagagctttttaatacaagaaaacaacaacacaaaccacacacactcgcacacacacacatacacagagactctttcatttttcttgtacatatgtgtaaataatgacagaatggagtggggtaaaagtgtattttgaatattcccaattttcgaagtcagtaaaaaaacacaaaaactgtatgaatgactttgtaaattttgttctatatgaataaaaaggcaaattacttgtgatc

SEQ ID NO: 8260 - protein, 755 aa, Homo sapiens
MEALTLWLLPWICQCVSVRADSIIHIGAIFEENAAKDDRVFQLAVSDLSLNDDILQSEKITYSIKVIEANNPFQAVQEACDLMTQGILALVTSTGCASANALQSLTDAMHIPHLFVQRNPGGSPRTACHLNPSPDGEAYTLASRPPVRLNDVMLRLVTELRWQKFVMFYDSEYDIRGLQSFLDQASRLGLDVSLQKVDKNISHVFTSLFTTMKTEELNRYRDTLRRAILLLSPQGAHSFINEAVETNLASKDSHWVFVNEEISDPEILDLVHSALGRMTVVRQIFPSAKDNQKCTRNNHRISSLLCDPQEGYLQMLQISNLYLYDSVLMLANAFHRKLEDRKWHSMASLNCIRKSTKPWNGGRSMLDTIKKGHITGLTGVMEFREDSSNPYVQFEILGTTYSETFGKDMRKLATWDSEKGLNGSLQERPMGSRLQGLTLKVVTVLEEPFVMVAENILGQPKRYKGFSIDVLDALAKALGFKYEIYQAPDGRYGHQLHNTSWNGMIGELISKRADLAISAITITPERESVVDFSKRYMDYSVGILIKKPEEKISIFSLFAPFDFAVWACIAAAIPVVGVLIFVLNRIQAVRAQSAAQPRPSASATLHSAIWIVYGAFVQQGGESSVNSMAMRIVMGSWWLFTLIVCSSYTANLAAFLTVSRMDNPIRTFQDLSKQVEMSYGTVRDSAVYEYFRAKGTNPLEQDSTFAELWRTISKNGGADNCVSSPSEGIRKDPGAAGHRGPGCAEAEVVAAHGPL

SEQ ID NO: 8261 - DNA, 540 bp, Homo sapiens
acacttcagaatctgccaatcactgctgacaagtgtcagagccaggaccaggcatcagccagattgaaacaggcttttgatgaccctgagcagctcagggctgggctgtcttagagtgctctgtgagcacaaacctcccacaggaatatcctgtgagcacaaacctcccccatgggataggcactctcattgcctaaaggagtcatctgcagcaagaccagcagtggcacctgcatcttgggctatggttagatgtcatcctcactatcacttgcagaggttggtacgggtgtccccgttccatacatgaggaaactgaggctctgaccttacctggagttgctccactactaagtagcagagccagatacagagcccaggtccagctgacccacggccctagggtgctctcctctctgccttggacctgtgaagcagtactggattctaagggaggcagggcaatgccagtcctcactccagcagagaccgggatgtggcccaagaagagcgttaatatcacgcccagcctgcagtgtc

SEQ ID NO: 8262 - protein, 76 aa, Homo sapiens
MTLSSSGLGCLRVLCEHKPPTGISCEHKPPPWDRHSHCLKESSAARPAVAPASWAMVRCHPHYHLQRLVRVSPFHT

SEQ ID NO: 8263 - DNA, 5080 bp, Homo sapiens
gcacaaggtcgcagggccgttatgaggggaccccgggactcgaaccttggctccacagctgagccattctcgctacctgcccctcgtcacgccctccgtttccacacctttaacgcctcaaagatagaaggtgccgcccaaggggctggaaggagctgaggaaacgactccagaagaaatcaccactgactacgactcccgccggcccgccccggggagccttcggccgaccgtcccctcccccgccaccttccgcaccggccttcccggacggtatccgcgctcgttttcgctcagaggaggccccctgccttttcatgctccacgcgttcctccctcgtgcgcctgcagtttccacttggaatttgggctccggcgcgcaccagctaagaagcgcgtcaacagctgcgcgcgcccgtgcgcgcgtccccgacacctacgccccagcagcccccgcgaaagcggagtcgcaacgcaggcgcacttctgttcgctccggtccccagagaaggcggggctcccgctgcccgacccggaagtgcttctcttttccttggcggaggagggagaccacagagccctgggttgtggaagaggtggctgttccctgtcatcagtatgcagcgattgctctttccgccgttgagggccttgaaggggaggcagtatctgccgctcctggctcctagggcagcgcctagagcacagtgtgattgcatcaggcgccctttgaggccagggcaatacagcaccatctctgaagtagctttgcaatctggaaggggtacagtgtcccttccctcaaaggctgctgagcgggtggtgggccgatggctcctggtctgcagtggaacagtggctggagcagttattcttggtggagtaactaggttgacagagtctggcctcaggtaatccgcccatctcggcttcccaaagtgctgagattacaggcatgggccaccacgcccagctagttcctcttttgataaggctgttaacattacaaggtcagagagaggaatggaatcgacagtataaattggttcctgagagggtttcctaacagctttgtaataagaaaaatatggccttgatggtgtagtgcatggacatctacccagataaacaaattgttgactgctgaattaatgtgattttggtctctattgatatttcatagggccctgtcttattcaactttacttttaaaatcagtgatttggatgaaggcatcagaaacatctgatttgaggatggagcaacccaatattgctaatataatagatgacagtggcaactgaaaacagtcccagaatgaccccatcgagatgaaattaaacagattagaaatgtaacatactcatttaaattaaataagttgtataagtttgggctgaagaaacctggccttatatcatttcatataaaaaagacgggattttagttgtcctcaggttcaatatgaaccaagtagtattcatgttgttattatatgataacagaaaaattagtggtacttcaggttttatcagtagaagtgtcacagccatagtcaaaatacccctaacatactgcatttcactctgggtaccaaatttaagcaagatattgatggccactaagtgtgtatccagaagaagagatcagaatgatgagtccagaacccctgtcacacagggaataggtgaaggaactagggatatttaactggagcagagaacatctggagagagagcaagattcctgtccttgagaagttgaagccgtctcatgcagaagagggaatgagcttccattatgctgcagagctggcagcaatggatgaaagttgcaggaagttagttttagttctgtagaaggcaagagtagggtagaccaaatcaaatgctcactggggtcaggctgatggagacagtaacactggcgagcaggtgccccagctcggactatactgctgagttctggtctgttgctgccactctacaggtccagggttgttagatcttctgggtttttgttttgctttttgaaataaggaaaataagcttatcttaagtttatttttccttggatatacctagattccatacagtgacaatacaaatacaaaggaagaacatctggatttcatccttgacctcatttacaaagcaaaaagagatgctggattcagatataaatgtttaattttgcagtgtttaagtcagcaaatcttctgttttttaaaaataagccacatatctagatttttctgtgaaagctctcaattaagtgttgggaactaatttcaagattttaaaaaatgttatgcaggcttaacgtgtctgagagccataaatgacctaacgtttcccgttagtctctgaactaggtgatctcagttctctttcaactccagtactctgtaagtttctgtgacctgtagtgtaccattctcaggtggtgatatggtttggatgttttgtcccctccaaatctcatgttcaaagtgtgacattcagtgttagaggtgggcctagtaggaggtatttgggtcatgggggcggatcccttatgtatgactttgtgccatccccatagtaatgagtgagttctcactctggttgtttatgcaagagctggttgtttaaaagagcctggaacttcctcctctctcgcttgctctctctcaccatgtgacacactggctccccttcaccttctgccatgattgtaagcttcgtgaggccctcaccagaagcagatgccagcgccatgcttcctatacagttctatgcagaacagtgagccaaataaacctcttttctttctaaaaattgtcagtatttccttatagcaatgcaagccgactaacacaggtgattcttagcaaaacagtttgtcaatttttcataaatgctggaccctggctgggcttatgctattgcctagaagagattcccaacttctctcttatttgaatcttagaaaaatcccaaagcccaagcctcatctaagaccaattaagtcacaatccctggaggaagtaaaaggcatatttttaaagttccccaggtgattccaatgtgcagacaagtctagggaccactggcttaggtcctaatagcctagttaccttagaaagttctgactagcttattcccattcccttctaatttccaccccaccttatcatttgatctgctatgttgctcctattagtatgttagtaggatatggtctcttctggatagaatccttcaaagaaagggaactgtagttcctgaggcaggttcccacaccatcctctcctgatcctcaaacccaggttgtccttagttagtaactgagtcagcagagggcagtatgacccaacccaaagaaccatatattaatgcttctacagttgcctccaaggaagtagcaactcatgagtaagttaaggtttcagatgttttacttcatttttcttttattacagatgatgagtacatttggaaaaacaactggttgcatttagctatataactgtattatatctatgagcttctggtgaatgattatcttagggttttttttgtatttatgttattcccagcactcccagacacatatcaaatattgaattagtgaatgcatgaatggaaaatggataattacagattgatgttccaaatacctttttccaaaaaaacaagtcatcacatacctataggattaaatagatttcccttaatattttcaaaggtctctctgcacttacgtccattgtttttaaaacatgaaggaaattaaaacacatggctttcttaatcagtcaacctagaattttttgtctgtaacttagactgacaaatactatctattgtagcaggggtaatgactagcaactccctaaagcaatgttggttgcagagatcaacactgataatcatgattttaggataaccagtttatctacagctacccttgtggtcctgggatgaatggtgggttatatatcagcatatgtaacacatatacccatgtccctgcataagggagaatgcatcacctctctaacatgcatcacacattttcctcaacactgacctaaaatgtttgtcagtgagaattttaagaattcaaaattcaacaaaattattgtttaatgtgaagcagtagaaaaaacagagtcttaacaactccccaaagcaatgtaatacaggcagcctttggttttttaaagtgtagatcataataaaaagatgtctttcactacactccgcagaggccattgatcaaggtagaaataaagggggagtacatggcatgtacttcaggacttcaactaaagggtaattgtggaatgagaatttcaaatacaacatagtaactgaaacactagaaaccaaagtatgtgtctgggatccctgcttgcagaaaaacatttatgaagctagtaaggggcgtcttcaccagcagcaggccaaatgccggcaagtgctctgtaggaggggccacttaggaaagtaccagggctgccttggagtggagaaggaggagtggccaccagagggtatacaagtggttgccctttaaaagaagaggctcaggagcagacatgtctttatgctagcctgaagtcatgcatgtgtggctatacatagcctgtgattcagaagacttttcaactttggttttcataaaaatggcaagcaatgatggattacattttaaaagtgaaagcccttgtagtatgagtaatgattcagttttactaataaaaggatctccgtattgctcagattttcagagaaacaaaatggtcaactggtgtgttattccttcctcgtccctctgataacggtactgacaaactggaaaataatgaaatattagagcaaaagagaaatgtgtaataacacaagagaagtctattaggatataaggaagataagtagacagagcaggcttaaaatgaagcttgaacaagccatctgcagaaacagaaaacagggtagatgggacacccaaacagggtgccacagctttccaacttagatccaggttatgagagaatgagccaagaacacaacctaaaagttttcaatttgag

SEQ ID NO: 8264 - protein, 98 aa, Homo sapiens
MQRLLFPPLRALKGRQYLPLLAPRAAPRAQCDCIRRPLRPGQYSTISEVALQSGRGTVSLPSKAAERVVGRWLLVCSGTVAGAVILGGVTRLTESGLR

SEQ ID NO: 8265 - DNA, 7073 bp, Homo sapiens
gggtcttggagcagccacaagctcggccacttggtagctgcgtgactttggggaccaagccccgtccccgccgtggcagctacaggtaactgcaggttaggaactgggctccgcgctcgacaattaactatcccagcggagtactggctgctggtgcgggcggtactggcatcctcgtgtggcgacggaaaaaacgtgaagctgaagttaaccaacttgcacaaggtcgcagggccgttatgaggggaccccgggactcgaaccttggctccacagctgagccattctcgctacctgcccctcgtcacgccctccgtttccacacctttaacgcctcaaagatagaaggtgccgcccaaggggctggaaggagctgaggaaacgactccagaagaaatcaccactgactacgactcccgccggcccgccccggggagccttcggccgaccgtcccctcccccgccaccttccgcaccggccttcccggacggtatccgcgctcgttttcgctcagaggaggccccctgccttttcatgctccacgcgttcctccctcgtgcgcctgcagtttccacttggaatttgggctccggcgcgcaccagctaagaagcgcgtcaacagctgcgcgcgcccgtgcgcgcgtccccgacacctacgccccagcagcccccgcgaaagcggagtcgcaacgcaggcgcacttctgttcgctccggtccccagagaaggcggggctcccgctgcccgacccggaagtgcttctcttttccttggcggaggagggagaccacagagccctgggttgtggaagaggtggctgttccctgtcatcagtatgcagcgattgctctttccgccgttgagggccttgaaggggaggcagtatctgccgctcctggctcctagggcagcgcctagagcacagtgtgattgcatcaggcgccctttgaggccagggcaatacagcaccatctctgaagtagctttgcaatctggaaggggtacagtgtcccttccctcaaaggctgctgagcgggtggtgggccgatggctcctggtctgcagtggaacagtggctggagcagttattcttggtggagtaactaggttgacagagtctggcctctcgatggtagattggcatttaataaaggagatgaagccacctacaagccaagaggaatgggaagcagaattccaaagataccagcaatttccagaatttaaaatcttgaatcatgatatgacactgacagaattcaagttcatctggtacatggagtactcacaccgaatgtggggtcgccttgtaggccttgtgtacatcctgcctgctgcctacttttggagaaagggctggctcagccgtggcatgaaaggacgtgttcttgccctctgtggcctcgtctgcttccagggtctgttgggatggtatatggtgaaaagtggactagaagaaaaatcagactcccatgacatccctcgggtcagtcagtaccgccttgctgcccacctgggatcagccctggttctttattgtgccagcttgtggacctcactgtcactgctactccctccgcacaagttgcctgaaacccaccaactcctacagttgagacgatttgctcatggaacagcaggtctggtgttccttacggccctctcaggggcttttgtggcagggctagatgctgggcttgtttataactcctttcccaaaatgggagaatcctggatcccggaggacctctttaccttctcccccatcctgaggaatgtttttgagaatcccaccatggtgcagtttgatcaccggattctgggaatcacttcagtcactgccattacagtgctctacttcctctctcggagaattccccttcctagaaggaccaagatggcagcagtgactctgctggctttggcgtatacacaggtgggcttgggcatcagcacgctgctgatgtatgtcccaactcctctggccgccactcaccagtcaggctccttggctttgctcactggtgctctttggctgatgaatgaactccgaagagtcccaaaatgattcttagaggaccagcctcctgggactgtgactgcttttgagagctcttcagagatcataagaacttgggcttttctacgagatgaccttgacataccaagtggtttccaaatggtcaacttacttaaaaatcttttcctgttttgagatagtcactggatcaagaatgcattaagtgtggttaccctaaatgttcccttttaaatctgcttttcatgttgaaaatcagttttaatgtagagaaagaaatgtctgccatttgctgcttaacaggctttgtgtcaggtttttcagtgttggcaagctcttggttctacgtggatgatttctacgtggatgttctcctgagtccttaattctgcctaaatagaatttctttatgatcttaacttcacttccattaggtgaagattgaaaggataggattgacatacccaaagtagccagctggtcttcagcaaaaaaaaaaaagctaatgtcttctaatatcctgattttcagaaatggggaaattgcagattttgacaagcttaatgtgtatatgtagcaaaatggtttttaagtacttggaaaaggaggtaatcgccaaatagttccatttttttttttttttttgagacagagtttcactcttgttgcccaggctggagtacaatggcgtgatctcagctcactctgcaacctccacttcccaggttcaagcgattctcatgcctcagcctcccgagtagctgggactacaggcacaagtcaccatgcctggctaattttgtatttttagtagagaaggggtttcaccacattggccgggctggtcttgaactcctgacctcaggtaatccgcccatctcggcttcccaaagtgctgagattacaggcatgggccaccacgcccagctagttcctcttttgataaggctgttaacattacaaggtcagagagaggaatggaatcgacagtataaattggttcctgagagggtttcctaacagctttgtaataagaaaaatatggccttgatggtgtagtgcatggacatctacccagataaacaaattgttgactgctgaattaatgtgattttggtctctattgatatttcatagggccctgtcttattcaactttacttttaaaatcagtgatttggatgaaggcatcagaaacatctgatttgaggatggagcaacccaatattgctaatataatagatgacagtggcaactgaaaacagtcccagaatgaccccatcgagatgaaattaaacagattagaaatgtaacatactcatttaaattaaataagttgtataagtttgggctgaagaaacctggccttatatcatttcatataaaaaagacgggattttagttgtcctcaggttcaatatgaaccaagtagtattcatgttgttattatatgataacagaaaaattagtggtacttcaggttttatcagtagaagtgtcacagccatagtcaaaatacccctaacatactgcatttcactctgggtaccaaatttaagcaagatattgatggccactaagtgtgtatccagaagaagagatcagaatgatgagtccagaacccctgtcacacagggaataggtgaaggaactagggatatttaactggagcagagaacatctggagagagagcaagattcctgtccttgagaagttgaagccgtctcatgcagaagagggaatgagcttccattatgctgcagagctggcagcaatggatgaaagttgcaggaagttagttttagttctgtagaaggcaagagtagggtagaccaaatcaaatgctcactggggtcaggctgatggagacagtaacactggcgagcaggtgccccagctcggactatactgctgagttctggtctgttgctgccactctacaggtccagggttgttagatcttctgggtttttgttttgctttttgaaataaggaaaataagcttatcttaagtttatttttccttggatatacctagattccatacagtgacaatacaaatacaaaggaagaacatctggatttcatccttgacctcatttacaaagcaaaaagagatgctggattcagatataaatgtttaattttgcagtgtttaagtcagcaaatcttctgttttttaaaaataagccacatatctagatttttctgtgaaagctctcaattaagtgttgggaactaatttcaagattttaaaaaatgttatgcaggcttaacgtgtctgagagccataaatgacctaacgtttcccgttagtctctgaactaggtgatctcagttctctttcaactccagtactctgtaagtttctgtgacctgtagtgtaccattctcaggtggtgatatggtttggatgttttgtcccctccaaatctcatgttcaaagtgtgacattcagtgttagaggtgggcctagtaggaggtatttgggtcatgggggcggatcccttatgtatgactttgtgccatccccatagtaatgagtgagttctcactctggttgtttatgcaagagctggttgtttaaaagagcctggaacttcctcctctctcgcttgctctctctcaccatgtgacacactggctccccttcaccttctgccatgattgtaagcttcgtgaggccctcaccagaagcagatgccagcgccatgcttcctatacagttctatgcagaacagtgagccaaataaacctcttttctttctaaaaattgtcagtatttccttatagcaatgcaagccgactaacacaggtgattcttagcaaaacagtttgtcaatttttcataaatgctggaccctggctgggcttatgctattgcctagaagagattcccaacttctctcttatttgaatcttagaaaaatcccaaagcccaagcctcatctaagaccaattaagtcacaatccctggaggaagtaaaaggcatatttttaaagttccccaggtgattccaatgtgcagacaagtctagggaccactggcttaggtcctaatagcctagttaccttagaaagttctgactagcttattcccattcccttctaatttccaccccaccttatcatttgatctgctatgttgctcctattagtatgttagtaggatatggtctcttctggatagaatccttcaaagaaagggaactgtagttcctgaggcaggttcccacaccatcctctcctgatcctcaaacccaggttgtccttagttagtaactgagtcagcagagggcagtatgacccaacccaaagaaccatatattaatgcttctacagttgcctccaaggaagtagcaactcatgagtaagttaaggtttcagatgttttacttcatttttcttttattacagatgatgagtacatttggaaaaacaactggttgcatttagctatataactgtattatatctatgagcttctggtgaatgattatcttagggttttttttgtatttatgttattcccagcactcccagacacatatcaaatattgaattagtgaatgcatgaatggaaaatggataattacagattgatgttccaaatacctttttccaaaaaaacaagtcatcacatacctataggattaaatagatttcccttaatattttcaaaggtctctctgcacttacgtccattgtttttaaaacatgaaggaaattaaaacacatggctttcttaatcagtcaacctagaattttttgtctgtaacttagactgacaaatactatctattgtagcaggggtaatgactagcaactccctaaagcaatgttggttgcagagatcaacactgataatcatgattttaggataaccagtttatctacagctacccttgtggtcctgggatgaatggtgggttatatatcagcatatgtaacacatatacccatgtccctgcataagggagaatgcatcacctctctaacatgcatcacacattttcctcaacactgacctaaaatgtttgtcagtgagaattttaagaattcaaaattcaacaaaattattgtttaatgtgaagcagtagaaaaaacagagtcttaacaactccccaaagcaatgtaatacaggcagcctttggttttttaaagtgtagatcataataaaaagatgtctttcactacactccgcagaggccattgatcaaggtagaaataaagggggagtacatggcatgtacttcaggacttcaactaaagggtaattgtggaatgagaatttcaaatacaacatagtaactgaaacactagaaaccaaagtatgtgtctgggatccctgcttgcagaaaaacatttatgaagctagtaaggggcgtcttcaccagcagcaggccaaatgccggcaagtgctctgtaggaggggccacttaggaaagtaccagggctgccttggagtggagaaggaggagtggccaccagagggtatacaagtggttgccctttaaaagaagaggctcaggagcagacatgtctttatgctagcctgaagtcatgcatgtgtggctatacatagcctgtgattcagaagacttttcaactttggttttcataaaaatggcaagcaatgatggattacattttaaaagtgaaagcccttgtagtatgagtaatgattcagttttactaataaaaggatctccgtattgctcagattttcagagaaacaaaatggtcaactggtgtgttattccttcctcgtccctctgataacggtactgacaaactggaaaataatgaaatattagagcaaaagagaaatgtgtaataacacaagagaagtctattaggatataaggaagataagtagacagagcaggcttaaaatgaagcttgaacaagccatctgcagaaacagaaaacagggtagatgggacacccaaacagggtgccacagctttccaacttagatccaggttatgagagaatgagccaagaacacaacctaaaagttttcaatttgag

SEQ ID NO: 8266 - protein, 410 aa, Homo sapiens; identical to SEQ ID NO: 1192

SEQ ID NO: 8267 - DNA, 3350 bp, Homo sapiens
gcacaaggtcgcagggccgttatgaggggaccccgggactcgaaccttggctccacagctgagccattctcgctacctgcccctcgtcacgccctccgtttccacacctttaacgcctcaaagatagaaggtgccgcccaaggggctggaaggagctgaggaaacgactccagaagaaatcaccactgactacgactcccgccggcccgccccggggagccttcggccgaccgtcccctcccccgccaccttccgcaccggccttcccggacggtatccgcgctcgttttcgctcagaggaggccccctgccttttcatgctccacgcgttcctccctcgtgcgcctgcagtttccacttggaatttgggctccggcgcgcaccagctaagaagcgcgtcaacagctgcgcgcgcccgtgcgcgcgtccccgacacctacgccccagcagcccccgcgaaagcggagtcgcaacgcaggcgcacttctgttcgctccggtccccagagaaggcggggctcccgctgcccgacccggaagtgcttctcttttccttggcggaggagggagaccacagagccctgggttgtggaagaggtggctgttccctgtcatcagtatgcagcgattgctctttccgccgttgagggccttgaaggggaggcagtatctgccgctcctggctcctagggcagcgcctagagcacagtgtgattgcatcaggcgccctttgaggccagggcaatacagcaccatctctgaagtagctttgcaatctggaaggggtacagtgtcccttccctcaaaggctgctgagcgggtggtgggccgatggctcctggtctgcagtggaacagtggctggagcagttattcttggtggagtaactaggttgacagagtctggcctctcgatggtagattggcatttaataaaggagatgaagccacctacaagccaagaggaatgggaagcagaattccaaagataccagcaatttccagaatttaaaatcttgaatcatgatatgacactgacagaattcaagttcatctggtacatggagtactcacaccgaatgtggggtcgccttgtaggccttgtgtacatcctgcctgctgcctacttttggagaaagggctggctcagccgtggcatgaaaggacgtgttcttgccctctgtggcctcgtctgcttccagggtctgttgggatggtatatggtgaaaagtggactagaagaaaaatcagactcccatgacatccctcgggtcagtcagtaccgccttgctgcccacctgggatcagccctggttctttattgtgccagcttgtggacctcactgtcactgctactccctccgcacaagttgcctgaaacccaccaactcctacagttgagacgatttgctcatggaacagcaggtctggtgttccttacggccctctcaggggcttttgtggcagggctagatgctgggcttgtttataactcctttcccaaaatgggagaatcctggatcccggaggacctctttaccttctcccccatcctgaggaatgtttttgagaatcccaccatggtgcagtttgatcaccggattctgggaatcacttcagtcactgccattacagtgctctacttcctctctcggagaattccccttcctagaaggaccaagatggcagcagtgactctgctggctttggcgtatacacagggccctgtcttattcaactttacttttaaaatcagtgatttggatgaaggcatcagaaacatctgatttgaggatggagcaacccaatattgctaatataatagatgacagtggcaactgaaaacagtcccagaatgaccccatcgagatgaaattaaacagattagaaatgtaacatactcatttaaattaaataagttgtataagtttgggctgaagaaacctggccttatatcatttcatataaaaaagacgggattttagttgtcctcaggttcaatatgaaccaagtagtattcatgttgttattatatgataacagaaaaattagtggtacttcaggttttatcagtagaagtgtcacagccatagtcaaaatacccctaacatactgcatttcactctgggtaccaaatttaagcaagatattgatggccactaagtgtgtatccagaagaagagatcagaatgatgagtccagaacccctgtcacacagggaataggtgaaggaactagggatatttaactggagcagagaacatctggagagagagcaagattcctgtccttgagaagttgaagccgtctcatgcagaagagggaatgagcttccattatgctgcagagctggcagcaatggatgaaagttgcaggaagttagttttagttctgtagaaggcaagagtagggtagaccaaatcaaatgctcactggggtcaggctgatggagacagtaacactggcgagcaggtgccccagctcggactatactgctgagttctggtctgttgctgccactctacaggtccagggttgttagatcttctgggtttttgttttgctttttgaaataaggaaaataagcttatcttaagtttatttttccttggatatacctagattccatacagtgacaatacaaatacaaaggaagaacatctggatttcatccttgacctcatttacaaagcaaaaagagatgctggattcagatataaatgtttaattttgcagtgtttaagtcagcaaatcttctgttttttaaaaataagccacatatctagatttttctgtgaaagctctcaattaagtgttgggaactaatttcaagattttaaaaaatgttatgcaggcttaacgtgtctgagagccataaatgacctaacgtttcccgttagtctctgaactaggtgatctcagttctctttcaactccagtactctgtaagtttctgtgacctgtagtgtaccattctcaggtggtgatatggtttggatgttttgtcccctccaaatctcatgttcaaagtgtgacattcagtgttagaggtgggcctagtaggaggtatttgggtcatgggggcggatcccttatgtatgactttgtgccatccccatagtaatgagtgagttctcactctggttgtttatgcaagagctggttgtttaaaagagcctggaacttcctcctctctcgcttgctctctctcaccatgtgacacactggctccccttcaccttctgccatgattgtaagcttcgtgaggccctcaccagaagcagatgccagcgccatgcttcctatacagttctatgcagaacagtgagccaaataaacctcttttctttct

SEQ ID NO: 8268 - protein, 388 aa, Homo sapiens; identical to SEQ ID NO: 1190

SEQ ID NO: 8269 - DNA, 2814 bp, Homo sapiens
gcacaaggtcgcagggccgttatgaggggaccccgggactcgaaccttggctccacagctgagccattctcgctacctgcccctcgtcacgccctccgtttccacacctttaacgcctcaaagatagaaggtgccgcccaaggggctggaaggagctgaggaaacgactccagaagaaatcaccactgactacgactcccgccggcccgccccggggagccttcggccgaccgtcccctcccccgccaccttccgcaccggccttcccggacggtatccgcgctcgttttcgctcagaggaggccccctgccttttcatgctccacgcgttcctccctcgtgcgcctgcagtttccacttggaatttgggctccggcgcgcaccagctaagaagcgcgtcaacagctgcgcgcgcccgtgcgcgcgtccccgacacctacgccccagcagcccccgcgaaagcggagtcgcaacgcaggcgcacttctgttcgctccggtccccagagaaggcggggctcccgctgcccgacccggaagtgcttctcttttccttggcggaggagggagaccacagagccctgggttgtggaagaggtggctgttccctgtcatcagtatgcagcgattgctctttccgccgttgagggccttgaaggggaggcagtatctgccgctcctggctcctagggcagcgcctagagcacagtgtgattgcatcaggcgccctttgaggccagggcaatacagcaccatctctgaagtagctttgcaatctggaaggggtacagtgtcccttccctcaaaggctgctgagcgggtggtgggccgatggctcctggtctgcagtggaacagtggctggagcagttattcttggtggagtaactaggttgacagagtctggcctcaggtaatccgcccatctcggcttcccaaagtgctgagattacaggcatgggccaccacgcccagctagttcctcttttgataaggctgttaacattacaaggtcagagagaggaatggaatcgacagtataaattggttcctgagagggtttcctaacagctttgtaataagaaaaatatggccttgatggtgtagtgcatggacatctacccagataaacaaattgttgactgctgaattaatgtgattttggtctctattgatatttcatagggccctgtcttattcaactttacttttaaaatcagtgatttggatgaaggcatcagaaacatctgatttgaggatggagcaacccaatattgctaatataatagatgacagtggcaactgaaaacagtcccagaatgaccccatcgagatgaaattaaacagattagaaatgtaacatactcatttaaattaaataagttgtataagtttgggctgaagaaacctggccttatatcatttcatataaaaaagacgggattttagttgtcctcaggttcaatatgaaccaagtagtattcatgttgttattatatgataacagaaaaattagtggtacttcaggttttatcagtagaagtgtcacagccatagtcaaaatacccctaacatactgcatttcactctgggtaccaaatttaagcaagatattgatggccactaagtgtgtatccagaagaagagatcagaatgatgagtccagaacccctgtcacacagggaataggtgaaggaactagggatatttaactggagcagagaacatctggagagagagcaagattcctgtccttgagaagttgaagccgtctcatgcagaagagggaatgagcttccattatgctgcagagctggcagcaatggatgaaagttgcaggaagttagttttagttctgtagaaggcaagagtagggtagaccaaatcaaatgctcactggggtcaggctgatggagacagtaacactggcgagcaggtgccccagctcggactatactgctgagttctggtctgttgctgccactctacaggtccagggttgttagatcttctgggtttttgttttgctttttgaaataaggaaaataagcttatcttaagtttatttttccttggatatacctagattccatacagtgacaatacaaatacaaaggaagaacatctggatttcatccttgacctcatttacaaagcaaaaagagatgctggattcagatataaatgtttaattttgcagtgtttaagtcagcaaatcttctgttttttaaaaataagccacatatctagatttttctgtgaaagctctcaattaagtgttgggaactaatttcaagattttaaaaaatgttatgcaggcttaacgtgtctgagagccataaatgacctaacgtttcccgttagtctctgaactaggtgatctcagttctctttcaactccagtactctgtaagtttctgtgacctgtagtgtaccattctcaggtggtgatatggtttggatgttttgtcccctccaaatctcatgttcaaagtgtgacattcagtgttagaggtgggcctagtaggaggtatttgggtcatgggggcggatcccttatgtatgactttgtgccatccccatagtaatgagtgagttctcactctggttgtttatgcaagagctggttgtttaaaagagcctggaacttcctcctctctcgcttgctctctctcaccatgtgacacactggctccccttcaccttctgccatgattgtaagcttcgtgaggccctcaccagaagcagatgccagcgccatgcttcctatacagttctatgcagaacagtgagccaaataaacctcttttctttct

SEQ ID NO: 8270 - protein, 98 aa, Homo sapiens; identical to SEQ ID NO: 8264

SEQ ID NO: 8271 - DNA, 4807 bp, Homo sapiens
gggtcttggagcagccacaagctcggccacttggtagctgcgtgactttggggaccaagccccgtccccgccgtggcagctacaggtaactgcaggttaggaactgggctccgcgctcgacaattaactatcccagcggagtactggctgctggtgcgggcggtactggcatcctcgtgtggcgacggaaaaaacgtgaagctgaagttaaccaacttgcacaaggtcgcagggccgttatgaggggaccccgggactcgaaccttggctccacagctgagccattctcgctacctgcccctcgtcacgccctccgtttccacacctttaacgcctcaaagatagaaggtgccgcccaaggggctggaaggagctgaggaaacgactccagaagaaatcaccactgactacgactcccgccggcccgccccggggagccttcggccgaccgtcccctcccccgccaccttccgcaccggccttcccggacggtatccgcgctcgttttcgctcagaggaggccccctgccttttcatgctccacgcgttcctccctcgtgcgcctgcagtttccacttggaatttgggctccggcgcgcaccagctaagaagcgcgtcaacagctgcgcgcgcccgtgcgcgcgtccccgacacctacgccccagcagcccccgcgaaagcggagtcgcaacgcaggcgcacttctgttcgctccggtccccagagaaggcggggctcccgctgcccgacccggaagtgcttctcttttccttggcggaggagggagaccacagagccctgggttgtggaagaggtggctgttccctgtcatcagtatgcagcgattgctctttccgccgttgagggccttgaaggggaggcagtatctgccgctcctggctcctagggcagcgcctagagcacagtgtgattgcatcaggcgccctttgaggccagggcaatacagcaccatctctgaagtagctttgcaatctggaaggggtacagtgtcccttccctcaaaggctgctgagcgggtggtgggccgatggctcctggtctgcagtggaacagtggctggagcagttattcttggtggagtaactaggttgacagagtctggcctctcgatggtagattggcatttaataaaggagatgaagccacctacaagccaagaggaatgggaagcagaattccaaagataccagcaatttccagaatttaaaatcttgaatcatgatatgacactgacagaattcaagttcatctggtacatggagtactcacaccgaatgtggggtcgccttgtaggccttgtgtacatcctgcctgctgcctacttttggagaaagggctggctcagccgtggcatgaaaggacgtgttcttgccctctgtggcctcgtctgcttccagggtctgttgggatggtatatggtgaaaagtggactagaagaaaaatcagactcccatgacatccctcgggtcagtcagtaccgccttgctgcccacctgggatcagccctggttctttattgtgccagcttgtggacctcactgtcactgctactccctccgcacaagttgcctgaaacccaccaactcctacagttgagacgatttgctcatggaacagcaggtctggtgttccttacggccctctcaggggcttttgtggcagggctagatgctgggcttgtttataactcctttcccaaaatgggagaatcctggatcccggaggacctctttaccttctcccccatcctgaggaatgtttttgagaatcccaccatggtgcagtttgatcaccggattctgggaatcacttcagtcactgccattacagtgctctacttcctctctcggagaattccccttcctagaaggaccaagatggcagcagtgactctgctggctttggcgtatacacaggtgggcttgggcatcagcacgctgctgatgtatgtcccaactcctctggccgccactcaccagtcaggctccttggctttgctcactggtgctctttggctgatgaatgaactccgaagagtcccaaaatgattcttagaggaccagcctcctgggactgtgactgcttttgagagctcttcagagatcataagaacttgggcttttctacgagatgaccttgacataccaagtggtttccaaatggtcaacttacttaaaaatcttttcctgttttgagatagtcactggatcaagaatgcattaagtgtggttaccctaaatgttcccttttaaatctgcttttcatgttgaaaatcagttttaatgtagagaaagaaatgtctgccatttgctgcttaacaggctttgtgtcaggtttttcagtgttggcaagctcttggttctacgtggatgatttctacgtggatgttctcctgagtccttaattctgcctaaatagaatttctttatgatcttaacttcacttccattaggtgaagattgaaaggataggattgacatacccaaagtagccagctggtcttcagcaaaaaaaaaaaagctaatgtcttctaatatcctgattttcagaaatggggaaattgcagattttgacaagcttaatgtgtatatgtagcaaaatggtttttaagtacttggaaaaggaggtaatcgccaaatagttccatttttttttttttttttgagacagagtttcactcttgttgcccaggctggagtacaatggcgtgatctcagctcactctgcaacctccacttcccaggttcaagcgattctcatgcctcagcctcccgagtagctgggactacaggcacaagtcaccatgcctggctaattttgtatttttagtagagaaggggtttcaccacattggccgggctggtcttgaactcctgacctcaggtaatccgcccatctcggcttcccaaagtgctgagattacaggcatgggccaccacgcccagctagttcctcttttgataaggctgttaacattacaaggtcagagagaggaatggaatcgacagtataaattggttcctgagagggtttcctaacagctttgtaataagaaaaatatggccttgatggtgtagtgcatggacatctacccagataaacaaattgttgactgctgaattaatgtgattttggtctctattgatatttcatagggccctgtcttattcaactttacttttaaaatcagtgatttggatgaaggcatcagaaacatctgatttgaggatggagcaacccaatattgctaatataatagatgacagtggcaactgaaaacagtcccagaatgaccccatcgagatgaaattaaacagattagaaatgtaacatactcatttaaattaaataagttgtataagtttgggctgaagaaacctggccttatatcatttcatataaaaaagacgggattttagttgtcctcaggttcaatatgaaccaagtagtattcatgttgttattatatgataacagaaaaattagtggtacttcaggttttatcagtagaagtgtcacagccatagtcaaaatacccctaacatactgcatttcactctgggtaccaaatttaagcaagatattgatggccactaagtgtgtatccagaagaagagatcagaatgatgagtccagaacccctgtcacacagggaataggtgaaggaactagggatatttaactggagcagagaacatctggagagagagcaagattcctgtccttgagaagttgaagccgtctcatgcagaagagggaatgagcttccattatgctgcagagctggcagcaatggatgaaagttgcaggaagttagttttagttctgtagaaggcaagagtagggtagaccaaatcaaatgctcactggggtcaggctgatggagacagtaacactggcgagcaggtgccccagctcggactatactgctgagttctggtctgttgctgccactctacaggtccagggttgttagatcttctgggtttttgttttgctttttgaaataaggaaaataagcttatcttaagtttatttttccttggatatacctagattccatacagtgacaatacaaatacaaaggaagaacatctggatttcatccttgacctcatttacaaagcaaaaagagatgctggattcagatataaatgtttaattttgcagtgtttaagtcagcaaatcttctgttttttaaaaataagccacatatctagatttttctgtgaaagctctcaattaagtgttgggaactaatttcaagattttaaaaaatgttatgcaggcttaacgtgtctgagagccataaatgacctaacgtttcccgttagtctctgaactaggtgatctcagttctctttcaactccagtactctgtaagtttctgtgacctgtagtgtaccattctcaggtggtgatatggtttggatgttttgtcccctccaaatctcatgttcaaagtgtgacattcagtgttagaggtgggcctagtaggaggtatttgggtcatgggggcggatcccttatgtatgactttgtgccatccccatagtaatgagtgagttctcactctggttgtttatgcaagagctggttgtttaaaagagcctggaacttcctcctctctcgcttgctctctctcaccatgtgacacactggctccccttcaccttctgccatgattgtaagcttcgtgaggccctcaccagaagcagatgccagcgccatgcttcctatacagttctatgcagaacagtgagccaaataaacctcttttctttct

SEQ ID NO: 8272 - protein, 410 aa, Homo sapiens; identical to SEQ ID NO: 1192

SEQ ID NO: 8273 - DNA, 3139 bp, Homo sapiens
gggtcttggagcagccacaagctcggccacttggtagctgcgtgactttggggaccaagccccgtccccgccgtggcagctacaggtaactgcaggttaggaactgggctccgcgctcgacaattaactatcccagcggagtactggctgctggtgcgggcggtactggcatcctcgtgtggcgacggaaaaaacgtgaagctgaagttaaccaacttgcacaaggtcgcagggccgttatgaggggaccccgggactcgaaccttggctccacagctgagccattctcgctacctgcccctcgtcacgccctccgtttccacacctttaacgcctcaaagatagaaggtgccgcccaaggggctggaaggagctgaggaaacgactccagaagaaatcaccactgactacgactcccgccggcccgccccggggagccttcggccgaccgtcccctcccccgccaccttccgcaccggccttcccggacggtatccgcgctcgttttcgctcagaggaggccccctgccttttcatgctccacgcgttcctccctcgtgcgcctgcagtttccacttggaatttgggctccggcgcgcaccagctaagaagcgcgtcaacagctgcgcgcgcccgtgcgcgcgtccccgacacctacgccccagcagcccccgcgaaagcggagtcgcaacgcaggcgcacttctgttcgctccggtccccagagaaggcggggctcccgctgcccgacccggaagtgcttctcttttccttggcggaggagggagaccacagagccctgggttgtggaagaggtggctgttccctgtcatcagtatgcagcgattgctctttccgccgttgagggccttgaaggggaggcagtatctgccgctcctggctcctagggcagcgcctagagcacagtgtgattgcatcaggcgccctttgaggccagggcaatacagcaccatctctgaagtagctttgcaatctggaaggggtacagtgtcccttccctcaaaggctgctgagcgggtggtgggccgatggctcctggtctgcagtggaacagtggctggagcagttattcttggtggagtaactaggttgacagagtctggcctctcgatggtagattggcatttaataaaggagatgaagccacctacaagccaagaggaatgggaagcagaattccaaagataccagcaatttccagaatttaaaatcttgaatcatgatatgacactgacagaattcaagttcatctggtacatggagtactcacaccgaatgtggggtcgccttgtaggccttgtgtacatcctgcctgctgcctacttttggagaaagggctggctcagccgtggcatgaaaggacgtgttcttgccctctgtggcctcgtctgcttccagggtctgttgggatggtatatggtgaaaagtggactagaagaaaaatcagactcccatgacatccctcgggtcagtcagtaccgccttgctgcccacctgggatcagccctggttctttattgtgccagcttgtggacctcactgtcactgctactccctccgcacaagttgcctgaaacccaccaactcctacagttgagacgatttgctcatggaacagcaggtctggtgttccttacggccctctcaggggcttttgtggcagggctagatgctgggcttgtttataactcctttcccaaaatgggagaatcctggatcccggaggacctctttaccttctcccccatcctgaggaatgtttttgagaatcccaccatggtgcagtttgatcaccggattctgggaatcacttcagtcactgccattacagtgctctacttcctctctcggagaattccccttcctagaaggaccaagatggcagcagtgactctgctggctttggcgtatacacaggtgggcttgggcatcagcacgctgctgatgtatgtcccaactcctctggccgccactcaccagtcaggctccttggctttgctcactggtgctctttggctgatgaatgaactccgaagagtcccaaaatgattcttagaggaccagcctcctgggactgtgactgcttttgagagctcttcagagatcataagaacttgggcttttctacgagatgaccttgacataccaagtggtttccaaatggtcaacttacttaaaaatcttttcctgttttgagatagtcactggatcaagaatgcattaagtgtggttaccctaaatgttcccttttaaatctgcttttcatgttgaaaatcagttttaatgtagagaaagaaatgtctgccatttgctgcttaacaggctttgtgtcaggtttttcagtgttggcaagctcttggttctacgtggatgatttctacgtggatgttctcctgagtccttaattctgcctaaatagaatttctttatgatcttaacttcacttccattaggtgaagattgaaaggataggattgacatacccaaagtagccagctggtcttcagcaaaaaaaaaaaagctaatgtcttctaatatcctgattttcagaaatggggaaattgcagattttgacaagcttaatgtgtatatgtagcaaaatggtttttaagtacttggaaaaggaggtaatcgccaaatagttccatttttttttttttttttgagacagagtttcactcttgttgcccaggctggagtacaatggcgtgatctcagctcactctgcaacctccacttcccaggttcaagcgattctcatgcctcagcctcccgagtagctgggactacaggcacaagtcaccatgcctggctaattttgtatttttagtagagaaggggtttcaccacattggccgggctggtcttgaactcctgacctcaggtaatccgcccatctcggcttcccaaagtgctgagattacaggcatgggccaccacgcccagctagttcctcttttgataaggctgttaacattacaaggtcagagagaggaatggaatcgacagtataaattggttcctgagagggtttcctaacagctttgtaataagaaaaatatggccttgatggtgtagtgcatggacatctacccagataaacaaattgttgactgctg

SEQ ID NO: 8274 - protein, 410 aa, Homo sapiens; identical to SEQ ID NO: 1192

SEQ ID NO: 8275 - DNA, 2361 bp, Homo sapiens
gggtcttggagcagccacaagctcggccacttggtagctgcgtgactttggggaccaagccccgtccccgccgtggcagctacaggtaactgcaggttaggaactgggctccgcgctcgacaattaactatcccagcggagtactggctgctggtgcgggcggtactggcatcctcgtgtggcgacggaaaaaacgtgaagctgaagttaaccaacttgcacaaggtcgcagggccgttatgaggggaccccgggactcgaaccttggctccacagctgagccattctcgctacctgcccctcgtcacgccctccgtttccacacctttaacgcctcaaagatagaaggtgccgcccaaggggctggaaggagctgaggaaacgactccagaagaaatcaccactgactacgactcccgccggcccgccccggggagccttcggccgaccgtcccctcccccgccaccttccgcaccggccttcccggacggtatccgcgctcgttttcgctcagaggaggccccctgccttttcatgctccacgcgttcctccctcgtgcgcctgcagtttccacttggaatttgggctccggcgcgcaccagctaagaagcgcgtcaacagctgcgcgcgcccgtgcgcgcgtccccgacacctacgccccagcagcccccgcgaaagcggagtcgcaacgcaggcgcacttctgttcgctccggtccccagagaaggcggggctcccgctgcccgacccggaagtgcttctcttttccttggcggaggagggagaccacagagccctgggttgtggaagaggtggctgttccctgtcatcagtatgcagcgattgctctttccgccgttgagggccttgaaggggaggcagtatctgccgctcctggctcctagggcagcgcctagagcacagtgtgattgcatcaggcgccctttgaggccagggcaatacagcaccatctctgaagtagctttgcaatctggaaggggtacagtgtcccttccctcaaaggctgctgagcgggtggtgggccgatggctcctggtctgcagtggaacagtggctggagcagttattcttggtggagtaactaggttgacagagtctggcctctcgatggtagattggcatttaataaaggagatgaagccacctacaagccaagaggaatgggaagcagaattccaaagataccagcaatttccagaatttaaaatcttgaatcatgatatgacactgacagaattcaagttcatctggtacatggagtactcacaccgaatgtggggtcgccttgtaggccttgtgtacatcctgcctgctgcctacttttggagaaagggctggctcagccgtggcatgaaaggacgtgttcttgccctctgtggcctcgtctgcttccagggtctgttgggatggtatatggtgaaaagtggactagaagaaaaatcagactcccatgacatccctcgggtcagtcagtaccgccttgctgcccacctgggatcagccctggttctttattgtgccagcttgtggacctcactgtcactgctactccctccgcacaagttgcctgaaacccaccaactcctacagttgagacgatttgctcatggaacagcaggtctggtgttccttacggccctctcaggggcttttgtggcagggctagatgctgggcttgtttataactcctttcccaaaatgggagaatcctggatcccggaggacctctttaccttctcccccatcctgaggaatgtttttgagaatcccaccatggtgcagtttgatcaccggattctgggaatcacttcagtcactgccattacagtgctctacttcctctctcggagaattccccttcctagaaggaccaagatggcagcagtgactctgctggctttggcgtatacacaggtgggcttgggcatcagcacgctgctgatgtatgtcccaactcctctggccgccactcaccagtcaggctccttggctttgctcactggtgctctttggctgatgaatgaactccgaagagtcccaaaatgattcttagaggaccagcctcctgggactgtgactgcttttgagagctcttcagagatcataagaacttgggcttttctacgagatgaccttgacataccaagtggtttccaaatggtcaacttacttaaaaatcttttcctgttttgagatagtcactggatcaagaatgcattaagtgtggttaccctaaatgttcccttttaaatctgcttttcatgttgaaaatcagttttaatgtagagaaagaaatgtctgccatttgctgcttaacaggctttgtgtcaggtttttc

SEQ ID NO: 8276 - protein, 410 aa, Homo sapiens; identical to SEQ ID NO: 1192

SEQ ID NO: 8277 - DNA, 1367 bp, Homo sapiens
ctccgctttcgcgggggctgctggggcgtaggtgtcggggacgcgcgcacgggcgcgcgcagctgttgacgcgcttcttagctggtgcgcgccggagcccaaattccaagtggaaactgcaggcgcacgagggaggaacgcgtggagcatgaaaaggcagggggcctcctctgagcgaaaacgagcgcggataccgtccgggaaggccggagcagcaaatggatttctcatggaagtttgtgttgattcagtggaatcagctgtgaatgcagaaagaggaggtgctgatcggattgaattatgttctggtttatcagaggggggaactacacccagcatgggtgtccttcaagtagtgaagcagagtgttcagatcccagtttttgtgatgattcggccacggggaggtgattttttgtattcagatcgtgaaattgaggtgatgaaggctgacattcgtcttgccaagctttatggtgctgatggtttggtttttggggcattgactgaagatggacacattgacaaagagctgtgtatgtcccttatggctatttgccgccctctgccagtcactttccaccgagcctttgacatggttcatgatccaatggcagctctggagaccctcttaaccttgggatttgaacgcgtgttgaccagtggatgtgacagttcagcattagaagggctacccctaataaagcgactcattgagcaggcaaaaggcaggattgtggtaatgccaggaggtggtataacagacagaaatctacaaaggatccttgagggttcaggtgctacagaattccactgttctgctcggtctactagagactcgggaatgaagtttcgaaattcatctgttgccatgggagcctcactttcttgctcagaatattccctaaaggtaacagatgtgaccaaagtaaggactttgaatgctatcgcaaagaacatcctggtgtagccagacctctctgagagacatggatatcacaggatgaaggtagaactataatctgcaattctctatgacacagctttaaccttcttctctggccaggacagtcgcaatctttgttttaagtttcacatggccatggagaatgtgcccaagaagaaaaagaatttgaaacagagatacagtcacttcctttgcttagtcttaccagtgattgtcatcatggttaaagctggtctgtgcttcttccatagacagaagcttagtctgttttcagtggaattaattgatgaactgggaaaattttaactgcatggtatgaattcagagtgtgacttaagggtcaattcaaagcagtattttgacttttcatttgtaaaataaaaatttccactattacagt

SEQ ID NO: 8278 - protein, 273 aa, Homo sapiens; identical to SEQ ID NO: 1194

SEQ ID NO: 8279 - DNA, 1339 bp, Homo sapiens
ctccgctttcgcgggggctgctggggcgtaggtgtcggggacgcgcgcacgggcgcgcgcagctgttgacgcgcttcttagctggtgcgcgccggagcccaaattccaagtggaaactgcaggcgcacgagggaggaacgcgtggagcatgaaaaggcagggggcctcctctgagcgaaaacgagcgcggataccgtccgggaaggccggagcagcaaatggatttctcatggaagtttgtgttgattcagtggaatcagctgtgaatgcagaaagaggaggtgctgatcggattgaattatgttctggtttatcagaggggggaactacacccagcatgggtgtccttcaagtagtgaagcagagtgttcagatcccagtttttgtgatgattcggccacggggaggtgattttttgtattcagatcgtgaaattgaggtgatgaaggctgacattcgtcttgccaagctttatggtgctgatggtttggtttttggggcattgactgaagatggacacattgacaaagagctgtgtatgtcccttatggctatttgccgccctctgccagtcactttccaccgagcctttgacatggttcatgatccaatggcagctctggagaccctcttaaccttgggatttgaacgcgtgttgaccagtggatgtgacagttcagcattagaagggctacccctaataaagcgactcattgagcaggaggtggtataacagacagaaatctacaaaggatccttgagggttcaggtgctacagaattccactgttctgctcggtctactagagactcgggaatgaagtttcgaaattcatctgttgccatgggagcctcactttcttgctcagaatattccctaaaggtaacagatgtgaccaaagtaaggactttgaatgctatcgcaaagaacatcctggtgtagccagacctctctgagagacatggatatcacaggatgaaggtagaactataatctgcaattctctatgacacagctttaaccttcttctctggccaggacagtcgcaatctttgttttaagtttcacatggccatggagaatgtgcccaagaagaaaaagaatttgaaacagagatacagtcacttcctttgcttagtcttaccagtgattgtcatcatggttaaagctggtctgtgcttcttccatagacagaagcttagtctgttttcagtggaattaattgatgaactgggaaaattttaactgcatggtatgaattcagagtgtgacttaagggtcaattcaaagcagtattttgacttttcatttgtaaaataaaaatttccactattacagt

SEQ ID NO: 8280 - protein, 194 aa, Homo sapiens
MKRQGASSERKRARIPSGKAGAANGFLMEVCVDSVESAVNAERGGADRIELCSGLSEGGTTPSMGVLQVVKQSVQIPVFVMIRPRGGDFLYSDREIEVMKADIRLAKLYGADGLVFGALTEDGHIDKELCMSLMAICRPLPVTFHRAFDMVHDPMAALETLLTLGFERVLTSGCDSSALEGLPLIKRLIEQEVV

SEQ ID NO: 8281 - DNA, 1387 bp, Homo sapiens
ctccgctttcgcgggggctgctggggcgtaggtgtcggggacgcgcgcacgggcgcgcgcagctgttgacgcgcttcttagctggtgcgcgccggagcccaaattccaagtggaaactgcaggcgcacgagggaggaacgcgtggagcatgaaaaggcagggggcctcctctgagcgaaaacgagcgcggataccgtccgggaaggccggagcagcaaatggatttctcatggaagtttgtgttgattcagtggaatcagctgtgaatgcagaaagaggaggtgctgatcggattgaattatgttctggtttatcagaggggggaactacacccagcatgggtgtccttcaagtagtgaagcagagtgttcagatcccagtttttgtgatgattcggccacggggaggtgattttttgtattcagatcgtgaaattgaggtgatgaaggctgacattcgtcttgccaagctttatggtgctgatggtttggtttttggggcattgactgaagatggacacattgacaaagagctgtgtatgtcccttatggctatttgccgccctctgccagtcactttccaccgagcctttgacatggttcatgatccaatggcagctctggagaccctcttaaccttgggatttgaacgcgtgttgaccagtggatgtgacagttcagcattagaagggctacccctaataaagcgactcattgagcaggaggtggtataacagacagaaatctacaaaggatccttgagggttcaggtgctacagaattccactgttctgctcggtctactagagactcgggaatgaagtttcgaaattcatctgttgccatgggagcctcactttcttgctcagaatattccctaaaggtaacagatgtgaccaaagtaaggactttgaatgctatcgcaaagaacatcctggtgtagccagacctctctgagagacatggatatcacaggatgaaggtagaactataatctgcaattctctatgacacagctttaaccttcttctctggccaggacagtcgcaatctttgttttaagtttcacatggccatggagaatgtgcccaagaagaaaaagaatttgaaacagagatacagtcacttcctttgcttagtcttaccagtgattgtcatcatggttaaagctggtctgtgcttcttccatagacagaagcttagtctgttttcagtggaattaattgatgaactgggaaaattttaactgcatggtatgaattcagagtgtgacttaagggtcaattcaaagcagtattttgacttttcatttgtaaaataaaaatttccactattacagtatagtctcttattcttgcactaaatacagcctgtagcctacaagtatg

SEQ ID NO: 8282 - protein, 194 aa, Homo sapiens; identical to SEQ ID NO: 8280

SEQ ID NO: 8283 - DNA, 1415 bp, Homo sapiens
ctccgctttcgcgggggctgctggggcgtaggtgtcggggacgcgcgcacgggcgcgcgcagctgttgacgcgcttcttagctggtgcgcgccggagcccaaattccaagtggaaactgcaggcgcacgagggaggaacgcgtggagcatgaaaaggcagggggcctcctctgagcgaaaacgagcgcggataccgtccgggaaggccggagcagcaaatggatttctcatggaagtttgtgttgattcagtggaatcagctgtgaatgcagaaagaggaggtgctgatcggattgaattatgttctggtttatcagaggggggaactacacccagcatgggtgtccttcaagtagtgaagcagagtgttcagatcccagtttttgtgatgattcggccacggggaggtgattttttgtattcagatcgtgaaattgaggtgatgaaggctgacattcgtcttgccaagctttatggtgctgatggtttggtttttggggcattgactgaagatggacacattgacaaagagctgtgtatgtcccttatggctatttgccgccctctgccagtcactttccaccgagcctttgacatggttcatgatccaatggcagctctggagaccctcttaaccttgggatttgaacgcgtgttgaccagtggatgtgacagttcagcattagaagggctacccctaataaagcgactcattgagcaggcaaaaggcaggattgtggtaatgccaggaggtggtataacagacagaaatctacaaaggatccttgagggttcaggtgctacagaattccactgttctgctcggtctactagagactcgggaatgaagtttcgaaattcatctgttgccatgggagcctcactttcttgctcagaatattccctaaaggtaacagatgtgaccaaagtaaggactttgaatgctatcgcaaagaacatcctggtgtagccagacctctctgagagacatggatatcacaggatgaaggtagaactataatctgcaattctctatgacacagctttaaccttcttctctggccaggacagtcgcaatctttgttttaagtttcacatggccatggagaatgtgcccaagaagaaaaagaatttgaaacagagatacagtcacttcctttgcttagtcttaccagtgattgtcatcatggttaaagctggtctgtgcttcttccatagacagaagcttagtctgttttcagtggaattaattgatgaactgggaaaattttaactgcatggtatgaattcagagtgtgacttaagggtcaattcaaagcagtattttgacttttcatttgtaaaataaaaatttccactattacagtatagtctcttattcttgcactaaatacagcctgtagcctacaagtatg

SEQ ID NO: 8284 - protein, 273 aa, Homo sapiens; identical to SEQ ID NO: 1194

SEQ ID NO: 8285 - DNA, 534 bp, Homo sapiens
cgcacgggcgcgcgcagctgttgacgcgcttcttagctggtgcgcgccggagcccaaattccaagtggaaactgcaggcgcacgagggaggaacgcgtggagcatgaaaaggcagggggcctcctctgagcgaaaacgagcgcggataccgtccgggaaggccggagcagcaaatggatttctcatggaagtttgtgttgattcagtggaatcagctgtgaatgcagaaagaggaggtgctgatcggattgaattatgttctggtttatcagaggggggaactacacccagcatgggtgtccttcaagtagtgaagcagagtgttcagatcccagtttttgtgatgattcggccacggggaggtgattttttgtattcagatcgtgaaattgaggtgatgaaggctgacattcgtcttgccaagctttatggtgctgatggtttggtttttggggcattgactgaagatggttcatgatccaatggcagctctggagaccctcttaaccttgggatttgaacgcgtgttgacca

SEQ ID NO: 8286 - protein, 124 aa, Homo sapiens
MKRQGASSERKRARIPSGKAGAANGFLMEVCVDSVESAVNAERGGADRIELCSGLSEGGTTPSMGVLQVVKQSVQIPVFVMIRPRGGDFLYSDREIEVMKADIRLAKLYGADGLVFGALTEDGS

SEQ ID NO: 8287 - DNA, 1258 bp, Homo sapiens
cgcacgggcgcgcgcagctgttgacgcgcttcttagctggtgcgcgccggagcccaaattccaagtggaaactgcaggcgcacgagggaggaacgcgtggagcatgaaaaggcagggggcctcctctgagcgaaaacgagcgcggataccgtccgggaaggccggagcagcaaatggatttctcatggaagtttgtgttgattcagtggaatcagctgtgaatgcagaaagaggagaggggggaactacacccagcatgggtgtccttcaagtagtgaagcagagtgttcagatcccagtttttgtgatgattcggccacggggaggtgattttttgtattcagatcgtgaaattgaggtgatgaaggctgacattcgtcttgccaagctttatggtgctgatggtttggtttttggggcattgactgaagatggacacattgacaaagagctgtgtatgtcccttatggctatttgccgccctctgccagtcactttccaccgagcctttgacatggttcatgatccaatggcagctctggagaccctcttaaccttgggatttgaacgcgtgttgaccagtggatgtgacagttcagcattagaagggctacccctaataaagcgactcattgagcaggaggtggtataacagacagaaatctacaaaggatccttgagggttcaggtgctacagaattccactgttctgctcggtctactagagactcgggaatgaagtttcgaaattcatctgttgccatgggagcctcactttcttgctcagaatattccctaaaggtaacagatgtgaccaaagtaaggactttgaatgctatcgcaaagaacatcctggtgtagccagacctctctgagagacatggatatcacaggatgaaggtagaactataatctgcaattctctatgacacagctttaaccttcttctctggccaggacagtcgcaatctttgttttaagtttcacatggccatggagaatgtgcccaagaagaaaaagaatttgaaacagagatacagtcacttcctttgcttagtcttaccagtgattgtcatcatggttaaagctggtctgtgcttcttccatagacagaagcttagtctgttttcagtggaattaattgatgaactgggaaaattttaactgcatggtatgaattcagagtgtgacttaagggtcaattcaaagcagtattttgacttttcatttgtaaaataaaaatttccactattacagt

SEQ ID NO: 8288 - protein, 182 aa, Homo sapiens
MKRQGASSERKRARIPSGKAGAANGFLMEVCVDSVESAVNAERGEGGTTPSMGVLQVVKQSVQIPVFVMIRPRGGDFLYSDREIEVMKADIRLAKLYGADGLVFGALTEDGHIDKELCMSLMAICRPLPVTFHRAFDMVHDPMAALETLLTLGFERVLTSGCDSSALEGLPLIKRLIEQEVV

SEQ ID NO: 8289 - DNA, 1306 bp, Homo sapiens
cgcacgggcgcgcgcagctgttgacgcgcttcttagctggtgcgcgccggagcccaaattccaagtggaaactgcaggcgcacgagggaggaacgcgtggagcatgaaaaggcagggggcctcctctgagcgaaaacgagcgcggataccgtccgggaaggccggagcagcaaatggatttctcatggaagtttgtgttgattcagtggaatcagctgtgaatgcagaaagaggagaggggggaactacacccagcatgggtgtccttcaagtagtgaagcagagtgttcagatcccagtttttgtgatgattcggccacggggaggtgattttttgtattcagatcgtgaaattgaggtgatgaaggctgacattcgtcttgccaagctttatggtgctgatggtttggtttttggggcattgactgaagatggacacattgacaaagagctgtgtatgtcccttatggctatttgccgccctctgccagtcactttccaccgagcctttgacatggttcatgatccaatggcagctctggagaccctcttaaccttgggatttgaacgcgtgttgaccagtggatgtgacagttcagcattagaagggctacccctaataaagcgactcattgagcaggaggtggtataacagacagaaatctacaaaggatccttgagggttcaggtgctacagaattccactgttctgctcggtctactagagactcgggaatgaagtttcgaaattcatctgttgccatgggagcctcactttcttgctcagaatattccctaaaggtaacagatgtgaccaaagtaaggactttgaatgctatcgcaaagaacatcctggtgtagccagacctctctgagagacatggatatcacaggatgaaggtagaactataatctgcaattctctatgacacagctttaaccttcttctctggccaggacagtcgcaatctttgttttaagtttcacatggccatggagaatgtgcccaagaagaaaaagaatttgaaacagagatacagtcacttcctttgcttagtcttaccagtgattgtcatcatggttaaagctggtctgtgcttcttccatagacagaagcttagtctgttttcagtggaattaattgatgaactgggaaaattttaactgcatggtatgaattcagagtgtgacttaagggtcaattcaaagcagtattttgacttttcatttgtaaaataaaaatttccactattacagtatagtctcttattcttgcactaaatacagcctgtagcctacaagtatg

SEQ ID NO: 8290 - protein, 182 aa, Homo sapiens; identical to SEQ ID NO: 8288

SEQ ID NO: 8291 - DNA, 713 bp, Homo sapiens
agagacggggtttcaccatgttgcccaggctggtctcaaactcttgagctcaagtgatactcctgccttggcctcccaaagtgttggaattacaggaggtggtataacagacagaaatctacaaaggatccttgagggttcaggtgctacagaattccactgttctgctcggtctactagagactcgggaatgaagtttcgaaattcatctgttgccatgggagcctcactttcttgctcagaatattccctaaaggtaacagatgtgaccaaagtaaggactttgaatgctatcgcaaagaacatcctggtgtagccagacctctctgagagacatggatatcacaggatgaaggtagaactataatctgcaattctctatgacacagctttaaccttcttctctggccaggacagtcgcaatctttgttttaagtttcacatggccatggagaatgtgcccaagaagaaaaagaatttgaaacagagatacagtcacttcctttgcttagtcttaccagtgattgtcatcatggttaaagctggtctgtgcttcttccatagacagaagcttagtctgttttcagtggaattaattgatgaactgggaaaattttaactgcatggtatgaattcagagtgtgacttaagggtcaattcaaagcagtattttgacttttcatttgtaaaataaaaatttccactattacagt

SEQ ID NO: 8292 - protein, 41 aa, Homo sapiens
MKFRNSSVAMGASLSCSEYSLKVTDVTKVRTLNAIAKNILV

SEQ ID NO: 8293 - DNA, 761 bp, Homo sapiens
agagacggggtttcaccatgttgcccaggctggtctcaaactcttgagctcaagtgatactcctgccttggcctcccaaagtgttggaattacaggaggtggtataacagacagaaatctacaaaggatccttgagggttcaggtgctacagaattccactgttctgctcggtctactagagactcgggaatgaagtttcgaaattcatctgttgccatgggagcctcactttcttgctcagaatattccctaaaggtaacagatgtgaccaaagtaaggactttgaatgctatcgcaaagaacatcctggtgtagccagacctctctgagagacatggatatcacaggatgaaggtagaactataatctgcaattctctatgacacagctttaaccttcttctctggccaggacagtcgcaatctttgttttaagtttcacatggccatggagaatgtgcccaagaagaaaaagaatttgaaacagagatacagtcacttcctttgcttagtcttaccagtgattgtcatcatggttaaagctggtctgtgcttcttccatagacagaagcttagtctgttttcagtggaattaattgatgaactgggaaaattttaactgcatggtatgaattcagagtgtgacttaagggtcaattcaaagcagtattttgacttttcatttgtaaaataaaaatttccactattacagtatagtctcttattcttgcactaaatacagcctgtagcctacaagtatg

SEQ ID NO: 8294 - protein, 41 aa, Homo sapiens; identical to SEQ ID NO: 8292

SEQ ID NO: 8295 - DNA, 854 bp, Homo sapiens
aaatggttgggatgaaaggtcatcctttacggagaacatcagaatggtagataattcctgttccactttctttgatgaaacaagtaaagaagaaacaacacaatcatattaatagaagagtcttcgttccagacgcagtccaggaatcatgctggagaagttctgcaactctactttttggaattcctcattcctggacagtccggaggcagacctgccactttgttttgagcaaactgttctggtgtggattccgccttggagctggctcacctcaagtcttttgtggccagcctgcaacttgggttatcccacgaagtgacagaggctggtggcaacctgagcataggccagaggcagctgctgtgcctgggcagggctctgcttcggaaatccaagatcctggtcctggatgaggccactgctgcggtggatctagagacagacaacctcattcagacgaccatccaaaacgagttcgcccactgcacagtgatcaccatcgcccacaggctgcacaccatcatggacagtgacaaggtaatggtcctagacaacgggaagattatagagtgcggcagccctgaagaactgctacaaatccctggacccttttactttatggctaaggaagctggcattgagaatgtgaacagcacaaaattctagcagaaggccccatgggttagaaaaggactataagaataatttcttatttaattttattttttataaaatacagaatacatacaaaagtgtgtataaaatgtacgttttaaaaaaggataagtgaacacccatgaacctactacccaggttaagaaaataaatgtcaccaggtacttgagaaaccc

SEQ ID NO: 8296 - protein, 113 aa, Homo sapiens [sequence omitted]

SEQ ID NO: 8297 - DNA, 783 bp, Homo sapiens
ggatgaaaggtcatcctttacggagaacatcagaatggtagataattcctgttccactttctttgatgaaacaagtaaagaagaaacaacacaatcatattaatagaagagtcttcgttccagacgcagtccaggaatcatgctggagaagttctgcaactctactttttggaattcctcattcctggacagtccggaggcagacctgccactttgttttgagcaaactgttctggtgtggattcccttgggctacctatggctcctggccccctggcagcttctccacgtgtataaatccaggaccaagagatcctctaccaccaaactctatcttgctaagcaggtattcgttggttttcttcttattctagcagccatagagctggcccttgtactcacagaagactctggacaagccacagtccctgctgttcgatataccaatccaagcctctacctaggcacatggctcctggttttgctgatccaatacagcagacaatggtgtgtacagaaaaactcctggttcctgtccctattctggattctctcgatactctgtggcactttccaatttcagactctgatccggacactcttacagggtgacaattctaatctagcctactcctgcctgttcttcatctcctacggattccagatcctgatcctgatcttttcagcattttcagaaaataatgagtcatcaaatgtgagattctaaatatgcccatctcatatattacttaattggatgatatcttaatgaatataacttta

SEQ ID NO: 8298 - protein, 195 aa, Homo sapiens
MLEKFCNSTFWNSSFLDSPEADLPLCFEQTVLVWIPLGYLWLLAPWQLLHVYKSRTKRSSTTKLYLAKQVFVGFLLILAAIELALVLTEDSGQATVPAVRYTNPSLYLGTWLLVLLIQYSRQWCVQKNSWFLSLFWILSILCGTFQFQTLIRTLLQGDNSNLAYSCLFFISYGFQILILIFSAFSENNESSNVRF

SEQ ID NO: 8299 - DNA, 1315 bp, Homo sapiens
ggatgaaaggtcatcctttacggagaacatcagaatggtagataattcctgttccactttctttgatgaaacaagtaaagaagaaacaacacaatcatattaatagaagagtcttcgttccagacgcagtccaggaatcatgctggagaagttctgcaactctactttttggaattcctcattcctggacagtccggaggcagacctgccactttgttttgagcaaactgttctggtgtggattcccttgggctacctatggctcctggccccctggcagcttctccacgtgtataaatccaggaccaagagatcctctaccaccaaactctatcttgctaagcaggtattcgttggttttcttcttattctagcagccatagagctggcccttgtactcacagaagactctggacaagccacagtccctgctgttcgatataccaatccaagcctctacctaggcacatggctcctggttttgctgatccaatacagcagacaatggtgtgtacagaaaaactcctggttcctgtccctattctggattctctcgatactctgtggcactttccaatttcagactctgatccggacactcttacagggtgacaattctaatctagcctactcctgcctgttcttcatctcctacggattccagatcctgatcctgatcttttcagcattttcagaaaataatgagtcatcaaataatccatcatccatagcttcattcctgagtagcattacctacagctggtatgacagcatcattctgaaaggctacaagcgtcctctgacactcgaggatgtctgggaagttgatgaagagatgaaaaccaagacattagtgagcaagtttgaaacgcacatgaagagagagctgcagaaagccaggcgggcactccagagacggcaggagaagagctcccagcagaactctggagccaggctgcctggcttgaacaagaatcagagtcaaagccaagatgcccttgtcctggtaactttcccttgagtgtctgtgtgagcgcgctgcatgtttcaggcaagggtacatcagcatcatggcgattctgtccttacatttttatagcacttcatacttctcagtgcacttcatattattaatggtattcacaatactgatactaccttagtgatggatacatggcgtgtaatgtactgttctctttcctttggggtacttttgaaattttccagaatgaaacgtggttttgaaaaaaataataccttagcatttctagattttgcaccttggtacaaattagcataagcaggcaatttgttg

SEQ ID NO: 8300 - protein, 293 aa, Homo sapiens
MLEKFCNSTFWNSSFLDSPEADLPLCFEQTVLVWIPLGYLWLLAPWQLLHVYKSRTKRSSTTKLYLAKQVFVGFLLILAAIELALVLTEDSGQATVPAVRYTNPSLYLGTWLLVLLIQYSRQWCVQKNSWFLSLFWILSILCGTFQFQTLIRTLLQGDNSNLAYSCLFFISYGFQILILIFSAFSENNESSNNPSSIASFLSSITYSWYDSIILKGYKRPLTLEDVWEVDEEMKTKTLVSKFETHMKRELQKARRALQRRQEKSSQQNSGARLPGLNKNQSQSQDALVLVTFP

SEQ ID NO: 8301 - DNA, 4956 bp, Homo sapiens
ggatgaaaggtcatcctttacggagaacatcagaatggtagataattcctgttccactttctttgatgaaacaagtaaagaagaaacaacacaatcatattaatagaagagtcttcgttccagacgcagtccaggaatcatgctggagaagttctgcaactctactttttggaattcctcattcctggacagtccggaggcagacctgccactttgttttgagcaaactgttctggtgtggattcccttgggctacctatggctcctggccccctggcagcttctccacgtgtataaatccaggaccaagagatcctctaccaccaaactctatcttgctaagcaggtattcgttggttttcttcttattctagcagccatagagctggcccttgtactcacagaagactctggacaagccacagtccctgctgttcgatataccaatccaagcctctacctaggcacatggctcctggttttgctgatccaatacagcagacaatggtgtgtacagaaaaactcctggttcctgtccctattctggattctctcgatactctgtggcactttccaatttcagactctgatccggacactcttacagggtgacaattctaatctagcctactcctgcctgttcttcatctcctacggattccagatcctgatcctgatcttttcagcattttcagaaaataatgagtcatcaaataatccatcatccatagcttcattcctgagtagcattacctacagctggtatgacagcatcattctgaaaggctacaagcgtcctctgacactcgaggatgtctgggaagttgatgaagagatgaaaaccaagacattagtgagcaagtttgaaacgcacatgaagagagagctgcagaaagccaggcgggcactccagagacggcaggagaagagctcccagcagaactctggagccaggctgcctggcttgaacaagaatcagagtcaaagccaagatgcccttgtcctggaagatgttgaaaagaaaaaaaagaagtctgggaccaaaaaagatgttccaaaatcctggttgatgaaggctctgttcaaaactttctacatggtgctcctgaaatcattcctactgaagctagtgaatgacatcttcacgtttgtgagtcctcagctgctgaaattgctgatctcctttgcaagtgaccgtgacacatatttgtggattggatatctctgtgcaatcctcttattcactgcggctctcattcagtctttctgccttcagtgttatttccaactgtgcttcaagctgggtgtaaaagtacggacagctatcatggcttctgtatataagaaggcattgaccctatccaacttggccaggaaggagtacaccgttggagaaacagtgaacctgatgtctgtggatgcccagaagctcatggatgtgaccaacttcatgcacatgctgtggtcaagtgttctacagattgtcttatctatcttcttcctatggagagagttgggaccctcagtcttagcaggtgttggggtgatggtgcttgtaatcccaattaatgcgatactgtccaccaagagtaagaccattcaggtcaaaaatatgaagaataaagacaaacgtttaaagatcatgaatgagattcttagtggaatcaagatcctgaaatattttgcctgggaaccttcattcagagaccaagtacaaaacctccggaagaaagagctcaagaacctgctggcctttagtcaactacagtgtgtagtaatattcgtcttccagttaactccagtcctggtatctgtggtcacattttctgtttatgtcctggtggatagcaacaatattttggatgcacaaaaggccttcacctccattaccctcttcaatatcctgcgctttcccctgagcatgcttcccatgatgatctcctccatgctccaggccagtgtttccacagagcggctagagaagtacttgggaggggatgacttggacacatctgccattcgacatgactgcaattttgacaaagccatgcagttttctgaggcctcctttacctgggaacatgattcggaagccacagtccgagatgtgaacctggacattatggcaggccaacttgtggctgtgataggccctgtcggctctgggaaatcctccttgatatcagccatgctgggagaaatggaaaatgtccacgggcacatcaccatcaagggcaccactgcctatgtcccacagcagtcctggattcagaatggcaccataaaggacaacatcctttttggaacagagtttaatgaaaagaggtaccagcaagtactggaggcctgtgctctcctcccagacttggaaatgctgcctggaggagatttggctgagattggagagaagggtataaatcttagtgggggtcagaagcagcggatcagcctggccagagctacctaccaaaatttagacatctatcttctagatgaccccctgtctgcagtggatgctcatgtaggaaaacatatttttaataaggtcttgggccccaatggcctgttgaaaggcaagactcgactcttggttacacatagcatgcactttcttcctcaagtggatgagattgtagttctggggaatggaacaattgtagagaaaggatcctacagtgctctcctggccaaaaaaggagagtttgctaagaatctgaagacatttctaagacatacaggccctgaagaggaagccacagtccatgatggcagtgaagaagaagacgatgactatgggctgatatccagtgtggaagagatccccgaagatgcagcctccataaccatgagaagagagaacagctttcgtcgaacacttagccgcagttctaggtccaatggcaggcatctgaagtccctgagaaactccttgaaaactcggaatgtgaatagcctgaaggaagacgaagaactagtgaaaggacaaaaactaattaagaaggaattcatagaaactggaaaggtgaagttctccatctacctggagtacctacaagcaataggattgttttcgatattcttcatcatccttgcgtttgtgatgaattctgtggcttttattggatccaacctctggctcagtgcttggaccagtgactctaaaatcttcaatagcaccgactatccagcatctcagagggacatgagagttggagtctacggagctctgggattagcccaaggtatatttgtgttcatagcacatttctggagtgcctttggtttcgtccatgcatcaaatatcttgcacaagcaactgctgaacaatatccttcgagcacctatgagattttttgacacaacacccacaggccggattgtgaacaggtttgccggcgatatttccacagtggatgacaccctgcctcagtccttgcgcagctggattacatgcttcctggggataatcagcacccttgtcatgatctgcatggccactcctgtcttcaccatcatcgtcattcctcttggcattatttatgtatctgttcagatgttttatgtgtctacctcccgccagctgaggcgtctggactctgtcaccaggtccccaatctactctcacttcagcgagaccgtatcaggtttgccagttatccgtgcctttgagcaccagcagcgatttctgaaacacaatgaggtgaggattgacaccaaccagaaatgtgtcttttcctggatcacctccaacaggtggcttgcaattcgcctggagctggttgggaacctgactgtcttcttttcagccttgatgatggttatttatagagataccctaagtggggacactgttggctttgttctgtccaatgcactcaatatcacacaaaccctgaactggctggtgaggatgacatcagaaatagagaccaacattgtggctgttgagcgaataactgagtacacaaaagtggaaaatgaggcaccctgggtgactgataagaggcctccgccagattggcccagcaaaggcaagatccagtttaacaactaccaagtgcggtaccgacctgagctggatctggtcctcagagggatcacttgtgacatcggtagcatggagaagattggtgtggtgggcaggacaggagctggaaagtcatccctcacaaactgcctcttcagaatcttagaggctgccggtggtcagattatcattgatggagtagatattgcttccattgggctccacgacctccgagagaagctgaccatcatcccccaggaccccatcctgttctctggaagcctgaggatgaatctcgaccctttcaacaactactcagatgaggagatttggaaggccttggagctggctcacctcaagtcttttgtggccagcctgcaacttgggttatcccacgaagtgacagaggctggtggcaacctgagcataggccagaggcagctgctgtgcctgggcagggctctgcttcggaaatccaagatcctggtcctggatgaggccactgctgcggtggatctagagacagacaacctcattcagacgaccatccaaaacgagttcgcccactgcacagtgatcaccatcgcccacaggctgcacaccatcatggacagtgacaaggtaatggtcctagacaacgggaagattatagagtgcggcagccctgaagaactgctacaaatccctggacccttttactttatggctaaggaagctggcattgagaatgtgaacagcacaaaattctagcagaaggccccatgggttagaaaaggactataagaataatttcttatttaattttattttttataaaatacagaatacatacaaaagtgtgtataaaatgtacgttttaaaaaaggataagtgaacacccatgaacctactacccaggttaagaaaataaatgtcaccaggtacttgag

SEQ ID NO: 8302 - protein, 1545 aa, Homo sapiens
MLEKFCNSTFWNSSFLDSPEADLPLCFEQTVLVWIPLGYLWLLAPWQLLHVYKSRTKRSSTTKLYLAKQVFVGFLLILAAIELALVLTEDSGQATVPAVRYTNPSLYLGTWLLVLLIQYSRQWCVQKNSWFLSLFWILSILCGTFQFQTLIRTLLQGDNSNLAYSCLFFISYGFQILILIFSAFSENNESSNNPSSIASFLSSITYSWYDSIILKGYKRPLTLEDVWEVDEEMKTKTLVSKFETHMKRELQKARRALQRRQEKSSQQNSGARLPGLNKNQSQSQDALVLEDVEKKKKKSGTKKDVPKSWLMKALFKTFYMVLLKSFLLKLVNDIFTFVSPQLLKLLISFASDRDTYLWIGYLCAILLFTAALIQSFCLQCYFQLCFKLGVKVRTAIMASVYKKALTLSNLARKEYTVGETVNLMSVDAQKLMDVTNFMHMLWSSVLQIVLSIFFLWRELGPSVLAGVGVMVLVIPINAILSTKSKTIQVKNMKNKDKRLKIMNEILSGIKILKYFAWEPSFRDQVQNLRKKELKNLLAFSQLQCVVIFVFQLTPVLVSVVTFSVYVLVDSNNILDAQKAFTSITLFNILRFPLSMLPMMISSMLQASVSTERLEKYLGGDDLDTSAIRHDCNFDKAMQFSEASFTWEHDSEATVRDVNLDIMAGQLVAVIGPVGSGKSSLISAMLGEMENVHGHITIKGTTAYVPQQSWIQNGTIKDNILFGTEFNEKRYQQVLEACALLPDLEMLPGGDLAEIGEKGINLSGGQKQRISLARATYQNLDIYLLDDPLSAVDAHVGKHIFNKVLGPNGLLKGKTRLLVTHSMHFLPQVDEIVVLGNGTIVEKGSYSALLAKKGEFAKNLKTFLRHTGPEEEATVHDGSEEEDDDYGLISSVEEIPEDAASITMRRENSFRRTLSRSSRSNGRHLKSLRNSLKTRNVNSLKEDEELVKGQKLIKKEFIETGKVKFSIYLEYLQAIGLFSIFFIILAFVMNSVAFIGSNLWLSAWTSDSKIFNSTDYPASQRDMRVGVYGALGLAQGIFVFIAHFWSAFGFVHASNILHKQLLNNILRAPMRFFDTTPTGRIVNRFAGDISTVDDTLPQSLRSWITCFLGIISTLVMICMATPVFTIIVIPLGIIYVSVQMFYVSTSRQLRRLDSVTRSPIYSHFSETVSGLPVIRAFEHQQRFLKHNEVRIDTNQKCVFSWITSNRWLAIRLELVGNLTVFFSALMMVIYRDTLSGDTVGFVLSNALNITQTLNWLVRMTSEIETNIVAVERITEYTKVENEAPWVTDKRPPPDWPSKGKIQFNNYQVRYRPELDLVLRGITCDIGSMEKIGVVGRTGAGKSSLTNCLFRILEAAGGQIIIDGVDIASIGLHDLREKLTIIPQDPILFSGSLRMNLDPFNNYSDEEIWKALELAHLKSFVASLQLGLSHEVTEAGGNLSIGQRQLLCLGRALLRKSKILVLDEATAAVDLETDNLIQTTIQNEFAHCTVITIAHRLHTIMDSDKVMVLDNGKIIECGSPEELLQIPGPFYFMAKEAGIENVNSTKF

SEQ ID NO: 8303 - DNA, 5338 bp, Homo sapiens
ggatgaaaggtcatcctttacggagaacatcagaatggtagataattcctgttccactttctttgatgaaacaagtaaagaagaaacaacacaatcatattaatagaagagtcttcgttccagacgcagtccaggaatcatgctggagaagttctgcaactctactttttggaattcctcattcctggacagtccggaggcagacctgccactttgttttgagcaaactgttctggtgtggattcccttgggctacctatggctcctggccccctggcagcttctccacgtgtataaatccaggaccaagagatcctctaccaccaaactctatcttgctaagcaggtattcgttggttttcttcttattctagcagccatagagctggcccttgtactcacagaagactctggacaagccacagtccctgctgttcgatataccaatccaagcctctacctaggcacatggctcctggttttgctgatccaatacagcagacaatggtgtgtacagaaaaactcctggttcctgtccctattctggattctctcgatactctgtggcactttccaatttcagactctgatccggacactcttacagggtgacaattctaatctagcctactcctgcctgttcttcatctcctacggattccagatcctgatcctgatcttttcagcattttcagaaaataatgagtcatcaaataatccatcatccatagcttcattcctgagtagcattacctacagctggtatgacagcatcattctgaaaggctacaagcgtcctctgacactcgaggatgtctgggaagttgatgaagagatgaaaaccaagacattagtgagcaagtttgaaacgcacatgaagagagagctgcagaaagccaggcgggcactccagagacggcaggagaagagctcccagcagaactctggagccaggctgcctggcttgaacaagaatcagagtcaaagccaagatgcccttgtcctggaagatgttgaaaagaaaaaaaagaagtctgggaccaaaaaagatgttccaaaatcctggttgatgaaggctctgttcaaaactttctacatggtgctcctgaaatcattcctactgaagctagtgaatgacatcttcacgtttgtgagtcctcagctgctgaaattgctgatctcctttgcaagtgaccgtgacacatatttgtggattggatatctctgtgcaatcctcttattcactgcggctctcattcagtctttctgccttcagtgttatttccaactgtgcttcaagctgggtgtaaaagtacggacagctatcatggcttctgtatataagaaggcattgaccctatccaacttggccaggaaggagtacaccgttggagaaacagtgaacctgatgtctgtggatgcccagaagctcatggatgtgaccaacttcatgcacatgctgtggtcaagtgttctacagattgtcttatctatcttcttcctatggagagagttgggaccctcagtcttagcaggtgttggggtgatggtgcttgtaatcccaattaatgcgatactgtccaccaagagtaagaccattcaggtcaaaaatatgaagaataaagacaaacgtttaaagatcatgaatgagattcttagtggaatcaagatcctgaaatattttgcctgggaaccttcattcagagaccaagtacaaaacctccggaagaaagagctcaagaacctgctggcctttagtcaactacagtgtgtagtaatattcgtcttccagttaactccagtcctggtatctgtggtcacattttctgtttatgtcctggtggatagcaacaatattttggatgcacaaaaggccttcacctccattaccctcttcaatatcctgcgctttcccctgagcatgcttcccatgatgatctcctccatgctccaggccagtgtttccacagagcggctagagaagtacttgggaggggatgacttggacacatctgccattcgacatgactgcaattttgacaaagccatgcagttttctgaggcctcctttacctgggaacatgattcggaagccacagtccgagatgtgaacctggacattatggcaggccaacttgtggctgtgataggccctgtcggctctgggaaatcctccttgatatcagccatgctgggagaaatggaaaatgtccacgggcacatcaccatcaagggcaccactgcctatgtcccacagcagtcctggattcagaatggcaccataaaggacaacatcctttttggaacagagtttaatgaaaagaggtaccagcaagtactggaggcctgtgctctcctcccagacttggaaatgctgcctggaggagatttggctgagattggagagaagggtataaatcttagtgggggtcagaagcagcggatcagcctggccagagctacctaccaaaatttagacatctatcttctagatgaccccctgtctgcagtggatgctcatgtaggaaaacatatttttaataaggtcttgggccccaatggcctgttgaaaggcaagactcgactcttggttacacatagcatgcactttcttcctcaagtggatgagattgtagttctggggaatggaacaattgtagagaaaggatcctacagtgctctcctggccaaaaaaggagagtttgctaagaatctgaagacatttctaagacatacaggccctgaagaggaagccacagtccatgatggcagtgaagaagaagacgatgactatgggctgatatccagtgtggaagagatccccgaagatgcagcctccataaccatgagaagagagaacagctttcgtcgaacacttagccgcagttctaggtccaatggcaggcatctgaagtccctgagaaactccttgaaaactcggaatgtgaatagcctgaaggaagacgaagaactagtgaaaggacaaaaactaattaagaaggaattcatagaaactggaaaggtgaagttctccatctacctggagtacctacaagcaataggattgttttcgatattcttcatcatccttgcgtttgtgatgaattctgtggcttttattggatccaacctctggctcagtgcttggaccagtgactctaaaatcttcaatagcaccgactatccagcatctcagagggacatgagagttggagtctacggagctctgggattagcccaaggtatatttgtgttcatagcacatttctggagtgcctttggtttcgtccatgcatcaaatatcttgcacaagcaactgctgaacaatatccttcgagcacctatgagattttttgacacaacacccacaggccggattgtgaacaggtttgccggcgatatttccacagtggatgacaccctgcctcagtccttgcgcagctggattacatgcttcctggggataatcagcacccttgtcatgatctgcatggccactcctgtcttcaccatcatcgtcattcctcttggcattatttatgtatctgttcagatgttttatgtgtctacctcccgccagctgaggcgtctggactctgtcaccaggtccccaatctactctcacttcagcgagaccgtatcaggtttgccagttatccgtgcctttgagcaccagcagcgatttctgaaacacaatgaggtgaggattgacaccaaccagaaatgtgtcttttcctggatcacctccaacaggtggcttgcaattcgcctggagctggttgggaacctgactgtcttcttttcagccttgatgatggttatttatagagataccctaagtggggacactgttggctttgttctgtccaatgcactcaatatcacacaaaccctgaactggctggtgaggatgacatcagaaatagagaccaacattgtggctgttgagcgaataactgagtacacaaaagtggaaaatgaggcaccctgggtgactgataagaggcctccgccagattggcccagcaaaggcaagatccagtttaacaactaccaagtgcggtaccgacctgagctggatctggtcctcagagggatcacttgtgacatcggtagcatggagaagattggtgtggtgggcaggacaggagctggaaagtcatccctcacaaactgcctcttcagaatcttagaggctgccggtggtcagattatcattgatggagtagatattgcttccattgggctccacgacctccgagagaagctgaccatcatcccccaggaccccatcctgttctctggaagcctgaggatgaatctcgaccctttcaacaactactcagatgaggagatttggaaggccttggagctggctcacctcaagtcttttgtggccagcctgcaacttgggttatcccacgaagtgacagaggctggtggcaacctgagcataggccagaggcagctgctgtgcctgggcagggctctgcttcggaaatccaagatcctggtcctggatgaggccactgctgcggtggatctagagacagacaacctcattcagacgaccatccaaaacgagttcgcccactgcacagtgatcaccatcgcccacaggctgcacaccatcatggacagtgacaaggtaatggtcctagacaacgggaagattatagagtgcggcagccctgaagaactgctacaaatccctggacccttttactttatggctaaggaagctggcattgagaatgtgaacagcacaaaattctagcagaaggccccatgggttagaaaaggactataagaataatttcttatttaattttattttttataaaatacagaatacatacaaaagtgtgtataaaatgtacgttttaaaaaaggataagtgaacacccatgaacctactacccaggttaagaaaataaatgtcaccaggtacttgagaaacccctcgattgtctacctcgatcgtacttccttgctacccacccctcccagggacaaccactgtcctgaatttcacgataattattcctttgcctttcatttctgttttatcacctttgtatgtatctttaaacaacatatacccttttttacttatgtaaatggactgactcatactgcatacatcttctatgacttgattcttttgttcaatattatatctgagattcatccatggtgatgcaaataggtgcattattttttttcactgctctgtagtctggcattgtatgaatacagcacaatgtatcagttttaatattggggatcattagcattattctcaggtttttaaaaattataagcagtactactatgg

SEQ ID NO: 8304 - protein, 1545 aa, Homo sapiens; identical to SEQ ID NO: 8302

SEQ ID NO: 8305 - DNA, 1651 bp, Homo sapiens
gcctgtccctgccttaagtgcctactggatcccgggagcctgggctggggcctgggcactgcttcctccttggcccctcaggcccttggaagcagagagagaacctcttgcagatcccaggctcgtccccagcacagcagacaccaggaaggtggccagagcctcactgagccgaaccgacggccgcccacccacccaggctggagccatggataaattccgcatgctcttccagcacttccagtcaagctcggagtcggtgatgaatggcatctgcctgctgctggctgcggtcaccgtcaagctgtactcctcctttgacttcaactgtccctgcctggtgcactacaatgcactctacggcctgggcctgctgctgacgcccccgctcgccctgtttctctgcggcctcctcgccaaccggcagtctgtggtgatggtcgaggagtggcgccggcccgcagggcaccggaggaaggacccaggcatcatcaggtacatgtgctcctctgtgctgcagagggcgctggccgcccccctggtctggatcctgctggccctccttgacgggaagtgcttcgtgtgtgccttcagcagctctgtggaccctgagaagtttctggactttgccaacatgacccccagccaggtacagctcttcctggccaaggttccctgcaaggaggatgagctggtcagggatagccctgctcggaaggcagtgtctcgctacctgcggtgcctgtcacaggccatcggctggagcgtcaccctgctgctgatcatcgcggccttcctggcccgctgcctgaggccctgcttcgaccagacagtcttcctgcagcgcagatactggagcaactacgtggacctggagcagaagctcttcgacgagacctgctgtgagcatgcgcgggacttcgcgcaccgctgcgtgctgcacttctttgccagcatgcggagtgagctgcaggcgcgggggctgcgccggggcaatgcaggcaggagactcgagctccccgcagtgcctgagcccccagaaggcctggatagtggaagtgggaaggcccacctgcgcgcaatctccagccgggagcaggtggaccgcctcctaagcacgtggtactccagcaagccgccgctggacctggctgcatcccccgggctctgcgggggtggccttagccaccgcgcccctaccttggcactgggcacgaggctgtcacaacacaccgacgtgtagggtcctggccaggcttgaagcggcagtgttcgcaggtgaaatgccgcgctgacaaagttctggagtctttccaggccgtggggaccccacggcaggcaccctaagtcttgttagcctcctttttaaagtagcccaatctctgcctagtttctgggtgtggcctccagcgcgcttcacaaactttaatgtggactcggttcaccgagggccttgttaaatacaggttcagacagtgtagccaggaccgagtctgagattctgcattttaaacaagctcctggaggctgatgtgcttttggtcagtgaaccaaactttgagtagcaagaatctaagtaaatctgccatgggttctgggttctagatgtcaattctaaataataataatgaccttagtctgctgcctcgat

SEQ ID NO: 8306 - protein, 344 aa, Homo sapiens
MDKFRMLFQHFQSSSESVMNGICLLLAAVTVKLYSSFDFNCPCLVHYNALYGLGLLLTPPLALFLCGLLANRQSVVMVEEWRRPAGHRRKDPGIIRYMCSSVLQRALAAPLVWILLALLDGKCFVCAFSSSVDPEKFLDFANMTPSQVQLFLAKVPCKEDELVRDSPARKAVSRYLRCLSQAIGWSVTLLLIIAAFLARCLRPCFDQTVFLQRRYWSNYVDLEQKLFDETCCEHARDFAHRCVLHFFASMRSELQARGLRRGNAGRRLELPAVPEPPEGLDSGSGKAHLRAISSREQVDRLLSTWYSSKPPLDLAASPGLCGGGLSHRAPTLALGTRLSQHTDV

SEQ ID NO: 8307 - DNA, 631 bp, Homo sapiens
tcccacactggtcagttacagcctcctacgtcccagctgtgcgtttcctgtgaaaagaataagctcgcctaagaccatggcctgaggggactccagtgacgttcccagtgccagcagacagaactgcgcagaccccgcgggacgccatcctccatcaccatcatcgccggctgccctccacccccagcccactccacggccagaggtgcatctccggcctccagacacgcacaacaggtttcaggggtccctcaaacatctgggctgtcatccttcggagagactggaactgagacacaaggagagacctagtgatgtgggagagttaggagaagaagcagtgatttcaaacgcatgcccctcacacggaagaagggcagggggaaagccatgcaggtgtgggcgtggcacttgagcagcctctcccatgggcacccagtggttaatgcacaatgtttagcacgtcgcccagggaggccatccccttccgctacccctttcatggcaaatgctgaaacatcgttgaagactcctctcaagggtctcctcttccaggaagccttcggtcaggaataggtgccccttctggctcctcctagcctgaaagccaacatgaaatctccctgggctg

SEQ ID NO: 8308 - protein, 73 aa, Homo sapiens
MPLTRKKGRGKAMQVWAWHLSSLSHGHPVVNAQCLARRPGRPSPSATPFMANAETSLKTPLKGLLFQEAFGQE

SEQ ID NO: 8309 - DNA, 4121 bp, Homo sapiens
gcggcggtcgggggacaccagctgcgtcggagcgcccagaacgccccgcgctccgccgagccccgctccacgcagacccgcgggcgggagggagccacgcacatcgccgccgcggccgtctccgcggggcggtaaccgagcctgcctcggagccgccgaacgcccacgccagcgaccctgactctatggccccgggggagcgcgccggagccgccgcgccgcccacccccagccggaaccctagcgtcccggggagcaagcggggagccccgggcgtccccggccccggcccagggccctgcttgtggcccccgctcccgccacggggcatgggaggcaggtagcccagcctgcgccaggacacccgtggcgggcggaacccgccaaggaccgcgaagtccagagaaaggaagctgaggagctgcccgcccgcccccggctgcagccccagcagggccctcccccggtggcgcgcacccgcgcgcgcacactcgcacaccgcacctcagcgcctgcccggcctcgcccccacccgcgagcgccgaacctcctggggccggatgccatgggtaacaacttctccagtatcccctcgctgccccgaggaaacccgagccgcgcgccgcggggccacccccagaacctcaaagactctatcgggggccccttccccgtcacttctcaccgatgccaccacaagcagaagcactgtccggcagtgctgcccagcggggggctcccagccacgccgctgctcttccacccgcacaccaagggctcccagatcctcatggacctcagccacaaggctgtcaagaggcaggccagcttctgcaacgccatcaccttcagcaaccgcccggtcctcatctacgagcaagtcaggctgaagatcaccaagaagcagtgctgctggagcggggccctgcggctgggcttcaccagcaaggacccgtcccgcatccaccctgactcgctgcccaagtacgcctgccccgacctggtgtcccagagtggcttctgggccaaggcgctgcctgaggagtttgccaatgagggcaacatcatcgcattctgggtggacaagaagggccgtgtcttccaccgcatcaacgactcggctgttatgctgttcttcagcggggtccgcacggccgacccgctctgggccctggtggacgtctacggcctcacgcggggcgtccagctgcttgatagcgagctggtgctcccggactgtctgcggccgcgctccttcaccgccctgcggcggccgtcgctgcggcgcgaggcggacgacgcgcgcctctcggtgagcctatgcgacctcaacgtgccgggcgcggacggcgacgaggccgcgccggccgccggctgccccatcccgcagaactcactcaactcgcagcacagccgcgcgctgccggcgcagctcgacggcgacctgcgtttccacgccctgcgcgccggcgcgcacgtccgcatcctcgacgagcagacggtggcgcgcgtggagcacgggcgcgacgagcgcgcgctcgtcttcaccagccggcccgtgcgcgtggccgagaccatcttcgtcaaggtcacgcgctcgggtggcgcgcggcccggcgcgctgtcgttcggcgtcaccacgtgcgaccccggcacgctgcggccggccgacctgcctttcagccctgaggccctggtggaccgcaaggaattctgggccgtgtgccgcgtgcccgggcccctgcacagcggcgacatcctgggcctggtggtcaacgccgacggcgagctgcacctcagccacaatggcgcggccgccggcatgcagctgtgcgtggacgcctcgcagccgctttggatgctcttcggcctgcacgggaccatcacgcagatccgcatcctcggctccactatcctggccgagcggggtatcccatcactcccctgctcccctgcctccacgccaacctcgcccagtgccctgggcagccgcctgtctgaccccttgctcagcacgtgcagctctggccctctgggtagctctgctggtgggacagcccccaattcgccagtgagcctgcccgagtcgccagtgaccccaggtctgggccagtggagcgatgagtgcaccatttgctatgaacacgcggtggacacggtcatctacacatgtggccacatgtgcctctgctacgcctgtggcctgcgcctcaagaaggctctgcacgcctgctgccccatctgccgccgccccatcaaggacatcatcaagacctaccgcagctcctagcccgttgcggtggcccatcccgcatacccatcttctcgggcttcagcccagtcccagctgaggaacaagccagtggggccccttctcttcctcattttggaaacttttcctcctctattaaacatgggaaactgaagcccttgaaggtttggggagaggggggtatcaggcagggagggggcagaggcaaatcaccgggcagagggaggggaggagaggaggccgcactctccctgtctctcccgtctctgcacccagctcctctctgcatgctgagggctaaattgggatctcagcctgccctaatctttccccatctgaggcaggtttctaggaggtgtctgtagtccatgtggcacctttgtgagaattagaaaacatgtaccttcctctgggcagctgcagccctgagccaggacatgtggcctggctagtgcagcatggagtggattttaggctcatttgccctctcagccaactgcccttgagcagtgtacagcctgctcaacaaccgccctgggcaggccgctcctgagctgctgtctccctctctgacctatgcctaccttctctttcttcgttccctgcccactgggcatggcagctgggggtgagaggctggtggttgcctcccgtcctgggcaggctgcagcctcatgccatgtctctctcccactacctgatgggcacatggacaggctgcagagggctccaggttctgggcccctggctgagaaggggaggatcctgtcctggctgtagccttcctgccccaatcatctcgctggatgccattgcccaggggtagcccttcggtatgggctggggagaagggttggtcttctgccagggtccctaagaacaggtttgcagctaccctctctgaccttttccccatatcttgtgctgtccagggcctaggctgatagtcagagcctgtggcacacctgggatgggccagggccctgggtggggaggtgtgggttccctgggccaagaccagcctttttcctcagtttaattaatttatttatttggtttgtggttttgggttttttttgtttgtttgtttgtaggtgagttcccatcctctgggcccctagaaatgctgcctttgtgtgtggggtacctgggaaagggtgtggctgaggcagtcataatgcagtatcttcccctgactccagccacaaagctcatacccagccctaccaatcatgaactggaactccataaggaggggccaaattgggaggccttttggcaaacagtgtctattttacagagaggcaaaccaagcctccttagtgccctggggctgatggtcacccagagccatagagcacccttcctcctgggccagagctgggttatcatggttggcttaggtacctcaggtggcccaggaggtcccccctccataaggacgtcaaacttccaggagggccagtgttcctagtgtgggccaggaacaggacagggagaccttgtgatggcggggcagggagcctgttcgtagggaagatgaggaggcaagggctgcctctcacacctccaggttctctaagttctggggagggagcgccccacctgctgaggtcggtcctctcagccctgcctgccctggcctgggctctcccagcctcccagccctctgccccctcagatggctttttgtttttgtttttttttgcatccatcagagactgcacctctgtgtggcaggcagggcatgggttttagtcctggccactgaccagctgtgtggccctggccgagtcgtagccccctggagcccagcttccatttctataaaatggttgtttcgggagag

SEQ ID NO: 8310 - protein, 574 aa, Homo sapiens
MGNNFSSIPSLPRGNPSRAPRGHPQNLKDSIGGPFPVTSHRCHHKQKHCPAVLPSGGLPATPLLFHPHTKGSQILMDLSHKAVKRQASFCNAITFSNRPVLIYEQVRLKITKKQCCWSGALRLGFTSKDPSRIHPDSLPKYACPDLVSQSGFWAKALPEEFANEGNIIAFWVDKKGRVFHRINDSAVMLFFSGVRTADPLWALVDVYGLTRGVQLLDSELVLPDCLRPRSFTALRRPSLRREADDARLSVSLCDLNVPGADGDEAAPAAGCPIPQNSLNSQHSRALPAQLDGDLRFHALRAGAHVRILDEQTVARVEHGRDERALVFTSRPVRVAETIFVKVTRSGGARPGALSFGVTTCDPGTLRPADLPFSPEALVDRKEFWAVCRVPGPLHSGDILGLVVNADGELHLSHNGAAAGMQLCVDASQPLWMLFGLHGTITQIRILGSTILAERGIPSLPCSPASTPTSPSALGSRLSDPLLSTCSSGPLGSSAGGTAPNSPVSLPESPVTPGLGQWSDECTICYEHAVDTVIYTCGHMCLCYACGLRLKKALHACCPICRRPIKDIIKTYRSS

SEQ ID NO: 8311 - DNA, 4466 bp, Homo sapiens
gcggcggtcgggggacaccagctgcgtcggagcgcccagaacgccccgcgctccgccgagccccgctccacgcagacccgcgggcgggagggagccacgcacatcgccgccgcggccgtctccgcggggcggtaaccgagcctgcctcggagccgccgaacgcccacgccagcgaccctgactctatggccccgggggagcgcgccggagccgccgcgccgcccacccccagccggaaccctagcgtcccggggagcaagcggggagccccgggcgtccccggccccggcccagggccctgcttgtggcccccgctcccgccacggggcatgggaggcaggtagcccagcctgcgccaggacacccgtggcgggcggaacccgccaaggaccgcgaagtccagagaaaggaagctgaggagctgcccgcccgcccccggctgcagccccagcagggccctcccccggtggcgcgcacccgcgcgcgcacactcgcacaccgcacctcagcgcctgcccggcctcgcccccacccgcgagcgccgaacctcctggggccggatgccatgggtaacaacttctccagtatcccctcgctgccccgaggaaacccgagccgcgcgccgcggggccacccccagaacctcaaagactctatcgggggccccttccccgtcacttctcaccgatgccaccacaagcagaagcactgtccggcagtgctgcccagcggggggctcccagccacgccgctgctcttccacccgcacaccaagggctcccagatcctcatggacctcagccacaaggctgtcaagaggcaggccagcttctgcaacgccatcaccttcagcaaccgcccggtcctcatctacgagcaagtcaggctgaagatcaccaagaagcagtgctgctggagcggggccctgcggctgggcttcaccagcaaggacccgtcccgcatccaccctgactcgctgcccaagtacgcctgccccgacctggtgtcccagagtggcttctgggccaaggcgctgcctgaggagtttgccaatgagggcaacatcatcgcattctgggtggacaagaagggccgtgtcttccaccgcatcaacgactcggctgttatgctgttcttcagcggggtccgcacggccgacccgctctgggccctggtggacgtctacggcctcacgcggggcgtccagctgcttgatagcgagctggtgctcccggactgtctgcggccgcgctccttcaccgccctgcggcggccgtcgctgcggcgcgaggcggacgacgcgcgcctctcggtgagcctatgcgacctcaacgtgccgggcgcggacggcgacgaggccgcgccggccgccggctgccccatcccgcagaactcactcaactcgcagcacagccgcgcgctgccggcgcagctcgacggcgacctgcgtttccacgccctgcgcgccggcgcgcacgtccgcatcctcgacgagcagacggtggcgcgcgtggagcacgggcgcgacgagcgcgcgctcgtcttcaccagccggcccgtgcgcgtggccgagaccatcttcgtcaaggtcacgcgctcgggtggcgcgcggcccggcgcgctgtcgttcggcgtcaccacgtgcgaccccggcacgctgcggccggccgacctgcctttcagccctgaggccctggtggaccgcaaggaattctgggccgtgtgccgcgtgcccgggcccctgcacagcggcgacatcctgggcctggtggtcaacgccgacggcgagctgcacctcagccacaatggcgcggccgccggcatgcagctgtgcgtggacgcctcgcagccgctttggatgctcttcggcctgcacgggaccatcacgcagatccgcatcctcggctccactatcctggccgagcggggtatcccatcactcccctgctcccctgcctccacgccaacctcgcccagtgccctgggcagccgcctgtctgaccccttgctcagcacgtgcagctctggccctctgggtagctctgctggtgggacagcccccaattcgccagtgagcctgcccgagtcgccagtgaccccaggtctgggccagtggagcgatgagtgcaccatttgctatgaacacgcggtggacacggtcatctacacatgtggccacatgtgcctctgctacgcctgtggcctgcgcctcaagaaggctctgcacgcctgctgccccatctgccgccgccccatcaaggacatcatcaagacctaccgcagctcctagcccgttgcggtggcccatcccgcatacccatcttctcgggcttcagcccagtcccagctgaggaacaagccagtggggccccttctcttcctcattttggaaacttttcctcctctattaaacatgggaaactgaagcccttgaaggtttggggagaggggggtatcaggcagggagggggcagaggcaaatcaccgggcagagggaggggaggagaggaggccgcactctccctgtctctcccgtctctgcacccagctcctctctgcatgctgagggctaaattgggatctcagcctgccctaatctttccccatctgaggcaggtttctaggaggtgtctgtagtccatgtggcacctttgtgagaattagaaaacatgtaccttcctctgggcagctgcagccctgagccaggacatgtggcctggctagtgcagcatggagtggattttaggctcatttgccctctcagccaactgcccttgagcagtgtacagcctgctcaacaaccgccctgggcaggccgctcctgagctgctgtctccctctctgacctatgcctaccttctctttcttcgttccctgcccactgggcatggcagctgggggtgagaggctggtggttgcctcccgtcctgggcaggctgcagcctcatgccatgtctctctcccactacctgatgggcacatggacaggctgcagagggctccaggttctgggcccctggctgagaaggggaggatcctgtcctggctgtagccttcctgccccaatcatctcgctggatgccattgcccaggggtagcccttcggtatgggctggggagaagggttggtcttctgccagggtccctaagaacaggtttgcagctaccctctctgaccttttccccatatcttgtgctgtccagggcctaggctgatagtcagagcctgtggcacacctgggatgggccagggccctgggtggggaggtgtgggttccctgggccaagaccagcctttttcctcagtttaattaatttatttatttggtttgtggttttgggttttttttgtttgtttgtttgtaggtgagttcccatcctctgggcccctagaaatgctgcctttgtgtgtggggtacctgggaaagggtgtggctgaggcagtcataatgcagtatcttcccctgactccagccacaaagctcatacccagccctaccaatcatgaactggaactccataaggaggggccaaattgggaggccttttggcaaacagtgtctattttacagagaggcaaaccaagcctccttagtgccctggggctgatggtcacccagagccatagagcacccttcctcctgggccagagctgggttatcatggttggcttaggtacctcaggtggcccaggaggtcccccctccataaggacgtcaaacttccaggagggccagtgttcctagtgtgggccaggaacaggacagggagaccttgtgatggcggggcagggagcctgttcgtagggaagatgaggaggcaagggctgcctctcacacctccaggttctctaagttctggggagggagcgccccacctgctgaggtcggtcctctcagccctgcctgccctggcctgggctctcccagcctcccagccctctgccccctcagatggctttttgtttttgtttttttttgcatccatcagagactgcacctctgtgtggcaggcagggcatgggttttagtcctggccactgaccagctgtgtggccctggccgagtcgtagccccctggagcccagcttccatttctataaaatggttgtttcgggagagaggggcaggctttctgtgtgactcgggagttcttccgtgagggctgccagggggtggtgtgccaggacctcaggctgggcctttgtgctggccttgcagtgggtgtgtggggaagtcactgtcccactatgggtctccactacccagtcactgaccctgggagaccccttctgtgtgggagggagcgggggctggctagcgggccccccagccagggatcccagaggctgagggttggggagaggaagccatcatctcattacctctgtcagtgcaggggtggctgctgcttcccttgtgcacttgggtcgctgtgattgtgaataaaagtgatttcgtaccagc

SEQ ID NO: 8312 - protein, 574 aa, Homo sapiens; identical to SEQ ID NO: 8310

SEQ ID NO: 8313 - DNA, 4751 bp, Homo sapiens
gcggcggtcgggggacaccagctgcgtcggagcgcccagaacgccccgcgctccgccgagccccgctccacgcagacccgcgggcgggagggagccacgcacatcgccgccgcggccgtctccgcggggcggtaaccgagcctgcctcggagccgccgaacgcccacgccagcgaccctgactctatggccccgggggagcgcgccggagccgccgcgccgcccacccccagccggaaccctagcgtcccggggagcaagcggggagccccgggcgtccccggccccggcccagggccctgcttgtggcccccgctcccgccacggggcatgggaggcaggtagcccagcctgcgccaggacacccgtggcgggcggaacccgccaaggaccgcgaagtccagagaaaggaagctgaggagctgcccgcccgcccccggctgcagccccagcagggccctcccccggtggcgcgcacccgcgcgcgcacactcgcacaccgcacctcagcgcctgcccggcctcgcccccacccgcgagcgccgaacctcctggggccggatgccatgggtaacaacttctccagtatcccctcgctgccccgaggaaacccgagccgcgcgccgcggggccacccccagaacctcaaagactctatcgggggccccttccccgtcacttctcaccgatgccaccacaagcagaagcactgtccggcagtgctgcccagcggggggctcccagccacgccgctgctcttccacccgcacaccaagggctcccagatcctcatggacctcagccacaaggctgtcaagaggcaggccagcttctgcaacgccatcaccttcagcaaccgcccggtcctcatctacgagcaagtcaggctgaagatcaccaagaagcagtgctgctggagcggggccctgcggctgggcttcaccagcaaggacccgtcccgcatccaccctgactcgctgcccaagtacgcctgccccgacctggtgtcccagagtggcttctgggccaaggcgctgcctgaggagtttgccaatgagggcaacatcatcgcattctgggtggacaagaagggccgtgtcttccaccgcatcaacgactcggctgttatgctgttcttcagcggggtccgcacggccgacccgctctgggccctggtggacgtctacggcctcacgcggggcgtccagctgcttgatagcgagctggtgctcccggactgtctgcggccgcgctccttcaccgccctgcggcggccgtcgctgcggcgcgaggcggacgacgcgcgcctctcggtgagcctatgcgacctcaacgtgccgggcgcggacggcgacgaggccgcgccggccgccggctgccccatcccgcagaactcactcaactcgcagcacagccgcgcgctgccggcgcagctcgacggcgacctgcgtttccacgccctgcgcgccggcgcgcacgtccgcatcctcgacgagcagacggtggcgcgcgtggagcacgggcgcgacgagcgcgcgctcgtcttcaccagccggcccgtgcgcgtggccgagaccatcttcgtcaaggtcacgcgctcgggtggcgcgcggcccggcgcgctgtcgttcggcgtcaccacgtgcgaccccggcacgctgcggccggccgacctgcctttcagccctgaggccctggtggaccgcaaggaattctgggccgtgtgccgcgtgcccgggcccctgcacagcggcgacatcctgggcctggtggtcaacgccgacggcgagctgcacctcagccacaatggcgcggccgccggcatgcagctgtgcgtggacgcctcgcagccgctttggatgctcttcggcctgcacgggaccatcacgcagatccgcatcctcggctccactatcctggccgagcggggtatcccatcactcccctgctcccctgcctccacgccaacctcgcccagtgccctgggcagccgcctgtctgaccccttgctcagcacgtgcagctctggccctctgggtagctctgctggtgggacagcccccaattcgccagtgagcctgcccgagtcgccagtgaccccaggtctgggccagtggagcgatgagtgcaccatttgctatgaacacgcggtggacacggtcatctacacatgtggccacatgtgcctctgctacgcctgtggcctgcgcctcaagaaggctctgcacgcctgctgccccatctgccgccgccccatcaaggacatcatcaagacctaccgcagctcctagcccgttgcggtggcccatcccgcatacccatcttctcgggcttcagcccagtcccagctgaggaacaagccagtggggccccttctcttcctcattttggaaacttttcctcctctattaaacatgggaaactgaagcccttgaaggtttggggagaggggggtatcaggcagggagggggcagaggcaaatcaccgggcagagggaggggaggagaggaggccgcactctccctgtctctcccgtctctgcacccagctcctctctgcatgctgagggctaaattgggatctcagcctgccctaatctttccccatctgaggcaggtttctaggaggtgtctgtagtccatgtggcacctttgtgagaattagaaaacatgtaccttcctctgggcagctgcagccctgagccaggacatgtggcctggctagtgcagcatggagtggattttaggctcatttgccctctcagccaactgcccttgagcagtgtacagcctgctcaacaaccgccctgggcaggccgctcctgagctgctgtctccctctctgacctatgcctaccttctctttcttcgttccctgcccactgggcatggcagctgggggtgagaggctggtggttgcctcccgtcctgggcaggctgcagcctcatgccatgtctctctcccactacctgatgggcacatggacaggctgcagagggctccaggttctgggcccctggctgagaaggggaggatcctgtcctggctgtagccttcctgccccaatcatctcgctggatgccattgcccaggggtagcccttcggtatgggctggggagaagggttggtcttctgccagggtccctaagaacaggtttgcagctaccctctctgaccttttccccatatcttgtgctgtccagggcctaggctgatagtcagagcctgtggcacacctgggatgggccagggccctgggtggggaggtgtgggttccctgggccaagaccagcctttttcctcagtttaattaatttatttatttggtttgtggttttgggttttttttgtttgtttgtttgtaggtgagttcccatcctctgggcccctagaaatgctgcctttgtgtgtggggtacctgggaaagggtgtggctgaggcagtcataatgcagtatcttcccctgactccagccacaaagctcatacccagccctaccaatcatgaactggaactccataaggaggggccaaattgggaggccttttggcaaacagtgtctattttacagagaggcaaaccaagcctccttagtgccctggggctgatggtcacccagagccatagagcacccttcctcctgggccagagctgggttatcatggttggcttaggtacctcaggtggcccaggaggtcccccctccataaggacgtcaaacttccaggagggccagtgttcctagtgtgggccaggaacaggacagggagaccttgtgatggcggggcagggagcctgttcgtagggaagatgaggaggcaagggctgcctctcacacctccaggttctctaagttctggggagggagcgccccacctgctgaggtcggtcctctcagccctgcctgccctggcctgggctctcccagcctcccagccctctgccccctcagatggctttttgtttttgtttttttttgcatccatcagagactgcacctctgtgtggcaggcagggcatgggttttagtcctggccactgaccagctgtgtggccctggccgagtcgtagccccctggagcccagcttccatttctataaaatggttgtttcgggagagaggggcaggctttctgtgtgactcgggagttcttccgtgagggctgccagggggtggtgtgccaggacctcaggctgggcctttgtgctggccttgcagtgggtgtgtggggaagtcactgtcccactatgggtctccactacccagtcactgaccctgggagaccccttctgtgtgggagggagcgggggctggctagcgggccccccagccagggatcccagaggctgagggttggggagaggaagccatcatctcattacctctgtcagtgcaggggtggctgctgcttcccttgtgcacttgggtcgctgtgattgtgaataaaagtgatttcgtaccagcctgagggcggtgctgtgcgcagagcactggggaaggagggccagcgtgtgcgtgcacatgtgggggcaggctggggtgtggaggcctggtgtcctggatactaggggagtcatcaggagctgtggcccttccctgaggggtaattgcaggcctctgaggcttcaaggtgggctggggcaatcagggaagactccctggagtcgggggctggagcgtgacttgggtctagaatgccaggtgagccttgcaaattgggagaggctactgcatctgtgaggagcaggg

SEQ ID NO: 8314 - protein, 574 aa, Homo sapiens; identical to SEQ ID NO: 8310

SEQ ID NO: 8315 - DNA, 1102 bp, Homo sapiens
acctcagcgcctgcccggcctcgcccccacccgcgagcgccgaacctcctggggccggatgccatgggtaacaacttctccagtatcccctcgctgccccgaggaaacccgagccgcgcgccgcggggccacccccagaacctcaaagactctatcgggggccccttccccgtcacttctcaccgatgccaccacaagcagaagcactgtccggcagtgctgcccagcggggggctcccagccacgccgctgctcttccacccgcacaccaagggctcccagatcctcatggacctcagccacaaggctgtcaagaggcaggccagcttctgcaacgccatcaccttcagcaaccgcccggtcctcatctacgagcaagtcaggctgaaggtgggcctgccccctgcccccgcccccgcctcctgcttcctgctcccctcatggcatcccctgggcctctggactctgcccctcagccgctgcctgctgccacccccagcaccacaccctgcccctgcctttcctctctggtgaccctcttccctcttccttatgcctttctcaacctccctgtgtgacaaggaaggaaccgggagggcggtggccgtgggaaccccttgctgtcttcccagcagggagggctcctgggagggaactgtgctggaatggtgggcaggctgctgtgggatgctccagggagtccaccgcagggaggctgcccttggtctgattgaccaagtgggagagggtgggctgaggccaccccctgccacccagatcaccaagaagcagtgctgctggagcggggccctgcggctgggcttcaccagcaaggacccgtcccgcatccaccctgactcgctgcccaagtacgcctgccccgacctggtgtcccagagtggcttctgggccaaggcgctgcctgaggagtttgccaatgagggcaacatcatcgcattctgggtggacaagaagggccgtgtcttccaccgcatcaacgactcggctgttatgctgttcttcagcggggtccgcacggccgacccgctctgggccctggtggacgtctacggcctcacgcggggcgtccagctgcttggtg

SEQ ID NO: 8316 - protein, 156 aa, Homo sapiens
MGNNFSSIPSLPRGNPSRAPRGHPQNLKDSIGGPFPVTSHRCHHKQKHCPAVLPSGGLPATPLLFHPHTKGSQILMDLSHKAVKRQASFCNAITFSNRPVLIYEQVRLKVGLPPAPAPASCFLLPSWHPLGLWTLPLSRCLLPPPAPHPAPAFPLW

SEQ ID NO: 8317 - DNA, 500 bp, Homo sapiens
caatggcttctacaatccctttcatcctggacagtccagtgttgtgataccctgacaccaagacccttccttggttgtctggcacagtgctgccacataccatctcaggaactttcatttatttccctttgtgtccaaacatcagaaaggctttctgagttgcttgccaaggtgttcttcagccttccctaggctaaacttctccattggatcaatagcaggtggtcaacaaagacaaaaacaccatcttcagaatgactcagatcatcctcttgggcagccctttttggatatctctatgaaattctgcagctgaaagctgacacgcataattatttcctgttagatactgaagaaaaaaaaaagcccaggagatattgtcgagactgtttctggggtgtgattgggggataggagatgaatggtgtcagaattggaacatgaagtagaacttccagtaacccctaggagcatcaagtgacccagagaggtaaccccct

SEQ ID NO: 8318 - protein, 63 aa, Homo sapiens
QWLLQSLSSWTVQCCDTLTPRPFLGCLAQCCHIPSQELSFISLCVQTSERLSELLAKVFFSLP

SEQ ID NO: 8319 - DNA, 323 bp, Homo sapiens
tgaaagctgacacgcataattatttcctgttagatactgaagaaaaaaaaaagcccaggagatattgtcgagactgtttctggggtgtgattgggggataggagatgaccatccagacccacaggaaatgggcattcttgctgaaagtcatgaaagcaactgattatctgctaagtggaactccagggagcatgttcatccttacatcttacagaggaggcgactttgccatccaattagtcctattaccttctcactggatcacaaaggcatttatgggaataagtcattttttaaaggaagagagaagtgcatttaacatg

SEQ ID NO: 8320 - protein, 72 aa, Homo sapiens
MTIQTHRKWAFLLKVMKATDYLLSGTPGSMFILTSYRGGDFAIQLVLLPSHWITKAFMGISHFLKEERSAFN

SEQ ID NO: 8321 - DNA, 2810 bp, Homo sapiens
ggcgacaggctcgcactaggacccaggcgccagagtgcctccgtctgtcctgtaggttcattcaatctcccatacacacagactcacagcgagaccgacacacactcccatacactcacacacacaactgcaggcagcgaggctcgggaagtcaggccggcttttcgccccggcgccttctctgctccagccggccgggtctccctgggggcccggagctcggccgggccgcgcagccccgttagaggacgagctcggcggacccccgctcctccatgggcaaacgcgggcggccgcgcaaggaggcgcgctgcgagggcgcggggctggcccccgccgcgcccccggctgtgccccccgccgtggccgcgccccagcccccggccctgcccgaggaccccgctggggccaagcccaggtgccccttctcagacattttcaacaccagcgagaactcgatggagaagcacatcaacacttttctgcagaacgtgcagattctgctcgaggccgccagctacctggagcagatcgagaaagaaaacaaaaagtgtgaacatggctacgcctcttcattcccgtccatgccgagcccccgactgcagcattcaaagcccccacggaggttgagccgggcacagaaacacagcagcgggagcagcaacaccagcactgccaacagatctacacacaatgagctggaaaagaatcgacgagctcatctgcgcctttgtttagaacgcttaaaagttctgattccactaggaccagactgcacccggcacacaacacttggtttgctcaacaaagccaaagcacacatcaagaaacttgaagaagctgaaagaaaaagccagcaccagctcgagaatttggaacgagaacagagatttttaaagtggcgactggaacagctgcagggtcctcaggagatggaacgaatacgaatggacagcattggatcaactatttcttcagatcgttctgattcagagcgagaggagattgaagtggatgttgaaagcacagagttctcccatggagaagtggacaatataagtaccaccagcatcagtgacattgatgaccacagcagcctgccgagtattgggagtgacgagggttactccagtgccagtgtcaaactttcattcacttcatagaacccagcatgacataacagtgcagggcaaaatattcactgggccaattcaatacaaacaatctcttaaattgggttcatgatgcagtctcctctttaaaacaaaacaaaacaaaacaaaactatacttgaacaaaagggtcagaggacctgtatttaagcaaatacttagcaaaaagtggggcagagcctcccaaggagaacaaatattcagaatattcatattggaaaaatcacaatttttaatggcagcagaaaacttgtgtgaaattttcttgatttgagttgattgagaagaggacattggagatgccatcctctttctcttttctagtttgctcatactacattgagtagacacatttaaggatggggttatgaacccttcctgagctttatggtcctaaaagcaaaataaaaactattcgaatgaaaagacaagaaaatcaggtattaatcttggatagctaataatgagctattaaaactcagcctgggacagtttatcatgaagcctgtggatgatcaatcctttattattattttttttttttgaaaaaagctcatttcatgctctgcaaaaggagagactcccatgaagccttttgaaagggatcatcatgcagctcaactttctgttggattccatgctaagcaagctaaccttatcctgcattgttagcactaggcacccagctgccacctctccatcctgctgcccttaggccacatgggagcagtccatgcatgacagcctctatcctacaaggcctatgagtatggattgggggggccaaaaggaaaaagctccatgtgcctctttgtctgcgtgggtcagaagagttgtgcacgcagattagcaggccaaggtctgagccacagcagcatttttatttcagattttgataactgtttatatgtgttgaaaaccaaaatgacatctttttaaagcttatccataaaaaaaaatagatgtcttttatagtggaaaaacacatggggaaaaaaatcatctattttgatgcagcatttgataatgataaaacacctcacacctcactctttatagtgcacaaaatgaatgaggtctgggctaggtagaaaaagggtcaatgctatttttgtttttagaatcattaccttttaccagcttttaaccatctgatatctatagtagacacactatcatagttaacatagtaagttcagcacttgtctcattttaatgtaaagatttgcttccattttcctacaggcagtctctctcttcctcacagtcccactgtgcaggtgctattgttactcttacgaatattttcagtaatgttattttcttctaagtgaaatttctagcctgcactttgatgtcatgtgttccctttgtctttcaaactccaaggttcccttgtggccctctcccttaccctgggaaggcctcttggagaccttacccctggctgtttggactttgtatactttaaataatttaactacccttaattacttaaaaaaaaaaaaaagctttatgattttcataacttattgctgattttaatggattgttaatttcagtcctgtagttttattttatgtttagatagggctgggcaaggaaaaagaaaataaagacaaccatatttagcagtgc

SEQ ID NO: 8322 - protein, 295 aa, Homo sapiens; identical to SEQ ID NO: 1204

SEQ ID NO: 8323 - DNA, 3541 bp, Homo sapiens
ggcgacaggctcgcactaggacccaggcgccagagtgcctccgtctgtcctgtaggttcattcaatctcccatacacacagactcacagcgagaccgacacacactcccatacactcacacacacaactgcaggcagcgaggctcgggaagtcaggccggcttttcgccccggcgccttctctgctccagccggccgggtctccctgggggcccggagctcggccgggccgcgcagccccgttagaggacgagctcggcggacccccgctcctccatgggcaaacgcgggcggccgcgcaaggaggcgcgctgcgagggcgcggggctggcccccgccgcgcccccggctgtgccccccgccgtggccgcgccccagcccccggccctgcccgaggaccccgctggggccaagcccaggtgccccttctcagacattttcaacaccagcgagaactcgatggagaagcacatcaacacttttctgcagaacgtgcagattctgctcgaggccgccagctacctggagcagatcgagaaagaaaacaaaaagtgtgaacatggctacgcctcttcattcccgtccatgccgagcccccgactgcagcattcaaagcccccacggaggttgagccgggcacagaaacacagcagcgggagcagcaacaccagcactgccaacagatctacacacaatgagctggaaaagaatcgacgagctcatctgcgcctttgtttagaacgcttaaaagttctgattccactaggaccagactgcacccggcacacaacacttggtttgctcaacaaagccaaagcacacatcaagaaacttgaagaagctgaaagaaaaagccagcaccagctcgagaatttggaacgagaacagagatttttaaagtggcgactggaacagctgcagggtcctcaggagatggaacgaatacgaatggacagcattggatcaactatttcttcagatcgttctgattcagagcgagaggagattgaagtggatgttgaaagcacagagttctcccatggagaagtggacaatataagtaccaccagcatcagtgacattgatgaccacagcagcctgccgagtattgggagtgacgagggttactccagtgccagtgtcaaactttcattcacttcatagaacccagcatgacataacagtgcagggcaaaatattcactgggccaattcaatacaaacaatctcttaaattgggttcatgatgcagtctcctctttaaaacaaaacaaaacaaaacaaaactatacttgaacaaaagggtcagaggacctgtatttaagcaaatacttagcaaaaagtggggcagagcctcccaaggagaacaaatattcagaatattcatattggaaaaatcacaatttttaatggcagcagaaaacttgtgtgaaattttcttgatttgagttgattgagaagaggacattggagatgccatcctctttctcttttctagtttgctcatactacattgagtagacacatttaaggatggggttatgaacccttcctgagctttatggtcctaaaagcaaaataaaaactattcgaatgaaaagacaagaaaatcaggtattaatcttggatagctaataatgagctattaaaactcagcctgggacagtttatcatgaagcctgtggatgatcaatcctttattattattttttttttttgaaaaaagctcatttcatgctctgcaaaaggagagactcccatgaagccttttgaaagggatcatcatgcagctcaactttctgttggattccatgctaagcaagctaaccttatcctgcattgttagcactaggcacccagctgccacctctccatcctgctgcccttaggccacatgggagcagtccatgcatgacagcctctatcctacaaggcctatgagtatggattgggggggccaaaaggaaaaagctccatgtgcctctttgtctgcgtgggtcagaagagttgtgcacgcagattagcaggccaaggtctgagccacagcagcatttttatttcagattttgataactgtttatatgtgttgaaaaccaaaatgacatctttttaaagcttatccataaaaaaaaatagatgtcttttatagtggaaaaacacatggggaaaaaaatcatctattttgatgcagcatttgataatgataaaacacctcacacctcactctttatagtgcacaaaatgaatgaggtctgggctaggtagaaaaagggtcaatgctatttttgtttttagaatcattaccttttaccagcttttaaccatctgatatctatagtagacacactatcatagttaacatagtaagttcagcacttgtctcattttaatgtaaagatttgcttccattttcctacaggcagtctctctcttcctcacagtcccactgtgcaggtgctattgttactcttacgaatattttcagtaatgttattttcttctaagtgaaatttctagcctgcactttgatgtcatgtgttccctttgtctttcaaactccaaggttcccttgtggccctctcccttaccctgggaaggcctcttggagaccttacccctggctgtttggactttgtatactttaaataatttaactacccttaattacttaaaaaaaaaaaaaagctttatgattttcataacttattgctgattttaatggattgttaatttcagtcctgtagttttattttatgtttagatagggctgggcaaggaaaaagaaaataaagacaaccatatttagcagtgcagttgagttgtgtgttaatgttagactatccctttgtgagtgacactttaacagcattcactgcttctatatatagtgtaccatcttggtcatacattacgcctcaacatatacttgtgctcttcctttgcctccagaagaagtttttccttgattgtgctatgtttcagtggaagaaattctttgaagtagatgtgagtgaaaaactgcatgcctttagaagcccagtatcagaacttgctacgtttcaggtgctagggacttaatgaaaaacaggacaaaacaattcctttttgtggcccaggtaaattatttctggtttcacttataattactaatggctgagtcaagatgttgtctctgtgtttgcttactcttgatcaagtgtgagacagtttgaagactgtgctaccatacaaagtgaatgaagccagtgactaagcttctgtttgttttgttattctcatggccttcgcttgcattatttgggccttcattcagatgaacttgaggtgccattttgttgcatatgtacaggattatgggctggaaagcatttgttataaacctatagtgcacattttaactgccccctaaattacccttccctgggtttgttttccttggggtggtgtagattgtatgagtaagaagtattaattttttaaaagacaaatcaactttgaagacacaaaagttaattggaagaaataaaaactgtgaacgaagaa

SEQ ID NO: 8324 - protein, 295 aa, Homo sapiens; identical to SEQ ID NO: 1204

SEQ ID NO: 8325 - DNA, 706 bp, Homo sapiens
gtttggttgttattgttgtagaacgagcaacagaaaaacaacacttgtctgcctgagaaggctccggaaaaaaaaaaaaaaaaaaggaagaaaagcgacctcaaagagatgagctctcggctcagttgtcagcaaacaacaacactcccccgctcctccgctgggccatcctcccagccccagcccgccggagaggacagaccgacgcaccgacaggcccctctccccctcgcccgtctttgttacatctttagcagctttgtgcgtagctggcggcctcgagcagaatctgcacgttctgcagaaaagtgttgatgtgcttctccatcgagttctcgctggtgttgaaaatgtctgagaaggggcacctgggcttggccccagcggggtcctcgggcagggccgggggctggggcgcggccacggcggggggcacagccgggggcgcggcgggggccagccccgcgccctcgcagcgcgcctccttgcgcggccgcccgcgtttgcccatggaggagcgggggtccgccgagctcgtcctctaacggggctgcgcggcccggccgagctccgggcccccagggagacccggccggctggagcagagaaggcgccggggcgaaaagccggcctgacttcccgagcctcgctgcctgcagttgtgtgtgtgagtgtatgggagtgtgtgtcggtctcgctgtgagtc

SEQ ID NO: 8326 - protein, 68 aa, Homo sapiens
MSSRLSCQQTTTLPRSSAGPSSQPQPAGEDRPTHRQAPLPLARLCYIFSSFVRSWRPRAESARSAEKC

SEQ ID NO: 8327 - DNA, 2316 bp, Homo sapiens
catcgcccgaggcgtccgccctgcaaatctgccagcccccgagaggggtttggaaccttagcacccaagtctaagtcaacttcatagtgtgaacatggctacgcctcttcattcccgtccatgccgagcccccgactgcagcattcaaagcccccacggaggttgagccgggcacagaaacacagcagcgggagcagcaacaccagcactgccaacagacgagctcatctgcgcctttgtttagaacgcttaaaagttctgattccactaggaccagactgcacccggcacacaacacttggtttgctcaacaaagccaaagcacacatcaagaaacttgaagaagctgaaagaaaaagccagcaccagctcgagaatttggaacgagaacagagatttttaaagtggcgactggaacagctgcagggtcctcaggagatggaacgaatacgaatggacagcattggatcaactatttcttcagatcgttctgattcagagcgagaggagattgaagtggatgttgaaagcacagagttctcccatggagaagtggacaatataagtaccaccagcatcagtgacattgatgaccacagcagcctgccgagtattgggagtgacgagggttactccagtgccagtgtcaaactttcattcacttcatagaacccagcatgacataacagtgcagggcaaaatattcactgggccaattcaatacaaacaatctcttaaattgggttcatgatgcagtctcctctttaaaacaaaacaaaacaaaacaaaactatacttgaacaaaagggtcagaggacctgtatttaagcaaatacttagcaaaaagtggggcagagcctcccaaggagaacaaatattcagaatattcatattggaaaaatcacaatttttaatggcagcagaaaacttgtgtgaaattttcttgatttgagttgattgagaagaggacattggagatgccatcctctttctcttttctagtttgctcatactacattgagtagacacatttaaggatggggttatgaacccttcctgagctttatggtcctaaaagcaaaataaaaactattcgaatgaaaagacaagaaaatcaggtattaatcttggatagctaataatgagctattaaaactcagcctgggacagtttatcatgaagcctgtggatgatcaatcctttattattattttttttttttgaaaaaagctcatttcatgctctgcaaaaggagagactcccatgaagccttttgaaagggatcatcatgcagctcaactttctgttggattccatgctaagcaagctaaccttatcctgcattgttagcactaggcacccagctgccacctctccatcctgctgcccttaggccacatgggagcagtccatgcatgacagcctctatcctacaaggcctatgagtatggattgggggggccaaaaggaaaaagctccatgtgcctctttgtctgcgtgggtcagaagagttgtgcacgcagattagcaggccaaggtctgagccacagcagcatttttatttcagattttgataactgtttatatgtgttgaaaaccaaaatgacatctttttaaagcttatccataaaaaaaaatagatgtcttttatagtggaaaaacacatggggaaaaaaatcatctattttgatgcagcatttgataatgataaaacacctcacacctcactctttatagtgcacaaaatgaatgaggtctgggctaggtagaaaaagggtcaatgctatttttgtttttagaatcattaccttttaccagcttttaaccatctgatatctatagtagacacactatcatagttaacatagtaagttcagcacttgtctcattttaatgtaaagatttgcttccattttcctacaggcagtctctctcttcctcacagtcccactgtgcaggtgctattgttactcttacgaatattttcagtaatgttattttcttctaagtgaaatttctagcctgcactttgatgtcatgtgttccctttgtctttcaaactccaaggttcccttgtggccctctcccttaccctgggaaggcctcttggagaccttacccctggctgtttggactttgtatactttaaataatttaactacccttaattacttaaaaaaaaaaaaaagctttatgattttcataacttattgctgattttaatggattgttaatttcagtcctgtagttttattttatgtttagatagggctgggcaaggaaaaagaaaataaagacaaccatatttagcagtgc

SEQ ID NO: 8328 - protein, 182 aa, Homo sapiens; identical to SEQ ID NO: 1200

SEQ ID NO: 8329 - DNA, 3047 bp, Homo sapiens; identical to SEQ ID NO: 1199

SEQ ID NO: 8330 - protein, 182 aa, Homo sapiens; identical to SEQ ID NO: 1200

SEQ ID NO: 8331 - DNA, 965 bp, Homo sapiens
aaaccacgcgcgggctgcccgcggcacggcgggcgcggctggcgcggctggggcggcaggggcggcggagagcgcgccgagccgcggccgagctggcccgcccgcccgtcgcacatgttccggaacggcgcccggccgtagccgcctgcggcgcctcctgtcggcccgagaagggagtgcggagaggcgccggtcgccacccgcggtgcccatggagcgggtgaagatgatcaacgtgcagcgtctgctggaggctgccgagtttttggagcgccgggagcgagagtgtgaacatggctacgcctcttcattcccgtccatgccgagcccccgactgcagcattcaaagcccccacggaggttgagccgggcacagaaacacagcagcgggagcagcaacaccagcactgccaacagatctacacacaatgagctggaaaagaatcgacgagctcatctgcgcctttgtttagaacgcttaaaagttctgattccactaggaccagactgcacccggcacacaacacttggtttgctcaacaaagccaaagcacacatcaagaaacttgaagaagctgaaagaaaaagccagcaccagctcgagaatttggaacgagaacagagatttttaaagtggcgactggaacagctgcagggtcctcaggagatggaacgaatacgaatggacagcattggatcaactatttcttcagatcgttctgattcagagcgagaggagattgaagtggatgttgaaagcacagagttctcccatggagaagtggacaatataagtaccaccagcatcagtgacattgatgaccacagcagcctgccgagtattgggagtgacgagggttactccagtgccagtgtcaaactttcattcacttcatagaacccagcatgacataacagtgcagggcaaaatattcactgggccaattcaatacaaacaatctctt

SEQ ID NO: 8332 - protein, 228 aa, Homo sapiens; identical to SEQ ID NO: 1202

SEQ ID NO: 8333 - DNA, 2545 bp, Homo sapiens
aaaccacgcgcgggctgcccgcggcacggcgggcgcggctggcgcggctggggcggcaggggcggcggagagcgcgccgagccgcggccgagctggcccgcccgcccgtcgcacatgttccggaacggcgcccggccgtagccgcctgcggcgcctcctgtcggcccgagaagggagtgcggagaggcgccggtcgccacccgcggtgcccatggagcgggtgaagatgatcaacgtgcagcgtctgctggaggctgccgagtttttggagcgccgggagcgagagtgtgaacatggctacgcctcttcattcccgtccatgccgagcccccgactgcagcattcaaagcccccacggaggttgagccgggcacagaaacacagcagcgggagcagcaacaccagcactgccaacagatctacacacaatgagctggaaaagaatcgacgagctcatctgcgcctttgtttagaacgcttaaaagttctgattccactaggaccagactgcacccggcacacaacacttggtttgctcaacaaagccaaagcacacatcaagaaacttgaagaagctgaaagaaaaagccagcaccagctcgagaatttggaacgagaacagagatttttaaagtggcgactggaacagctgcagggtcctcaggagatggaacgaatacgaatggacagcattggatcaactatttcttcagatcgttctgattcagagcgagaggagattgaagtggatgttgaaagcacagagttctcccatggagaagtggacaatataagtaccaccagcatcagtgacattgatgaccacagcagcctgccgagtattgggagtgacgagggttactccagtgccagtgtcaaactttcattcacttcatagaacccagcatgacataacagtgcagggcaaaatattcactgggccaattcaatacaaacaatctcttaaattgggttcatgatgcagtctcctctttaaaacaaaacaaaacaaaacaaaactatacttgaacaaaagggtcagaggacctgtatttaagcaaatacttagcaaaaagtggggcagagcctcccaaggagaacaaatattcagaatattcatattggaaaaatcacaatttttaatggcagcagaaaacttgtgtgaaattttcttgatttgagttgattgagaagaggacattggagatgccatcctctttctcttttctagtttgctcatactacattgagtagacacatttaaggatggggttatgaacccttcctgagctttatggtcctaaaagcaaaataaaaactattcgaatgaaaagacaagaaaatcaggtattaatcttggatagctaataatgagctattaaaactcagcctgggacagtttatcatgaagcctgtggatgatcaatcctttattattattttttttttttgaaaaaagctcatttcatgctctgcaaaaggagagactcccatgaagccttttgaaagggatcatcatgcagctcaactttctgttggattccatgctaagcaagctaaccttatcctgcattgttagcactaggcacccagctgccacctctccatcctgctgcccttaggccacatgggagcagtccatgcatgacagcctctatcctacaaggcctatgagtatggattgggggggccaaaaggaaaaagctccatgtgcctctttgtctgcgtgggtcagaagagttgtgcacgcagattagcaggccaaggtctgagccacagcagcatttttatttcagattttgataactgtttatatgtgttgaaaaccaaaatgacatctttttaaagcttatccataaaaaaaaatagatgtcttttatagtggaaaaacacatggggaaaaaaatcatctattttgatgcagcatttgataatgataaaacacctcacacctcactctttatagtgcacaaaatgaatgaggtctgggctaggtagaaaaagggtcaatgctatttttgtttttagaatcattaccttttaccagcttttaaccatctgatatctatagtagacacactatcatagttaacatagtaagttcagcacttgtctcattttaatgtaaagatttgcttccattttcctacaggcagtctctctcttcctcacagtcccactgtgcaggtgctattgttactcttacgaatattttcagtaatgttattttcttctaagtgaaatttctagcctgcactttgatgtcatgtgttccctttgtctttcaaactccaaggttcccttgtggccctctcccttaccctgggaaggcctcttggagaccttacccctggctgtttggactttgtatactttaaataatttaactacccttaattacttaaaaaaaaaaaaaagctttatgattttcataacttattgctgattttaatggattgttaatttcagtcctgtagttttattttatgtttagatagggctgggcaaggaaaaagaaaataaagacaaccatatttagcagtgc

SEQ ID NO: 8334 - protein, 228 aa, Homo sapiens; identical to SEQ ID NO: 1202

SEQ ID NO: 8335 - DNA, 3276 bp, Homo sapiens
aaaccacgcgcgggctgcccgcggcacggcgggcgcggctggcgcggctggggcggcaggggcggcggagagcgcgccgagccgcggccgagctggcccgcccgcccgtcgcacatgttccggaacggcgcccggccgtagccgcctgcggcgcctcctgtcggcccgagaagggagtgcggagaggcgccggtcgccacccgcggtgcccatggagcgggtgaagatgatcaacgtgcagcgtctgctggaggctgccgagtttttggagcgccgggagcgagagtgtgaacatggctacgcctcttcattcccgtccatgccgagcccccgactgcagcattcaaagcccccacggaggttgagccgggcacagaaacacagcagcgggagcagcaacaccagcactgccaacagatctacacacaatgagctggaaaagaatcgacgagctcatctgcgcctttgtttagaacgcttaaaagttctgattccactaggaccagactgcacccggcacacaacacttggtttgctcaacaaagccaaagcacacatcaagaaacttgaagaagctgaaagaaaaagccagcaccagctcgagaatttggaacgagaacagagatttttaaagtggcgactggaacagctgcagggtcctcaggagatggaacgaatacgaatggacagcattggatcaactatttcttcagatcgttctgattcagagcgagaggagattgaagtggatgttgaaagcacagagttctcccatggagaagtggacaatataagtaccaccagcatcagtgacattgatgaccacagcagcctgccgagtattgggagtgacgagggttactccagtgccagtgtcaaactttcattcacttcatagaacccagcatgacataacagtgcagggcaaaatattcactgggccaattcaatacaaacaatctcttaaattgggttcatgatgcagtctcctctttaaaacaaaacaaaacaaaacaaaactatacttgaacaaaagggtcagaggacctgtatttaagcaaatacttagcaaaaagtggggcagagcctcccaaggagaacaaatattcagaatattcatattggaaaaatcacaatttttaatggcagcagaaaacttgtgtgaaattttcttgatttgagttgattgagaagaggacattggagatgccatcctctttctcttttctagtttgctcatactacattgagtagacacatttaaggatggggttatgaacccttcctgagctttatggtcctaaaagcaaaataaaaactattcgaatgaaaagacaagaaaatcaggtattaatcttggatagctaataatgagctattaaaactcagcctgggacagtttatcatgaagcctgtggatgatcaatcctttattattattttttttttttgaaaaaagctcatttcatgctctgcaaaaggagagactcccatgaagccttttgaaagggatcatcatgcagctcaactttctgttggattccatgctaagcaagctaaccttatcctgcattgttagcactaggcacccagctgccacctctccatcctgctgcccttaggccacatgggagcagtccatgcatgacagcctctatcctacaaggcctatgagtatggattgggggggccaaaaggaaaaagctccatgtgcctctttgtctgcgtgggtcagaagagttgtgcacgcagattagcaggccaaggtctgagccacagcagcatttttatttcagattttgataactgtttatatgtgttgaaaaccaaaatgacatctttttaaagcttatccataaaaaaaaatagatgtcttttatagtggaaaaacacatggggaaaaaaatcatctattttgatgcagcatttgataatgataaaacacctcacacctcactctttatagtgcacaaaatgaatgaggtctgggctaggtagaaaaagggtcaatgctatttttgtttttagaatcattaccttttaccagcttttaaccatctgatatctatagtagacacactatcatagttaacatagtaagttcagcacttgtctcattttaatgtaaagatttgcttccattttcctacaggcagtctctctcttcctcacagtcccactgtgcaggtgctattgttactcttacgaatattttcagtaatgttattttcttctaagtgaaatttctagcctgcactttgatgtcatgtgttccctttgtctttcaaactccaaggttcccttgtggccctctcccttaccctgggaaggcctcttggagaccttacccctggctgtttggactttgtatactttaaataatttaactacccttaattacttaaaaaaaaaaaaaagctttatgattttcataacttattgctgattttaatggattgttaatttcagtcctgtagttttattttatgtttagatagggctgggcaaggaaaaagaaaataaagacaaccatatttagcagtgcagttgagttgtgtgttaatgttagactatccctttgtgagtgacactttaacagcattcactgcttctatatatagtgtaccatcttggtcatacattacgcctcaacatatacttgtgctcttcctttgcctccagaagaagtttttccttgattgtgctatgtttcagtggaagaaattctttgaagtagatgtgagtgaaaaactgcatgcctttagaagcccagtatcagaacttgctacgtttcaggtgctagggacttaatgaaaaacaggacaaaacaattcctttttgtggcccaggtaaattatttctggtttcacttataattactaatggctgagtcaagatgttgtctctgtgtttgcttactcttgatcaagtgtgagacagtttgaagactgtgctaccatacaaagtgaatgaagccagtgactaagcttctgtttgttttgttattctcatggccttcgcttgcattatttgggccttcattcagatgaacttgaggtgccattttgttgcatatgtacaggattatgggctggaaagcatttgttataaacctatagtgcacattttaactgccccctaaattacccttccctgggtttgttttccttggggtggtgtagattgtatgagtaagaagtattaattttttaaaagacaaatcaactttgaagacacaaaagttaattggaagaaataaaaactgtgaacgaagaa

SEQ ID NO: 8336 - protein, 228 aa, Homo sapiens; identical to SEQ ID NO: 1202

SEQ ID NO: 8337 - DNA, 895 bp, Homo sapiens
ggcgcggctggggcggcaggggcggcggagagcgcgccgagccgcggccgagctggcccgcccgcccgtcgcacatgttccggaacggcgcccggccgtagccgcctgcggcgcctcctgtcggcccgagaagggagtgcggagaggcgccggtcgccacccgcggtgcccatggagcgggtgaagatgatcaacgtgcagcgtctgctggaggctgccgagtttttggagcgccgggagcgagagtgtgaacatggctacgcctcttcattcccgtccatgccgagcccccgactgcagcattcaaagcccccacggaggttgagccgggcacagaaacacagcagcgggagcagcaacaccagcactgccaacagacgagctcatctgcgcctttgtttagaacgcttaaaagttctgattccactaggaccagactgcacccggcacacaacacttggtttgctcaacaaagccaaagcacacatcaagaaacttgaagaagctgaaagaaaaagccagcaccagctcgagaatttggaacgagaacagagatttttaaagtggcgactggaacagctgcagggtcctcaggagatggaacgaatacgaatggacagcattggatcaactatttcttcagatcgttctgattcagagcgagaggagattgaagtggatgttgaaagcacagagttctcccatggagaagtggacaatataagtaccaccagcatcagtgacattgatgaccacagcagcctgccgagtattgggagtgacgagggttactccagtgccagtgtcaaactttcattcacttcatagaacccagcatgacataacagtgcagggcaaaatattcactgggccaattcaatacaaacaatctctt

SEQ ID NO: 8338 - protein, 218 aa, Homo sapiens
MERVKMINVQRLLEAAEFLERRERECEHGYASSFPSMPSPRLQHSKPPRRLSRAQKHSSGSSNTSTANRRAHLRLCLERLKVLIPLGPDCTRHTTLGLLNKAKAHIKKLEEAERKSQHQLENLEREQRFLKWRLEQLQGPQEMERIRMDSIGSTISSDRSDSEREEIEVDVESTEFSHGEVDNISTTSISDIDDHSSLPSIGSDEGYSSASVKLSFTS

SEQ ID NO: 8339 - DNA, 2475 bp, Homo sapiens
ggcgcggctggggcggcaggggcggcggagagcgcgccgagccgcggccgagctggcccgcccgcccgtcgcacatgttccggaacggcgcccggccgtagccgcctgcggcgcctcctgtcggcccgagaagggagtgcggagaggcgccggtcgccacccgcggtgcccatggagcgggtgaagatgatcaacgtgcagcgtctgctggaggctgccgagtttttggagcgccgggagcgagagtgtgaacatggctacgcctcttcattcccgtccatgccgagcccccgactgcagcattcaaagcccccacggaggttgagccgggcacagaaacacagcagcgggagcagcaacaccagcactgccaacagacgagctcatctgcgcctttgtttagaacgcttaaaagttctgattccactaggaccagactgcacccggcacacaacacttggtttgctcaacaaagccaaagcacacatcaagaaacttgaagaagctgaaagaaaaagccagcaccagctcgagaatttggaacgagaacagagatttttaaagtggcgactggaacagctgcagggtcctcaggagatggaacgaatacgaatggacagcattggatcaactatttcttcagatcgttctgattcagagcgagaggagattgaagtggatgttgaaagcacagagttctcccatggagaagtggacaatataagtaccaccagcatcagtgacattgatgaccacagcagcctgccgagtattgggagtgacgagggttactccagtgccagtgtcaaactttcattcacttcatagaacccagcatgacataacagtgcagggcaaaatattcactgggccaattcaatacaaacaatctcttaaattgggttcatgatgcagtctcctctttaaaacaaaacaaaacaaaacaaaactatacttgaacaaaagggtcagaggacctgtatttaagcaaatacttagcaaaaagtggggcagagcctcccaaggagaacaaatattcagaatattcatattggaaaaatcacaatttttaatggcagcagaaaacttgtgtgaaattttcttgatttgagttgattgagaagaggacattggagatgccatcctctttctcttttctagtttgctcatactacattgagtagacacatttaaggatggggttatgaacccttcctgagctttatggtcctaaaagcaaaataaaaactattcgaatgaaaagacaagaaaatcaggtattaatcttggatagctaataatgagctattaaaactcagcctgggacagtttatcatgaagcctgtggatgatcaatcctttattattattttttttttttgaaaaaagctcatttcatgctctgcaaaaggagagactcccatgaagccttttgaaagggatcatcatgcagctcaactttctgttggattccatgctaagcaagctaaccttatcctgcattgttagcactaggcacccagctgccacctctccatcctgctgcccttaggccacatgggagcagtccatgcatgacagcctctatcctacaaggcctatgagtatggattgggggggccaaaaggaaaaagctccatgtgcctctttgtctgcgtgggtcagaagagttgtgcacgcagattagcaggccaaggtctgagccacagcagcatttttatttcagattttgataactgtttatatgtgttgaaaaccaaaatgacatctttttaaagcttatccataaaaaaaaatagatgtcttttatagtggaaaaacacatggggaaaaaaatcatctattttgatgcagcatttgataatgataaaacacctcacacctcactctttatagtgcacaaaatgaatgaggtctgggctaggtagaaaaagggtcaatgctatttttgtttttagaatcattaccttttaccagcttttaaccatctgatatctatagtagacacactatcatagttaacatagtaagttcagcacttgtctcattttaatgtaaagatttgcttccattttcctacaggcagtctctctcttcctcacagtcccactgtgcaggtgctattgttactcttacgaatattttcagtaatgttattttcttctaagtgaaatttctagcctgcactttgatgtcatgtgttccctttgtctttcaaactccaaggttcccttgtggccctctcccttaccctgggaaggcctcttggagaccttacccctggctgtttggactttgtatactttaaataatttaactacccttaattacttaaaaaaaaaaaaaagctttatgattttcataacttattgctgattttaatggattgttaatttcagtcctgtagttttattttatgtttagatagggctgggcaaggaaaaagaaaataaagacaaccatatttagcagtgc

SEQ ID NO: 8340 - protein, 218 aa, Homo sapiens; identical to SEQ ID NO: 8338

SEQ ID NO: 8341 - DNA, 3204 bp, Homo sapiens
ggcgcggctggggcggcaggggcggcggagagcgcgccgagccgcggccgagctggcccgcccgcccgtcgcacatgttccggaacggcgcccggccgtagccgcctgcggcgcctcctgtcggcccgagaagggagtgcggagaggcgccggtcgccacccgcggtgcccatggagcgggtgaagatgatcaacgtgcagcgtctgctggaggctgccgagtttttggagcgccgggagcgagagtgtgaacatggctacgcctcttcattcccgtccatgccgagcccccgactgcagcattcaaagcccccacggaggttgagccgggcacagaaacacagcagcgggagcagcaacaccagcactgccaacagacgagctcatctgcgcctttgtttagaacgcttaaaagttctgattccactaggaccagactgcacccggcacacaacacttggtttgctcaacaaagccaaagcacacatcaagaaacttgaagaagctgaaagaaaaagccagcaccagctcgagaatttggaacgagaacagagatttttaaagtggcgactggaacagctgcagggtcctcaggagatggaacgaatacgaatggacagcattggatcaactatttcttcagatcgttctgattcagagcgagaggagattgaagtggatgttgaaagcacagagttctcccatggagaagtggacaatataagtaccaccagcatcagtgacattgatgaccacagcagcctgccgagtattgggagtgacgagggttactccagtgccagtgtcaaactttcattcacttcatagaacccagcatgacataacagtgcagggcaaaatattcactgggccaattcaatacaaacaatctcttaaattgggttcatgatgcagtctcctctttaaaacaaaacaaaacaaaacaaaactatacttgaacaaaagggtcagaggacctgtatttaagcaaatacttagcaaaaagtggggcagagcctcccaaggagaacaaatattcagaatattcatattggaaaaatcacaatttttaatggcagcagaaaacttgtgtgaaattttcttgatttgagttgattgagaagaggacattggagatgccatcctctttctcttttctagtttgctcatactacattgagtagacacatttaaggatggggttatgaacccttcctgagctttatggtcctaaaagcaaaataaaaactattcgaatgaaaagacaagaaaatcaggtattaatcttggatagctaataatgagctattaaaactcagcctgggacagtttatcatgaagcctgtggatgatcaatcctttattattattttttttttttgaaaaaagctcatttcatgctctgcaaaaggagagactcccatgaagccttttgaaagggatcatcatgcagctcaactttctgttggattccatgctaagcaagctaaccttatcctgcattgttagcactaggcacccagctgccacctctccatcctgctgcccttaggccacatgggagcagtccatgcatgacagcctctatcctacaaggcctatgagtatggattgggggggccaaaaggaaaaagctccatgtgcctctttgtctgcgtgggtcagaagagttgtgcacgcagattagcaggccaaggtctgagccacagcagcatttttatttcagattttgataactgtttatatgtgttgaaaaccaaaatgacatctttttaaagcttatccataaaaaaaaatagatgtcttttatagtggaaaaacacatggggaaaaaaatcatctattttgatgcagcatttgataatgataaaacacctcacacctcactctttatagtgcacaaaatgaatgaggtctgggctaggtagaaaaagggtcaatgctatttttgtttttagaatcattaccttttaccagcttttaaccatctgatatctatagtagacacactatcatagttaacatagtaagttcagcacttgtctcattttaatgtaaagatttgcttccattttcctacaggcagtctctctcttcctcacagtcccactgtgcaggtgctattgttactcttacgaatattttcagtaatgttattttcttctaagtgaaatttctagcctgcactttgatgtcatgtgttccctttgtctttcaaactccaaggttcccttgtggccctctcccttaccctgggaaggcctcttggagaccttacccctggctgtttggactttgtatactttaaataatttaactacccttaattacttaaaaaaaaaaaaaagctttatgattttcataacttattgctgattttaatggattgttaatttcagtcctgtagttttattttatgtttagatagggctgggcaaggaaaaagaaaataaagacaaccatatttagcagtgcagttgagttgtgtgttaatgttagactatccctttgtgagtgacactttaacagcattcactgcttctatatatagtgtaccatcttggtcatacattacgcctcaacatatacttgtgctcttcctttgcctccagaagaagtttttccttgattgtgctatgtttcagtggaagaaattctttgaagtagatgtgagtgaaaaactgcatgcctttagaagcccagtatcagaacttgctacgtttcaggtgctagggacttaatgaaaaacaggacaaaacaattcctttttgtggcccaggtaaattatttctggtttcacttataattactaatggctgagtcaagatgttgtctctgtgtttgcttactcttgatcaagtgtgagacagtttgaagactgtgctaccatacaaagtgaatgaagccagtgactaagcttctgtttgttttgttattctcatggccttcgcttgcattatttgggccttcattcagatgaacttgaggtgccattttgttgcatatgtacaggattatgggctggaaagcatttgttataaacctatagtgcacattttaactgccccctaaattacccttccctgggtttgttttccttggggtggtgtagattgtatgagtaagaagtattaattttttaaaagacaaatcaactttgaagacacaaaagttaattggaagaaataaaaactgtgaacgaag

SEQ ID NO: 8342 - protein, 218 aa, Homo sapiens; identical to SEQ ID NO: 8338

SEQ ID NO: 8343 - DNA, 721 bp, Homo sapiens
gagggaaggggagcgcgcgtgaggggaggggcgtgcacatagtgtgaacatggctacgcctcttcattcccgtccatgccgagcccccgactgcagcattcaaagcccccacggaggttgagccgggcacagaaacacagcagcgggagcagcaacaccagcactgccaacagatctacacacaatgagctggaaaagaatcgacgagctcatctgcgcctttgtttagaacgcttaaaagttctgattccactaggaccagactgcacccggcacacaacacttggtttgctcaacaaagccaaagcacacatcaagaaacttgaagaagctgaaagaaaaagccagcaccagctcgagaatttggaacgagaacagagatttttaaagtggcgactggaacagctgcagggtcctcaggagatggaacgaatacgaatggacagcattggatcaactatttcttcagatcgttctgattcagagcgagaggagattgaagtggatgttgaaagcacagagttctcccatggagaagtggacaatataagtaccaccagcatcagtgacattgatgaccacagcagcctgccgagtattgggagtgacgagggttactccagtgccagtgtcaaactttcattcacttcatagaacccagcatgacataacagtgcagggcaaaatattcactgggccaattcaatacaaacaatctctt

SEQ ID NO: 8344 - protein, 192 aa, Homo sapiens
MPSPRLQHSKPPRRLSRAQKHSSGSSNTSTANRSTHNELEKNRRAHLRLCLERLKVLIPLGPDCTRHTTLGLLNKAKAHIKKLEEAERKSQHQLENLEREQRFLKWRLEQLQGPQEMERIRMDSIGSTISSDRSDSEREEIEVDVESTEFSHGEVDNISTTSISDIDDHSSLPSIGSDEGYSSASVKLSFTS

SEQ ID NO: 8345 - DNA, 2301 bp, Homo sapiens
gagggaaggggagcgcgcgtgaggggaggggcgtgcacatagtgtgaacatggctacgcctcttcattcccgtccatgccgagcccccgactgcagcattcaaagcccccacggaggttgagccgggcacagaaacacagcagcgggagcagcaacaccagcactgccaacagatctacacacaatgagctggaaaagaatcgacgagctcatctgcgcctttgtttagaacgcttaaaagttctgattccactaggaccagactgcacccggcacacaacacttggtttgctcaacaaagccaaagcacacatcaagaaacttgaagaagctgaaagaaaaagccagcaccagctcgagaatttggaacgagaacagagatttttaaagtggcgactggaacagctgcagggtcctcaggagatggaacgaatacgaatggacagcattggatcaactatttcttcagatcgttctgattcagagcgagaggagattgaagtggatgttgaaagcacagagttctcccatggagaagtggacaatataagtaccaccagcatcagtgacattgatgaccacagcagcctgccgagtattgggagtgacgagggttactccagtgccagtgtcaaactttcattcacttcatagaacccagcatgacataacagtgcagggcaaaatattcactgggccaattcaatacaaacaatctcttaaattgggttcatgatgcagtctcctctttaaaacaaaacaaaacaaaacaaaactatacttgaacaaaagggtcagaggacctgtatttaagcaaatacttagcaaaaagtggggcagagcctcccaaggagaacaaatattcagaatattcatattggaaaaatcacaatttttaatggcagcagaaaacttgtgtgaaattttcttgatttgagttgattgagaagaggacattggagatgccatcctctttctcttttctagtttgctcatactacattgagtagacacatttaaggatggggttatgaacccttcctgagctttatggtcctaaaagcaaaataaaaactattcgaatgaaaagacaagaaaatcaggtattaatcttggatagctaataatgagctattaaaactcagcctgggacagtttatcatgaagcctgtggatgatcaatcctttattattattttttttttttgaaaaaagctcatttcatgctctgcaaaaggagagactcccatgaagccttttgaaagggatcatcatgcagctcaactttctgttggattccatgctaagcaagctaaccttatcctgcattgttagcactaggcacccagctgccacctctccatcctgctgcccttaggccacatgggagcagtccatgcatgacagcctctatcctacaaggcctatgagtatggattgggggggccaaaaggaaaaagctccatgtgcctctttgtctgcgtgggtcagaagagttgtgcacgcagattagcaggccaaggtctgagccacagcagcatttttatttcagattttgataactgtttatatgtgttgaaaaccaaaatgacatctttttaaagcttatccataaaaaaaaatagatgtcttttatagtggaaaaacacatggggaaaaaaatcatctattttgatgcagcatttgataatgataaaacacctcacacctcactctttatagtgcacaaaatgaatgaggtctgggctaggtagaaaaagggtcaatgctatttttgtttttagaatcattaccttttaccagcttttaaccatctgatatctatagtagacacactatcatagttaacatagtaagttcagcacttgtctcattttaatgtaaagatttgcttccattttcctacaggcagtctctctcttcctcacagtcccactgtgcaggtgctattgttactcttacgaatattttcagtaatgttattttcttctaagtgaaatttctagcctgcactttgatgtcatgtgttccctttgtctttcaaactccaaggttcccttgtggccctctcccttaccctgggaaggcctcttggagaccttacccctggctgtttggactttgtatactttaaataatttaactacccttaattacttaaaaaaaaaaaaaagctttatgattttcataacttattgctgattttaatggattgttaatttcagtcctgtagttttattttatgtttagatagggctgggcaaggaaaaagaaaataaagacaaccatatttagcagtgc

SEQ ID NO: 8346 - protein, 192 aa, Homo sapiens; identical to SEQ ID NO: 8344

SEQ ID NO: 8347 - DNA, 3030 bp, Homo sapiens
gagggaaggggagcgcgcgtgaggggaggggcgtgcacatagtgtgaacatggctacgcctcttcattcccgtccatgccgagcccccgactgcagcattcaaagcccccacggaggttgagccgggcacagaaacacagcagcgggagcagcaacaccagcactgccaacagatctacacacaatgagctggaaaagaatcgacgagctcatctgcgcctttgtttagaacgcttaaaagttctgattccactaggaccagactgcacccggcacacaacacttggtttgctcaacaaagccaaagcacacatcaagaaacttgaagaagctgaaagaaaaagccagcaccagctcgagaatttggaacgagaacagagatttttaaagtggcgactggaacagctgcagggtcctcaggagatggaacgaatacgaatggacagcattggatcaactatttcttcagatcgttctgattcagagcgagaggagattgaagtggatgttgaaagcacagagttctcccatggagaagtggacaatataagtaccaccagcatcagtgacattgatgaccacagcagcctgccgagtattgggagtgacgagggttactccagtgccagtgtcaaactttcattcacttcatagaacccagcatgacataacagtgcagggcaaaatattcactgggccaattcaatacaaacaatctcttaaattgggttcatgatgcagtctcctctttaaaacaaaacaaaacaaaacaaaactatacttgaacaaaagggtcagaggacctgtatttaagcaaatacttagcaaaaagtggggcagagcctcccaaggagaacaaatattcagaatattcatattggaaaaatcacaatttttaatggcagcagaaaacttgtgtgaaattttcttgatttgagttgattgagaagaggacattggagatgccatcctctttctcttttctagtttgctcatactacattgagtagacacatttaaggatggggttatgaacccttcctgagctttatggtcctaaaagcaaaataaaaactattcgaatgaaaagacaagaaaatcaggtattaatcttggatagctaataatgagctattaaaactcagcctgggacagtttatcatgaagcctgtggatgatcaatcctttattattattttttttttttgaaaaaagctcatttcatgctctgcaaaaggagagactcccatgaagccttttgaaagggatcatcatgcagctcaactttctgttggattccatgctaagcaagctaaccttatcctgcattgttagcactaggcacccagctgccacctctccatcctgctgcccttaggccacatgggagcagtccatgcatgacagcctctatcctacaaggcctatgagtatggattgggggggccaaaaggaaaaagctccatgtgcctctttgtctgcgtgggtcagaagagttgtgcacgcagattagcaggccaaggtctgagccacagcagcatttttatttcagattttgataactgtttatatgtgttgaaaaccaaaatgacatctttttaaagcttatccataaaaaaaaatagatgtcttttatagtggaaaaacacatggggaaaaaaatcatctattttgatgcagcatttgataatgataaaacacctcacacctcactctttatagtgcacaaaatgaatgaggtctgggctaggtagaaaaagggtcaatgctatttttgtttttagaatcattaccttttaccagcttttaaccatctgatatctatagtagacacactatcatagttaacatagtaagttcagcacttgtctcattttaatgtaaagatttgcttccattttcctacaggcagtctctctcttcctcacagtcccactgtgcaggtgctattgttactcttacgaatattttcagtaatgttattttcttctaagtgaaatttctagcctgcactttgatgtcatgtgttccctttgtctttcaaactccaaggttcccttgtggccctctcccttaccctgggaaggcctcttggagaccttacccctggctgtttggactttgtatactttaaataatttaactacccttaattacttaaaaaaaaaaaaaagctttatgattttcataacttattgctgattttaatggattgttaatttcagtcctgtagttttattttatgtttagatagggctgggcaaggaaaaagaaaataaagacaaccatatttagcagtgcagttgagttgtgtgttaatgttagactatccctttgtgagtgacactttaacagcattcactgcttctatatatagtgtaccatcttggtcatacattacgcctcaacatatacttgtgctcttcctttgcctccagaagaagtttttccttgattgtgctatgtttcagtggaagaaattctttgaagtagatgtgagtgaaaaactgcatgcctttagaagcccagtatcagaacttgctacgtttcaggtgctagggacttaatgaaaaacaggacaaaacaattcctttttgtggcccaggtaaattatttctggtttcacttataattactaatggctgagtcaagatgttgtctctgtgtttgcttactcttgatcaagtgtgagacagtttgaagactgtgctaccatacaaagtgaatgaagccagtgactaagcttctgtttgttttgttattctcatggccttcgcttgcattatttgggccttcattcagatgaacttgaggtgccattttgttgcatatgtacaggattatgggctggaaagcatttgttataaacctatagtgcacattttaactgccccctaaattacccttccctgggtttgttttccttggggtggtgtagattgtatgagtaagaagtattaattttttaaaagacaaatcaactttgaagacacaaaagttaattggaagaaataaaaactgtgaacgaag

SEQ ID NO: 8348 - protein, 192 aa, Homo sapiens; identical to SEQ ID NO: 8344

SEQ ID NO: 8349 - DNA, 724 bp, Homo sapiens
gtgctgagatcgtgagtggaggcgtgtgtgagaggtcgcgcagagtgtgaacatggctacgcctcttcattcccgtccatgccgagcccccgactgcagcattcaaagcccccacggaggttgagccgggcacagaaacacagcagcgggagcagcaacaccagcactgccaacagatctacacacaatgagctggaaaagaatcgacgagctcatctgcgcctttgtttagaacgcttaaaagttctgattccactaggaccagactgcacccggcacacaacacttggtttgctcaacaaagccaaagcacacatcaagaaacttgaagaagctgaaagaaaaagccagcaccagctcgagaatttggaacgagaacagagatttttaaagtggcgactggaacagctgcagggtcctcaggagatggaacgaatacgaatggacagcattggatcaactatttcttcagatcgttctgattcagagcgagaggagattgaagtggatgttgaaagcacagagttctcccatggagaagtggacaatataagtaccaccagcatcagtgacattgatgaccacagcagcctgccgagtattgggagtgacgagggttactccagtgccagtgtcaaactttcattcacttcatagaacccagcatgacataacagtgcagggcaaaatattcactgggccaattcaatacaaacaatctctt

SEQ ID NO: 8350 - protein, 192 aa, Homo sapiens; identical to SEQ ID NO: 8344

SEQ ID NO: 8351 - DNA, 2304 bp, Homo sapiens
gtgctgagatcgtgagtggaggcgtgtgtgagaggtcgcgcagagtgtgaacatggctacgcctcttcattcccgtccatgccgagcccccgactgcagcattcaaagcccccacggaggttgagccgggcacagaaacacagcagcgggagcagcaacaccagcactgccaacagatctacacacaatgagctggaaaagaatcgacgagctcatctgcgcctttgtttagaacgcttaaaagttctgattccactaggaccagactgcacccggcacacaacacttggtttgctcaacaaagccaaagcacacatcaagaaacttgaagaagctgaaagaaaaagccagcaccagctcgagaatttggaacgagaacagagatttttaaagtggcgactggaacagctgcagggtcctcaggagatggaacgaatacgaatggacagcattggatcaactatttcttcagatcgttctgattcagagcgagaggagattgaagtggatgttgaaagcacagagttctcccatggagaagtggacaatataagtaccaccagcatcagtgacattgatgaccacagcagcctgccgagtattgggagtgacgagggttactccagtgccagtgtcaaactttcattcacttcatagaacccagcatgacataacagtgcagggcaaaatattcactgggccaattcaatacaaacaatctcttaaattgggttcatgatgcagtctcctctttaaaacaaaacaaaacaaaacaaaactatacttgaacaaaagggtcagaggacctgtatttaagcaaatacttagcaaaaagtggggcagagcctcccaaggagaacaaatattcagaatattcatattggaaaaatcacaatttttaatggcagcagaaaacttgtgtgaaattttcttgatttgagttgattgagaagaggacattggagatgccatcctctttctcttttctagtttgctcatactacattgagtagacacatttaaggatggggttatgaacccttcctgagctttatggtcctaaaagcaaaataaaaactattcgaatgaaaagacaagaaaatcaggtattaatcttggatagctaataatgagctattaaaactcagcctgggacagtttatcatgaagcctgtggatgatcaatcctttattattattttttttttttgaaaaaagctcatttcatgctctgcaaaaggagagactcccatgaagccttttgaaagggatcatcatgcagctcaactttctgttggattccatgctaagcaagctaaccttatcctgcattgttagcactaggcacccagctgccacctctccatcctgctgcccttaggccacatgggagcagtccatgcatgacagcctctatcctacaaggcctatgagtatggattgggggggccaaaaggaaaaagctccatgtgcctctttgtctgcgtgggtcagaagagttgtgcacgcagattagcaggccaaggtctgagccacagcagcatttttatttcagattttgataactgtttatatgtgttgaaaaccaaaatgacatctttttaaagcttatccataaaaaaaaatagatgtcttttatagtggaaaaacacatggggaaaaaaatcatctattttgatgcagcatttgataatgataaaacacctcacacctcactctttatagtgcacaaaatgaatgaggtctgggctaggtagaaaaagggtcaatgctatttttgtttttagaatcattaccttttaccagcttttaaccatctgatatctatagtagacacactatcatagttaacatagtaagttcagcacttgtctcattttaatgtaaagatttgcttccattttcctacaggcagtctctctcttcctcacagtcccactgtgcaggtgctattgttactcttacgaatattttcagtaatgttattttcttctaagtgaaatttctagcctgcactttgatgtcatgtgttccctttgtctttcaaactccaaggttcccttgtggccctctcccttaccctgggaaggcctcttggagaccttacccctggctgtttggactttgtatactttaaataatttaactacccttaattacttaaaaaaaaaaaaaagctttatgattttcataacttattgctgattttaatggattgttaatttcagtcctgtagttttattttatgtttagatagggctgggcaaggaaaaagaaaataaagacaaccatatttagcagtgc

SEQ ID NO: 8352 - protein, 192 aa, Homo sapiens; identical to SEQ ID NO: 8344

SEQ ID NO: 8353 - DNA, 3033 bp, Homo sapiens
gtgctgagatcgtgagtggaggcgtgtgtgagaggtcgcgcagagtgtgaacatggctacgcctcttcattcccgtccatgccgagcccccgactgcagcattcaaagcccccacggaggttgagccgggcacagaaacacagcagcgggagcagcaacaccagcactgccaacagatctacacacaatgagctggaaaagaatcgacgagctcatctgcgcctttgtttagaacgcttaaaagttctgattccactaggaccagactgcacccggcacacaacacttggtttgctcaacaaagccaaagcacacatcaagaaacttgaagaagctgaaagaaaaagccagcaccagctcgagaatttggaacgagaacagagatttttaaagtggcgactggaacagctgcagggtcctcaggagatggaacgaatacgaatggacagcattggatcaactatttcttcagatcgttctgattcagagcgagaggagattgaagtggatgttgaaagcacagagttctcccatggagaagtggacaatataagtaccaccagcatcagtgacattgatgaccacagcagcctgccgagtattgggagtgacgagggttactccagtgccagtgtcaaactttcattcacttcatagaacccagcatgacataacagtgcagggcaaaatattcactgggccaattcaatacaaacaatctcttaaattgggttcatgatgcagtctcctctttaaaacaaaacaaaacaaaacaaaactatacttgaacaaaagggtcagaggacctgtatttaagcaaatacttagcaaaaagtggggcagagcctcccaaggagaacaaatattcagaatattcatattggaaaaatcacaatttttaatggcagcagaaaacttgtgtgaaattttcttgatttgagttgattgagaagaggacattggagatgccatcctctttctcttttctagtttgctcatactacattgagtagacacatttaaggatggggttatgaacccttcctgagctttatggtcctaaaagcaaaataaaaactattcgaatgaaaagacaagaaaatcaggtattaatcttggatagctaataatgagctattaaaactcagcctgggacagtttatcatgaagcctgtggatgatcaatcctttattattattttttttttttgaaaaaagctcatttcatgctctgcaaaaggagagactcccatgaagccttttgaaagggatcatcatgcagctcaactttctgttggattccatgctaagcaagctaaccttatcctgcattgttagcactaggcacccagctgccacctctccatcctgctgcccttaggccacatgggagcagtccatgcatgacagcctctatcctacaaggcctatgagtatggattgggggggccaaaaggaaaaagctccatgtgcctctttgtctgcgtgggtcagaagagttgtgcacgcagattagcaggccaaggtctgagccacagcagcatttttatttcagattttgataactgtttatatgtgttgaaaaccaaaatgacatctttttaaagcttatccataaaaaaaaatagatgtcttttatagtggaaaaacacatggggaaaaaaatcatctattttgatgcagcatttgataatgataaaacacctcacacctcactctttatagtgcacaaaatgaatgaggtctgggctaggtagaaaaagggtcaatgctatttttgtttttagaatcattaccttttaccagcttttaaccatctgatatctatagtagacacactatcatagttaacatagtaagttcagcacttgtctcattttaatgtaaagatttgcttccattttcctacaggcagtctctctcttcctcacagtcccactgtgcaggtgctattgttactcttacgaatattttcagtaatgttattttcttctaagtgaaatttctagcctgcactttgatgtcatgtgttccctttgtctttcaaactccaaggttcccttgtggccctctcccttaccctgggaaggcctcttggagaccttacccctggctgtttggactttgtatactttaaataatttaactacccttaattacttaaaaaaaaaaaaaagctttatgattttcataacttattgctgattttaatggattgttaatttcagtcctgtagttttattttatgtttagatagggctgggcaaggaaaaagaaaataaagacaaccatatttagcagtgcagttgagttgtgtgttaatgttagactatccctttgtgagtgacactttaacagcattcactgcttctatatatagtgtaccatcttggtcatacattacgcctcaacatatacttgtgctcttcctttgcctccagaagaagtttttccttgattgtgctatgtttcagtggaagaaattctttgaagtagatgtgagtgaaaaactgcatgcctttagaagcccagtatcagaacttgctacgtttcaggtgctagggacttaatgaaaaacaggacaaaacaattcctttttgtggcccaggtaaattatttctggtttcacttataattactaatggctgagtcaagatgttgtctctgtgtttgcttactcttgatcaagtgtgagacagtttgaagactgtgctaccatacaaagtgaatgaagccagtgactaagcttctgtttgttttgttattctcatggccttcgcttgcattatttgggccttcattcagatgaacttgaggtgccattttgttgcatatgtacaggattatgggctggaaagcatttgttataaacctatagtgcacattttaactgccccctaaattacccttccctgggtttgttttccttggggtggtgtagattgtatgagtaagaagtattaattttttaaaagacaaatcaactttgaagacacaaaagttaattggaagaaataaaaactgtgaacgaag

SEQ ID NO: 8354 - protein, 192 aa, Homo sapiens; identical to SEQ ID NO: 8344

SEQ ID NO: 8355 - DNA, 688 bp, Homo sapiens
agatcgtgagtggaggcgtgtgtgagaggtcgcgcagagtgtgaacatggctacgcctcttcattcccgtccatgccgagcccccgactgcagcattcaaagcccccacggaggttgagccgggcacagaaacacagcagcgggagcagcaacaccagcactgccaacagacgagctcatctgcgcctttgtttagaacgcttaaaagttctgattccactaggaccagactgcacccggcacacaacacttggtttgctcaacaaagccaaagcacacatcaagaaacttgaagaagctgaaagaaaaagccagcaccagctcgagaatttggaacgagaacagagatttttaaagtggcgactggaacagctgcagggtcctcaggagatggaacgaatacgaatggacagcattggatcaactatttcttcagatcgttctgattcagagcgagaggagattgaagtggatgttgaaagcacagagttctcccatggagaagtggacaatataagtaccaccagcatcagtgacattgatgaccacagcagcctgccgagtattgggagtgacgagggttactccagtgccagtgtcaaactttcattcacttcatagaacccagcatgacataacagtgcagggcaaaatattcactgggccaattcaatacaaacaatctctt

SEQ ID NO: 8356 - protein, 182 aa, Homo sapiens; identical to SEQ ID NO: 1200

SEQ ID NO: 8357 - DNA, 2268 bp, Homo sapiens
agatcgtgagtggaggcgtgtgtgagaggtcgcgcagagtgtgaacatggctacgcctcttcattcccgtccatgccgagcccccgactgcagcattcaaagcccccacggaggttgagccgggcacagaaacacagcagcgggagcagcaacaccagcactgccaacagacgagctcatctgcgcctttgtttagaacgcttaaaagttctgattccactaggaccagactgcacccggcacacaacacttggtttgctcaacaaagccaaagcacacatcaagaaacttgaagaagctgaaagaaaaagccagcaccagctcgagaatttggaacgagaacagagatttttaaagtggcgactggaacagctgcagggtcctcaggagatggaacgaatacgaatggacagcattggatcaactatttcttcagatcgttctgattcagagcgagaggagattgaagtggatgttgaaagcacagagttctcccatggagaagtggacaatataagtaccaccagcatcagtgacattgatgaccacagcagcctgccgagtattgggagtgacgagggttactccagtgccagtgtcaaactttcattcacttcatagaacccagcatgacataacagtgcagggcaaaatattcactgggccaattcaatacaaacaatctcttaaattgggttcatgatgcagtctcctctttaaaacaaaacaaaacaaaacaaaactatacttgaacaaaagggtcagaggacctgtatttaagcaaatacttagcaaaaagtggggcagagcctcccaaggagaacaaatattcagaatattcatattggaaaaatcacaatttttaatggcagcagaaaacttgtgtgaaattttcttgatttgagttgattgagaagaggacattggagatgccatcctctttctcttttctagtttgctcatactacattgagtagacacatttaaggatggggttatgaacccttcctgagctttatggtcctaaaagcaaaataaaaactattcgaatgaaaagacaagaaaatcaggtattaatcttggatagctaataatgagctattaaaactcagcctgggacagtttatcatgaagcctgtggatgatcaatcctttattattattttttttttttgaaaaaagctcatttcatgctctgcaaaaggagagactcccatgaagccttttgaaagggatcatcatgcagctcaactttctgttggattccatgctaagcaagctaaccttatcctgcattgttagcactaggcacccagctgccacctctccatcctgctgcccttaggccacatgggagcagtccatgcatgacagcctctatcctacaaggcctatgagtatggattgggggggccaaaaggaaaaagctccatgtgcctctttgtctgcgtgggtcagaagagttgtgcacgcagattagcaggccaaggtctgagccacagcagcatttttatttcagattttgataactgtttatatgtgttgaaaaccaaaatgacatctttttaaagcttatccataaaaaaaaatagatgtcttttatagtggaaaaacacatggggaaaaaaatcatctattttgatgcagcatttgataatgataaaacacctcacacctcactctttatagtgcacaaaatgaatgaggtctgggctaggtagaaaaagggtcaatgctatttttgtttttagaatcattaccttttaccagcttttaaccatctgatatctatagtagacacactatcatagttaacatagtaagttcagcacttgtctcattttaatgtaaagatttgcttccattttcctacaggcagtctctctcttcctcacagtcccactgtgcaggtgctattgttactcttacgaatattttcagtaatgttattttcttctaagtgaaatttctagcctgcactttgatgtcatgtgttccctttgtctttcaaactccaaggttcccttgtggccctctcccttaccctgggaaggcctcttggagaccttacccctggctgtttggactttgtatactttaaataatttaactacccttaattacttaaaaaaaaaaaaaagctttatgattttcataacttattgctgattttaatggattgttaatttcagtcctgtagttttattttatgtttagatagggctgggcaaggaaaaagaaaataaagacaaccatatttagcagtgc

SEQ ID NO: 8358 - protein, 182 aa, Homo sapiens; identical to SEQ ID NO: 1200

SEQ ID NO: 8359 - DNA, 2997 bp, Homo sapiens
agatcgtgagtggaggcgtgtgtgagaggtcgcgcagagtgtgaacatggctacgcctcttcattcccgtccatgccgagcccccgactgcagcattcaaagcccccacggaggttgagccgggcacagaaacacagcagcgggagcagcaacaccagcactgccaacagacgagctcatctgcgcctttgtttagaacgcttaaaagttctgattccactaggaccagactgcacccggcacacaacacttggtttgctcaacaaagccaaagcacacatcaagaaacttgaagaagctgaaagaaaaagccagcaccagctcgagaatttggaacgagaacagagatttttaaagtggcgactggaacagctgcagggtcctcaggagatggaacgaatacgaatggacagcattggatcaactatttcttcagatcgttctgattcagagcgagaggagattgaagtggatgttgaaagcacagagttctcccatggagaagtggacaatataagtaccaccagcatcagtgacattgatgaccacagcagcctgccgagtattgggagtgacgagggttactccagtgccagtgtcaaactttcattcacttcatagaacccagcatgacataacagtgcagggcaaaatattcactgggccaattcaatacaaacaatctcttaaattgggttcatgatgcagtctcctctttaaaacaaaacaaaacaaaacaaaactatacttgaacaaaagggtcagaggacctgtatttaagcaaatacttagcaaaaagtggggcagagcctcccaaggagaacaaatattcagaatattcatattggaaaaatcacaatttttaatggcagcagaaaacttgtgtgaaattttcttgatttgagttgattgagaagaggacattggagatgccatcctctttctcttttctagtttgctcatactacattgagtagacacatttaaggatggggttatgaacccttcctgagctttatggtcctaaaagcaaaataaaaactattcgaatgaaaagacaagaaaatcaggtattaatcttggatagctaataatgagctattaaaactcagcctgggacagtttatcatgaagcctgtggatgatcaatcctttattattattttttttttttgaaaaaagctcatttcatgctctgcaaaaggagagactcccatgaagccttttgaaagggatcatcatgcagctcaactttctgttggattccatgctaagcaagctaaccttatcctgcattgttagcactaggcacccagctgccacctctccatcctgctgcccttaggccacatgggagcagtccatgcatgacagcctctatcctacaaggcctatgagtatggattgggggggccaaaaggaaaaagctccatgtgcctctttgtctgcgtgggtcagaagagttgtgcacgcagattagcaggccaaggtctgagccacagcagcatttttatttcagattttgataactgtttatatgtgttgaaaaccaaaatgacatctttttaaagcttatccataaaaaaaaatagatgtcttttatagtggaaaaacacatggggaaaaaaatcatctattttgatgcagcatttgataatgataaaacacctcacacctcactctttatagtgcacaaaatgaatgaggtctgggctaggtagaaaaagggtcaatgctatttttgtttttagaatcattaccttttaccagcttttaaccatctgatatctatagtagacacactatcatagttaacatagtaagttcagcacttgtctcattttaatgtaaagatttgcttccattttcctacaggcagtctctctcttcctcacagtcccactgtgcaggtgctattgttactcttacgaatattttcagtaatgttattttcttctaagtgaaatttctagcctgcactttgatgtcatgtgttccctttgtctttcaaactccaaggttcccttgtggccctctcccttaccctgggaaggcctcttggagaccttacccctggctgtttggactttgtatactttaaataatttaactacccttaattacttaaaaaaaaaaaaaagctttatgattttcataacttattgctgattttaatggattgttaatttcagtcctgtagttttattttatgtttagatagggctgggcaaggaaaaagaaaataaagacaaccatatttagcagtgcagttgagttgtgtgttaatgttagactatccctttgtgagtgacactttaacagcattcactgcttctatatatagtgtaccatcttggtcatacattacgcctcaacatatacttgtgctcttcctttgcctccagaagaagtttttccttgattgtgctatgtttcagtggaagaaattctttgaagtagatgtgagtgaaaaactgcatgcctttagaagcccagtatcagaacttgctacgtttcaggtgctagggacttaatgaaaaacaggacaaaacaattcctttttgtggcccaggtaaattatttctggtttcacttataattactaatggctgagtcaagatgttgtctctgtgtttgcttactcttgatcaagtgtgagacagtttgaagactgtgctaccatacaaagtgaatgaagccagtgactaagcttctgtttgttttgttattctcatggccttcgcttgcattatttgggccttcattcagatgaacttgaggtgccattttgttgcatatgtacaggattatgggctggaaagcatttgttataaacctatagtgcacattttaactgccccctaaattacccttccctgggtttgttttccttggggtggtgtagattgtatgagtaagaagtattaattttttaaaagacaaatcaactttgaagacacaaaagttaattggaagaaataaaaactgtgaacgaag

SEQ ID NO: 8360 - protein, 182 aa, Homo sapiens; identical to SEQ ID NO: 1200

SEQ ID NO: 8361 - DNA, 2906 bp, Homo sapiens
agcgggggaaaaccggtggagaggggcctttgaatacctgcggggtgatgagatggggtccctttagcggtggcagcccaaggggctgtagagatggcgcagaaagaccaggaactcggagactgtggtgtcgagagagaaaatgtctttctaagacttgttcgaagtacacaaaaatattgggcttaaagagactctttagaacagagagagttgaaagtaaaggggaatttttgaggcaagcgaagtcaatgaggtgaatggtaactggtcacaaaatttttgttctaaagcatctgaaatctcaagttcttgggagagaaggattttggaaaggggggataaactctttggtttagaggaggtatcaaaacaccttccagctggtggggtgtcacaggattgatgtccaggcgagggacattaattttctaaccaaaaagagtggaaacattttacctcttttcctgctttcaaaaacctgttactgcaaagacctcggatttgtgggtcaatggatttgggtactatattcttcttaccgtatctttttttcttgctttcttcagagtgtgaacatggctacgcctcttcattcccgtccatgccgagcccccgactgcagcattcaaagcccccacggaggttgagccgggcacagaaacacagcagcgggagcagcaacaccagcactgccaacagatctacacacaatgagctggaaaagaatcgcttgaagaattggttggttgggagaagggataccagaggcatgaagatgcttttgaaggctattgcagtaatctagacgagctcatctgcgcctttgtttagaacgcttaaaagttctgattccactaggaccagactgcacccggcacacaacacttggtttgctcaacaaagccaaagcacacatcaagaaacttgaagaagctgaaagaaaaagccagcaccagctcgagaatttggaacgagaacagagatttttaaagtggcgactggaacagctgcagggtcctcaggagatggaacgaatacgaatggacagcattggatcaactatttcttcagatcgttctgattcagagcgagaggagattgaagtggatgttgaaagcacagagttctcccatggagaagtggacaatataagtaccaccagcatcagtgacattgatgaccacagcagcctgccgagtattgggagtgacgagggttactccagtgccagtgtcaaactttcattcacttcatagaacccagcatgacataacagtgcagggcaaaatattcactgggccaattcaatacaaacaatctcttaaattgggttcatgatgcagtctcctctttaaaacaaaacaaaacaaaacaaaactatacttgaacaaaagggtcagaggacctgtatttaagcaaatacttagcaaaaagtggggcagagcctcccaaggagaacaaatattcagaatattcatattggaaaaatcacaatttttaatggcagcagaaaacttgtgtgaaattttcttgatttgagttgattgagaagaggacattggagatgccatcctctttctcttttctagtttgctcatactacattgagtagacacatttaaggatggggttatgaacccttcctgagctttatggtcctaaaagcaaaataaaaactattcgaatgaaaagacaagaaaatcaggtattaatcttggatagctaataatgagctattaaaactcagcctgggacagtttatcatgaagcctgtggatgatcaatcctttattattattttttttttttgaaaaaagctcatttcatgctctgcaaaaggagagactcccatgaagccttttgaaagggatcatcatgcagctcaactttctgttggattccatgctaagcaagctaaccttatcctgcattgttagcactaggcacccagctgccacctctccatcctgctgcccttaggccacatgggagcagtccatgcatgacagcctctatcctacaaggcctatgagtatggattgggggggccaaaaggaaaaagctccatgtgcctctttgtctgcgtgggtcagaagagttgtgcacgcagattagcaggccaaggtctgagccacagcagcatttttatttcagattttgataactgtttatatgtgttgaaaaccaaaatgacatctttttaaagcttatccataaaaaaaaatagatgtcttttatagtggaaaaacacatggggaaaaaaatcatctattttgatgcagcatttgataatgataaaacacctcacacctcactctttatagtgcacaaaatgaatgaggtctgggctaggtagaaaaagggtcaatgctatttttgtttttagaatcattaccttttaccagcttttaaccatctgatatctatagtagacacactatcatagttaacatagtaagttcagcacttgtctcattttaatgtaaagatttgcttccattttcctacaggcagtctctctcttcctcacagtcccactgtgcaggtgctattgttactcttacgaatattttcagtaatgttattttcttctaagtgaaatttctagcctgcactttgatgtcatgtgttccctttgtctttcaaactccaaggttcccttgtggccctctcccttaccctgggaaggcctcttggagaccttacccctggctgtttggactttgtatactttaaataatttaactacccttaattacttaaaaaaaaaaaaaagctttatgattttcataacttattgctgattttaatggattgttaatttcagtcctgtagttttattttatgtttagatagggctgggcaaggaaaaagaaaataaagacaaccatatttagcagtgc

SEQ ID NO: 8362 - protein, 97 aa, Homo sapiens
MDLGTIFFLPYLFFLLSSECEHGYASSFPSMPSPRLQHSKPPRRLSRAQKHSSGSSNTSTANRSTHNELEKNRLKNWLVGRRDTRGMKMLLKAIAVI

SEQ ID NO: 8363 - DNA, 3635 bp, Homo sapiens
agcgggggaaaaccggtggagaggggcctttgaatacctgcggggtgatgagatggggtccctttagcggtggcagcccaaggggctgtagagatggcgcagaaagaccaggaactcggagactgtggtgtcgagagagaaaatgtctttctaagacttgttcgaagtacacaaaaatattgggcttaaagagactctttagaacagagagagttgaaagtaaaggggaatttttgaggcaagcgaagtcaatgaggtgaatggtaactggtcacaaaatttttgttctaaagcatctgaaatctcaagttcttgggagagaaggattttggaaaggggggataaactctttggtttagaggaggtatcaaaacaccttccagctggtggggtgtcacaggattgatgtccaggcgagggacattaattttctaaccaaaaagagtggaaacattttacctcttttcctgctttcaaaaacctgttactgcaaagacctcggatttgtgggtcaatggatttgggtactatattcttcttaccgtatctttttttcttgctttcttcagagtgtgaacatggctacgcctcttcattcccgtccatgccgagcccccgactgcagcattcaaagcccccacggaggttgagccgggcacagaaacacagcagcgggagcagcaacaccagcactgccaacagatctacacacaatgagctggaaaagaatcgcttgaagaattggttggttgggagaagggataccagaggcatgaagatgcttttgaaggctattgcagtaatctagacgagctcatctgcgcctttgtttagaacgcttaaaagttctgattccactaggaccagactgcacccggcacacaacacttggtttgctcaacaaagccaaagcacacatcaagaaacttgaagaagctgaaagaaaaagccagcaccagctcgagaatttggaacgagaacagagatttttaaagtggcgactggaacagctgcagggtcctcaggagatggaacgaatacgaatggacagcattggatcaactatttcttcagatcgttctgattcagagcgagaggagattgaagtggatgttgaaagcacagagttctcccatggagaagtggacaatataagtaccaccagcatcagtgacattgatgaccacagcagcctgccgagtattgggagtgacgagggttactccagtgccagtgtcaaactttcattcacttcatagaacccagcatgacataacagtgcagggcaaaatattcactgggccaattcaatacaaacaatctcttaaattgggttcatgatgcagtctcctctttaaaacaaaacaaaacaaaacaaaactatacttgaacaaaagggtcagaggacctgtatttaagcaaatacttagcaaaaagtggggcagagcctcccaaggagaacaaatattcagaatattcatattggaaaaatcacaatttttaatggcagcagaaaacttgtgtgaaattttcttgatttgagttgattgagaagaggacattggagatgccatcctctttctcttttctagtttgctcatactacattgagtagacacatttaaggatggggttatgaacccttcctgagctttatggtcctaaaagcaaaataaaaactattcgaatgaaaagacaagaaaatcaggtattaatcttggatagctaataatgagctattaaaactcagcctgggacagtttatcatgaagcctgtggatgatcaatcctttattattattttttttttttgaaaaaagctcatttcatgctctgcaaaaggagagactcccatgaagccttttgaaagggatcatcatgcagctcaactttctgttggattccatgctaagcaagctaaccttatcctgcattgttagcactaggcacccagctgccacctctccatcctgctgcccttaggccacatgggagcagtccatgcatgacagcctctatcctacaaggcctatgagtatggattgggggggccaaaaggaaaaagctccatgtgcctctttgtctgcgtgggtcagaagagttgtgcacgcagattagcaggccaaggtctgagccacagcagcatttttatttcagattttgataactgtttatatgtgttgaaaaccaaaatgacatctttttaaagcttatccataaaaaaaaatagatgtcttttatagtggaaaaacacatggggaaaaaaatcatctattttgatgcagcatttgataatgataaaacacctcacacctcactctttatagtgcacaaaatgaatgaggtctgggctaggtagaaaaagggtcaatgctatttttgtttttagaatcattaccttttaccagcttttaaccatctgatatctatagtagacacactatcatagttaacatagtaagttcagcacttgtctcattttaatgtaaagatttgcttccattttcctacaggcagtctctctcttcctcacagtcccactgtgcaggtgctattgttactcttacgaatattttcagtaatgttattttcttctaagtgaaatttctagcctgcactttgatgtcatgtgttccctttgtctttcaaactccaaggttcccttgtggccctctcccttaccctgggaaggcctcttggagaccttacccctggctgtttggactttgtatactttaaataatttaactacccttaattacttaaaaaaaaaaaaaagctttatgattttcataacttattgctgattttaatggattgttaatttcagtcctgtagttttattttatgtttagatagggctgggcaaggaaaaagaaaataaagacaaccatatttagcagtgcagttgagttgtgtgttaatgttagactatccctttgtgagtgacactttaacagcattcactgcttctatatatagtgtaccatcttggtcatacattacgcctcaacatatacttgtgctcttcctttgcctccagaagaagtttttccttgattgtgctatgtttcagtggaagaaattctttgaagtagatgtgagtgaaaaactgcatgcctttagaagcccagtatcagaacttgctacgtttcaggtgctagggacttaatgaaaaacaggacaaaacaattcctttttgtggcccaggtaaattatttctggtttcacttataattactaatggctgagtcaagatgttgtctctgtgtttgcttactcttgatcaagtgtgagacagtttgaagactgtgctaccatacaaagtgaatgaagccagtgactaagcttctgtttgttttgttattctcatggccttcgcttgcattatttgggccttcattcagatgaacttgaggtgccattttgttgcatatgtacaggattatgggctggaaagcatttgttataaacctatagtgcacattttaactgccccctaaattacccttccctgggtttgttttccttggggtggtgtagattgtatgagtaagaagtattaattttttaaaagacaaatcaactttgaagacacaaaagttaattggaagaaataaaaactgtgaacgaag

SEQ ID NO: 8364 - protein, 97 aa, Homo sapiens; identical to SEQ ID NO: 8362

SEQ ID NO: 8365 - DNA, 885 bp, Homo sapiens
ccctttagcggtggcagcccaaggggctgtagagatggcgcagaaagaccaggaactcggagactgtggtgtcgagagagaaaatgtctttctaagacttgttcgaagtacacaaaaatattgggcttaaagagactctttagaacagagagagttgaaagtaaaggggaatttttgaggcaagcgaagtcaatgaggtgaatgagtgtgaacatggctacgcctcttcattcccgtccatgccgagcccccgactgcagcattcaaagcccccacggaggttgagccgggcacagaaacacagcagcgggagcagcaacaccagcactgccaacagatctacacacaatgagctggaaaagaatcgacgagctcatctgcgcctttgtttagaacgcttaaaagttctgattccactaggaccagactgcacccggcacacaacacttggtttgctcaacaaagccaaagcacacatcaagaaacttgaagaagctgaaagaaaaagccagcaccagctcgagaatttggaacgagaacagagatttttaaagtggcgactggaacagctgcagggtcctcaggagatggaacgaatacgaatggacagcattggatcaactatttcttcagatcgttctgattcagagcgagaggagattgaagtggatgttgaaagcacagagttctcccatggagaagtggacaatataagtaccaccagcatcagtgacattgatgaccacagcagcctgccgagtattgggagtgacgagggttactccagtgccagtgtcaaactttcattcacttcatagaacccagcatgacataacagtgcagggcaaaatattcactgggccaattcaatacaaacaatctctt

SEQ ID NO: 8366 - protein, 192 aa, Homo sapiens; identical to SEQ ID NO: 8344

SEQ ID NO: 8367 - DNA, 2465 bp, Homo sapiens
ccctttagcggtggcagcccaaggggctgtagagatggcgcagaaagaccaggaactcggagactgtggtgtcgagagagaaaatgtctttctaagacttgttcgaagtacacaaaaatattgggcttaaagagactctttagaacagagagagttgaaagtaaaggggaatttttgaggcaagcgaagtcaatgaggtgaatgagtgtgaacatggctacgcctcttcattcccgtccatgccgagcccccgactgcagcattcaaagcccccacggaggttgagccgggcacagaaacacagcagcgggagcagcaacaccagcactgccaacagatctacacacaatgagctggaaaagaatcgacgagctcatctgcgcctttgtttagaacgcttaaaagttctgattccactaggaccagactgcacccggcacacaacacttggtttgctcaacaaagccaaagcacacatcaagaaacttgaagaagctgaaagaaaaagccagcaccagctcgagaatttggaacgagaacagagatttttaaagtggcgactggaacagctgcagggtcctcaggagatggaacgaatacgaatggacagcattggatcaactatttcttcagatcgttctgattcagagcgagaggagattgaagtggatgttgaaagcacagagttctcccatggagaagtggacaatataagtaccaccagcatcagtgacattgatgaccacagcagcctgccgagtattgggagtgacgagggttactccagtgccagtgtcaaactttcattcacttcatagaacccagcatgacataacagtgcagggcaaaatattcactgggccaattcaatacaaacaatctcttaaattgggttcatgatgcagtctcctctttaaaacaaaacaaaacaaaacaaaactatacttgaacaaaagggtcagaggacctgtatttaagcaaatacttagcaaaaagtggggcagagcctcccaaggagaacaaatattcagaatattcatattggaaaaatcacaatttttaatggcagcagaaaacttgtgtgaaattttcttgatttgagttgattgagaagaggacattggagatgccatcctctttctcttttctagtttgctcatactacattgagtagacacatttaaggatggggttatgaacccttcctgagctttatggtcctaaaagcaaaataaaaactattcgaatgaaaagacaagaaaatcaggtattaatcttggatagctaataatgagctattaaaactcagcctgggacagtttatcatgaagcctgtggatgatcaatcctttattattattttttttttttgaaaaaagctcatttcatgctctgcaaaaggagagactcccatgaagccttttgaaagggatcatcatgcagctcaactttctgttggattccatgctaagcaagctaaccttatcctgcattgttagcactaggcacccagctgccacctctccatcctgctgcccttaggccacatgggagcagtccatgcatgacagcctctatcctacaaggcctatgagtatggattgggggggccaaaaggaaaaagctccatgtgcctctttgtctgcgtgggtcagaagagttgtgcacgcagattagcaggccaaggtctgagccacagcagcatttttatttcagattttgataactgtttatatgtgttgaaaaccaaaatgacatctttttaaagcttatccataaaaaaaaatagatgtcttttatagtggaaaaacacatggggaaaaaaatcatctattttgatgcagcatttgataatgataaaacacctcacacctcactctttatagtgcacaaaatgaatgaggtctgggctaggtagaaaaagggtcaatgctatttttgtttttagaatcattaccttttaccagcttttaaccatctgatatctatagtagacacactatcatagttaacatagtaagttcagcacttgtctcattttaatgtaaagatttgcttccattttcctacaggcagtctctctcttcctcacagtcccactgtgcaggtgctattgttactcttacgaatattttcagtaatgttattttcttctaagtgaaatttctagcctgcactttgatgtcatgtgttccctttgtctttcaaactccaaggttcccttgtggccctctcccttaccctgggaaggcctcttggagaccttacccctggctgtttggactttgtatactttaaataatttaactacccttaattacttaaaaaaaaaaaaaagctttatgattttcataacttattgctgattttaatggattgttaatttcagtcctgtagttttattttatgtttagatagggctgggcaaggaaaaagaaaataaagacaaccatatttagcagtgc

SEQ ID NO: 8368 - protein, 192 aa, Homo sapiens; identical to SEQ ID NO: 8344

SEQ ID NO: 8369 - DNA, 3194 bp, Homo sapiens
ccctttagcggtggcagcccaaggggctgtagagatggcgcagaaagaccaggaactcggagactgtggtgtcgagagagaaaatgtctttctaagacttgttcgaagtacacaaaaatattgggcttaaagagactctttagaacagagagagttgaaagtaaaggggaatttttgaggcaagcgaagtcaatgaggtgaatgagtgtgaacatggctacgcctcttcattcccgtccatgccgagcccccgactgcagcattcaaagcccccacggaggttgagccgggcacagaaacacagcagcgggagcagcaacaccagcactgccaacagatctacacacaatgagctggaaaagaatcgacgagctcatctgcgcctttgtttagaacgcttaaaagttctgattccactaggaccagactgcacccggcacacaacacttggtttgctcaacaaagccaaagcacacatcaagaaacttgaagaagctgaaagaaaaagccagcaccagctcgagaatttggaacgagaacagagatttttaaagtggcgactggaacagctgcagggtcctcaggagatggaacgaatacgaatggacagcattggatcaactatttcttcagatcgttctgattcagagcgagaggagattgaagtggatgttgaaagcacagagttctcccatggagaagtggacaatataagtaccaccagcatcagtgacattgatgaccacagcagcctgccgagtattgggagtgacgagggttactccagtgccagtgtcaaactttcattcacttcatagaacccagcatgacataacagtgcagggcaaaatattcactgggccaattcaatacaaacaatctcttaaattgggttcatgatgcagtctcctctttaaaacaaaacaaaacaaaacaaaactatacttgaacaaaagggtcagaggacctgtatttaagcaaatacttagcaaaaagtggggcagagcctcccaaggagaacaaatattcagaatattcatattggaaaaatcacaatttttaatggcagcagaaaacttgtgtgaaattttcttgatttgagttgattgagaagaggacattggagatgccatcctctttctcttttctagtttgctcatactacattgagtagacacatttaaggatggggttatgaacccttcctgagctttatggtcctaaaagcaaaataaaaactattcgaatgaaaagacaagaaaatcaggtattaatcttggatagctaataatgagctattaaaactcagcctgggacagtttatcatgaagcctgtggatgatcaatcctttattattattttttttttttgaaaaaagctcatttcatgctctgcaaaaggagagactcccatgaagccttttgaaagggatcatcatgcagctcaactttctgttggattccatgctaagcaagctaaccttatcctgcattgttagcactaggcacccagctgccacctctccatcctgctgcccttaggccacatgggagcagtccatgcatgacagcctctatcctacaaggcctatgagtatggattgggggggccaaaaggaaaaagctccatgtgcctctttgtctgcgtgggtcagaagagttgtgcacgcagattagcaggccaaggtctgagccacagcagcatttttatttcagattttgataactgtttatatgtgttgaaaaccaaaatgacatctttttaaagcttatccataaaaaaaaatagatgtcttttatagtggaaaaacacatggggaaaaaaatcatctattttgatgcagcatttgataatgataaaacacctcacacctcactctttatagtgcacaaaatgaatgaggtctgggctaggtagaaaaagggtcaatgctatttttgtttttagaatcattaccttttaccagcttttaaccatctgatatctatagtagacacactatcatagttaacatagtaagttcagcacttgtctcattttaatgtaaagatttgcttccattttcctacaggcagtctctctcttcctcacagtcccactgtgcaggtgctattgttactcttacgaatattttcagtaatgttattttcttctaagtgaaatttctagcctgcactttgatgtcatgtgttccctttgtctttcaaactccaaggttcccttgtggccctctcccttaccctgggaaggcctcttggagaccttacccctggctgtttggactttgtatactttaaataatttaactacccttaattacttaaaaaaaaaaaaaagctttatgattttcataacttattgctgattttaatggattgttaatttcagtcctgtagttttattttatgtttagatagggctgggcaaggaaaaagaaaataaagacaaccatatttagcagtgcagttgagttgtgtgttaatgttagactatccctttgtgagtgacactttaacagcattcactgcttctatatatagtgtaccatcttggtcatacattacgcctcaacatatacttgtgctcttcctttgcctccagaagaagtttttccttgattgtgctatgtttcagtggaagaaattctttgaagtagatgtgagtgaaaaactgcatgcctttagaagcccagtatcagaacttgctacgtttcaggtgctagggacttaatgaaaaacaggacaaaacaattcctttttgtggcccaggtaaattatttctggtttcacttataattactaatggctgagtcaagatgttgtctctgtgtttgcttactcttgatcaagtgtgagacagtttgaagactgtgctaccatacaaagtgaatgaagccagtgactaagcttctgtttgttttgttattctcatggccttcgcttgcattatttgggccttcattcagatgaacttgaggtgccattttgttgcatatgtacaggattatgggctggaaagcatttgttataaacctatagtgcacattttaactgccccctaaattacccttccctgggtttgttttccttggggtggtgtagattgtatgagtaagaagtattaattttttaaaagacaaatcaactttgaagacacaaaagttaattggaagaaataaaaactgtgaacgaag

SEQ ID NO: 8370 - protein, 192 aa, Homo sapiens; identical to SEQ ID NO: 8344

SEQ ID NO: 8371 - DNA, 1383 bp, Homo sapiens
catggagaagtggacaatataagtaccaccagcatcagtgacattgatgaccacagcagcctgccgagtattgggagtgacgagggttactccagtgccagtgtcaaactttcattcacttcatagaacccagcatgacataacagtgcagggcaaaatattcactgggccaattcaatacaaacaatctcttaaattgggttcatgatgcagtctcctctttaaaacaaaacaaaacaaaacaaaactatacttgaacaaaagggtcagaggacctgtatttaagcaaatacttagcaaaaagtggggcagagcctcccaaggagaacaaatattcagaatattcatattggaaaaatcacaatttttaatggcagcagaaaacttgtgtgaaattttcttgatttgagttgattgagaagaggacattggagatgccatcctctttctcttttctagtttgctcatactacattgagtagacacatttaaggatggggttatgaacccttcctgagctttatggtcctaaaagcaaaataaaaactattcgaatgaaaagacaagaaaatcaggtattaatcttggatagctaataatgagctattaaaactcagcctgggacagtttatcatgaagcctgtggatgatcaatcctttattattattttttttttttgaaaaaagctcatttcatgctctgcaaaaggagagactcccatgaagccttttgaaagggatcatcatgcagctcaactttctgttggattccatgctaagcaagctaaccttatcctgcattgttagcaaaaatgaatgaggtctgggctaggtagaaaaagggtcaatgctatttttgtttttagaatcattaccttttaccagcttttaaccatctgatatctatagtagacacactatcatagttaacatagtaagttcagcacttgtctcattttaatgtaaagatttgcttccattttcctacaggcagtctctctcttcctcacagtcccactgtgcaggtgctattgttactcttacgaatattttcagtaatgttattttcttctaagtgaaatttctagcctgcactttgatgtcatgtgttccctttgtctttcaaactccaaggttcccttgtggccctctcccttaccctgggaaggcctcttggagaccttacccctggctgtttggactttgtatactttaaataatttaactacccttaattacttaaaaaaaaaaaaaagctttatgattttcataacttattgctgattttaatggattgttaatttcagtcctgtagttttattttatgtttagatagggctgggcaaggaaaaagaaaataaagacaaccatatttagcagtgc

SEQ ID NO: 8372 - protein, 59 aa, Homo sapiens [sequence omitted]

SEQ ID NO: 8373 - DNA, 2112 bp, Homo sapiens
catggagaagtggacaatataagtaccaccagcatcagtgacattgatgaccacagcagcctgccgagtattgggagtgacgagggttactccagtgccagtgtcaaactttcattcacttcatagaacccagcatgacataacagtgcagggcaaaatattcactgggccaattcaatacaaacaatctcttaaattgggttcatgatgcagtctcctctttaaaacaaaacaaaacaaaacaaaactatacttgaacaaaagggtcagaggacctgtatttaagcaaatacttagcaaaaagtggggcagagcctcccaaggagaacaaatattcagaatattcatattggaaaaatcacaatttttaatggcagcagaaaacttgtgtgaaattttcttgatttgagttgattgagaagaggacattggagatgccatcctctttctcttttctagtttgctcatactacattgagtagacacatttaaggatggggttatgaacccttcctgagctttatggtcctaaaagcaaaataaaaactattcgaatgaaaagacaagaaaatcaggtattaatcttggatagctaataatgagctattaaaactcagcctgggacagtttatcatgaagcctgtggatgatcaatcctttattattattttttttttttgaaaaaagctcatttcatgctctgcaaaaggagagactcccatgaagccttttgaaagggatcatcatgcagctcaactttctgttggattccatgctaagcaagctaaccttatcctgcattgttagcaaaaatgaatgaggtctgggctaggtagaaaaagggtcaatgctatttttgtttttagaatcattaccttttaccagcttttaaccatctgatatctatagtagacacactatcatagttaacatagtaagttcagcacttgtctcattttaatgtaaagatttgcttccattttcctacaggcagtctctctcttcctcacagtcccactgtgcaggtgctattgttactcttacgaatattttcagtaatgttattttcttctaagtgaaatttctagcctgcactttgatgtcatgtgttccctttgtctttcaaactccaaggttcccttgtggccctctcccttaccctgggaaggcctcttggagaccttacccctggctgtttggactttgtatactttaaataatttaactacccttaattacttaaaaaaaaaaaaaagctttatgattttcataacttattgctgattttaatggattgttaatttcagtcctgtagttttattttatgtttagatagggctgggcaaggaaaaagaaaataaagacaaccatatttagcagtgcagttgagttgtgtgttaatgttagactatccctttgtgagtgacactttaacagcattcactgcttctatatatagtgtaccatcttggtcatacattacgcctcaacatatacttgtgctcttcctttgcctccagaagaagtttttccttgattgtgctatgtttcagtggaagaaattctttgaagtagatgtgagtgaaaaactgcatgcctttagaagcccagtatcagaacttgctacgtttcaggtgctagggacttaatgaaaaacaggacaaaacaattcctttttgtggcccaggtaaattatttctggtttcacttataattactaatggctgagtcaagatgttgtctctgtgtttgcttactcttgatcaagtgtgagacagtttgaagactgtgctaccatacaaagtgaatgaagccagtgactaagcttctgtttgttttgttattctcatggccttcgcttgcattatttgggccttcattcagatgaacttgaggtgccattttgttgcatatgtacaggattatgggctggaaagcatttgttataaacctatagtgcacattttaactgccccctaaattacccttccctgggtttgttttccttggggtggtgtagattgtatgagtaagaagtattaattttttaaaagacaaatcaactttgaagacacaaaagttaattggaagaaataaaaactgtgaacgaag

SEQ ID NO: 8374 - protein, 82 aa, Homo sapiens [sequence omitted]

SEQ ID NO: 8375 - DNA, 560 bp, Homo sapiens
tttctttttccttgcccagccctatctaaacataaaataaaactacaggactgaaattaacaatccattaaaatcagcaataagttatgaaaatcataaagcttttttttttttttaagtaattaagggtagttaaattatttaaagtatacaaagtccaaacagccaggggtaaggtctccaagaggccttcccagggtaagggagagggccacaagggaaccttggagtttgaaagacaaagggaacacatgacatcaaagtgcaggctagaaatttcacttagaagaaaataacattactgaaaatattcgtaagagtaacaatagcacctgcacagtgggactgtgaggaagagagagactgcctgtaggaaaatggaagcaaatctttacattaaaatgagacaagtgctgaacttactatgttaactatgatagtgtgtctactatagatatcagatggttaaaagctggtaaaaggtaatgattctaaaaacaaaaatagcattgaccctttttctacctagcccagacctcattcattttgtgcaatataaa

SEQ ID NO: 8376 - protein, 40 aa, Homo sapiens
LNYLKYTKSKQPGVRSPRGLPRVRERATREPWSLKDKGNT

SEQ ID NO: 8377 - DNA, 526 bp, Homo sapiens
cttcttcctgggcagccactgcacacgtgagcctgagggtagctgtgttccagctttgcacagaaagcaggtttgggagaatgaagccagaggccaaggagagaatgcggaatcctggagtgttgaaggcccttgttttgattcctcgcgtcctccagtccatcctcattttctggagaggcagcgtgacctaacgacgaaagcctccacaactggtttctgtcggtgtgagtcccaaatctgccactggctggctgggaaaccttggtttggacggaagcccaagcatcactgagcaaagtcagtatcctcctataccttgctacttattctaagtgtgtttcatggaccagcaaaatggacctcatctaggagcttgttggaaatgcagaatctcagcccgacttacggaatcagaatctacatgtcaacaagatccccaggggctgtgtgtgcacatcaaagtgtgagagttttctgccctagtgccactgctttaagaactacagcttggtcatctctagaa

SEQ ID NO: 8378 - protein, 37 aa, Homo sapiens
MKPEAKERMRNPGVLKALVLIPRVLQSILIFWRGSVT

SEQ ID NO: 8379 - DNA, 538 bp, Homo sapiens
ctccattcccaacagtggttctgcacccccacccatgtttttttgtttgtttgtttgtttgtttgtttttggttatcctggaggttttgtggattaagatgtgtgagatgaggggtttatagggactggctggaggtatgcccccccttccacccacacacccacacacacatacacacgcacacgctgttgtgcagaagatgtttcttgggtggctgagcaaagaatcaggtatttggatgtcctgatttgaccctgagaaaaatagcagccatccacagagctctgaaacatacttcccactgcttggaatggcagctcctcctcagaatacaagcaaggaaacgtgtggcatctggctaccatgagctgaagacaaagcctacatggggaaaagtgcaaaaccaggagaatgggagagaaatggagccacgcactgatgctgttgtgaaacatctcaatcaaactgcacctgaagaccgccctatccctgcatttttcatttacatgagccaataaactctctcatttaagtcaa

SEQ ID NO: 8380 - protein, 36 aa, Homo sapiens
MPPLPPTHPHTHTHAHAVVQKMFLGWLSKESGIWMS

SEQ ID NO: 8381 - DNA, 478 bp, Homo sapiens
gccttcggagggaacatgcactgctgattccttgattccagatttctgacctccagaagcatgggagaacagatttcccttgtttgaaggcacccagtctgtggtccttcatcatggcagccctcaggaatggatacaggcccttccctgcctgcctggtggagcagcctccaaggggagcctttgctagcaggaagaggcatcgcatggagctcagacccgcctcagaggaacttctctcagcctcctctctccgcacacccgaccaagatacaagcaaggaaacgtgtggcatctggctaccatgagctgaagacaaagcctacatggggaaaagtgcaaaaccaggagaatgggagagaaatggagccacgcactgatgctgttgtgaaacatctcaatcaaactgcacctgaagaccgccctatccctgcatttttcatttacatgagccaataaactctctcatttaagtcaa

SEQ ID NO: 8382 - protein, 109 aa, Homo sapiens
MDTGPSLPAWWSSLQGEPLLAGRGIAWSSDPPQRNFSQPPLSAHPTKIQARKRVASGYHELKTKPTWGKVQNQENGREMEPRTDAVVKHLNQTAPEDRPIPAFFIYMSQ

SEQ ID NO: 8383 - DNA, 518 bp, Homo sapiens
ccgcctcctcctccaccagcaccactccctccggggcaccccggtccctgcagagtccctggccggcgccgcctccgctgcggccccctgaatcccgagcctgcctcgcccaagctggtaggacagaaggacagacagattcctctagcctagcgctccgccgctgctgccttacgcggccccgcgtcgggagaactgggatcgccccaagagcaccgcgaggggtcatctcaggctggctgcatgcctcagctgaagatcccagctcctgtcaatgccacctctctgcttgactgtctccttccagattcgatacaagcaaggaaacgtgtggcatctggctaccatgagctgaagacaaagcctacatggggaaaagtgcaaaaccaggagaatgggagagaaatggagccacgcactgatgctgttgtgaaacatctcaatcaaactgcacctgaagaccgccctatccctgcatttttcatttacatgagccaataaactctctcatttaagtc

SEQ ID NO: 8384 - protein, 85 aa, Homo sapiens
MPQLKIPAPVNATSLLDCLLPDSIQARKRVASGYHELKTKPTWGKVQNQENGREMEPRTDAVVKHLNQTAPEDRPIPAFFIYMSQ

SEQ ID NO: 8385 - DNA, 7619 bp, Homo sapiens
ccgaggagcgggcgccctgggctcccagctcctggcgaccgccgcacgctgcctccgccgcccgctgcccgcggcgaggacggacgagaattggggactcgtttgtttggggtgggggtgggggtggggggaaggaaaggaagaaagaaaggaaaggaaaggaaaaaggaaaggaggggggagggagagggagaggcaaagccgaggatcccgagaatcttgcaccaaacgcgcccaacctgaagagaggggggaaaatccttccagaagaatttgcaggcgtggattggggtaattttttttctttttttttctttttttttcttttttttttttttttttttttttggcgagatggcgtggggggatcggagttagaggcagggaggagaaggggggaaagttctcgggggaggcaaaaaaaaaaaaaagttttttctcctctgcaaaaggcgggcagggcgccctaagtccaaggacaatccatggaagtgttcgcttcttcacaagcctggatccgggccgagagtggaacggagtcggcgccgccgcctcggctgagccttctgccgcccaccgggcggccgggcttctcctcttcctccagtttcttcttctcctcctcctcctcttcttcctcctcctcctcttcttcctcctcctctttccccacctactccccctcagccaccgcctcctcctccaccagcaccactccctccggggcaccccggtccctgcagagtccctggccggcgccgcctccgctgcggccccctgaatcccgagcctgcctcgcccaagctggtaggacagaaggacagacagattcctctagcctagcgctccgccgctgctgccttacgcggccccgcgtcgggagaactgggatcgccccaagagcaccgcgaggggtcatctcaggctggctgcatgcctcagctgaagatcccagctcctgtcaatgccacctctctgcttgactgtctccttccagattcgagcaggtatgagctgggaagaatgaaggcagggcatgcccgtgtgccagctctgcacagctggatagctgaggaaagatgtggaggagaagccggggattgtgtggaagtctaagggtgttgtttgccctttgggttccagaagatgcatgccaggaccctgggtggcactgccaggaagcaacagagaggagataaaactcacagcagacagacttgccttaacaacaactcccttgaattaaaacacgcttttcaagaaaacaaattatcagttcgatcagcaaacagcagagaagtttctctcataatggcaaagaagggccgggttgctgaccagtgaaagagcttcagaaaaggagaggggagatgagatggccagaaggagcaagagcaccgtacatccctggacaacctcattctaatgggtcaggggctgggacgtgcattttggagtgcaggagaagtggcaactcacaaatgctagattttcttctagagatgaccaagctgtagttcttaaagcagtggcactagggcagaaaactctcacactttgatgtgcacacacagcccctggggatcttgttgacatgtagattctgattccgtaagtcgggctgagattctgcatttccaacaagctcctagatgaggtccattttgctggtccatgaaacacacttagaataagtagcaaggtataggaggatactgactttgctcagtgatgcttgggcttccgtccaaactaaaataaaacaaaagcagacataaatggcccaattcaacagcctgagaagtttggtgataatgacccaagccctggcctggtgaccaagtggctgctcagagagctctatctccaaactccttcccttcctgcctcccctccaagagtgagtaatgtgccagagttcattggggtctgctgtccccagggaaaggtggcccagttgccaagtgcaagtgtatagaacggcttacctgtgcaaagctatcagccctggacctatgggcctagaaacattacttgccactcactcactcactatcattcattcatttctgcaacaaacacttcctgagcatatgctatacaccaggccctgagctcagctctggggatacaggatgaatggcagattgtgccatcaggaagccgactgcacagtcagcccgctggagcacatatgaaaaacaatacggatgttttgatttattatcatattgatcattatgatggtagcgtatacttttggaaggcttgccatacattaggcattgtgctaagcacattatatggttaatctcatcaatcttcacaacctatgtggcaggtactattattaaacccacttcaaagaggagggaactgaacctcagagagggtaagtgacttgcacaaggacacaagctagtgaggagaggaactgagaggaatggccagacaggccatcagcctctgtccccacatgctgggtctgagtgtctgacggtggacacattcccttcctggagggagagctcctagggagctgatggcagcactgagtctggaatgtgatgggagtgcattagatgacgtgggtgatctgatgagtacagaggcgtcacactgcaatgacttcatgcacatatctccccttgaatgcacagagattcagcagaggccaggagctcaagtttctggcccagtgtccccctcttcccctggggaaagccagggacacactgcctggctttgctacacctttctaggcaaaggcagtatgctctccctctccttggcctccctggctgtccacacatccacacccactcacacacacatgcacatgatcatacacattacacaagcccacatgcccacagacatgctcacactcacactcacatgcatacactgccatacacaacacacatacatacattcacacacacttgcacacacacacacacacacagttctgatggccaatcttttggggctatgttgacactgtgaagcaggtgaaacaaagtctttgccactccctgctttgggcctattatgtttgttttatagtttaactctcaaaagacaactttattttccaaaattattcaggttcccagccaggtgcagtggctcacacctgtaatcccagtactttgggaggccaaggcgggcagatcacctgaggtcaggagtttgagaccagcttggccaacatggtgaaacccagtctctactaaaaatacaaaaattagccagacatggtggcacacacatgtaatcccagctattcgggaggctgaggcaggagaatcgcttgaacccgggaggcggaggttgcagtgggccaagatcgtgccactgcactccagcctgggcaacagagcaagactccatctcaaaaaacaaaaacaaaatcattcaggttctgtaggggaccctcactgtgtcctggattccattccacttttaaagtcccaaacagcttgtatggccacttcccttgacacccaaaccagataggagtcttaaatgacacagagtattgatggtttctttaaaaggaaatccactctcaatgggaagctggataacttcgcatccagatttcatccatcttgggctttggtggctgctgtttgtttttgtgcaggagaatctctcccagccaacgtcgatttcactaacacagtggttaacctttgctctctactcctgcatcaatcttccgcctaccgcatgttgagccatgctgctttctggcattccttttggattttcagtttactacccaactaccagtcctaataacatcagataaaagggcttccgctgtgctgcacttgttttcaaaaactataaatgccatcgacccagagttaagtccagcctcagagagacagaatataaatacccaagtggccctgggccactgagttcctcagacattatgtgctatgggagttccagaaagggggattgcctggttttgagtgcagaaggcttcctggaggaggcgagatttctgatgggcctctgttatgagctaaattgagtccaccccaaaattcagatgttcaaatcctaacctgtagtacctaagcatgtggccttatttggaagcagaagcataacagaggtaattcgttaagatgaggtcacagtggaagagggtggaccccaatctgatacaactcgtgtccttataaaaagcagaaatttgaagacagacacacaagaagatgaaggcagagacctggctgatgcggctataagccaaggaacgccaaagattgccagcaaagcaccagcagccagggagaggcctcgaacaaattctccctcccagcaaaaaggaggaaggaaggaacctccaaaagaagcaggccaggcacagtggctcacgcctgtaatcccagtactttgggaggttaaggcaggcggatcacctgagatcaagagttcaagaccagcctggccaacatggtgaaacctcatctctacagaaaaatacaaaaattagtcaggtgtagtggcgtgcacctgtagtcccagttactcgggaggctgaggcaagagaatcgcttgaacctgggaggtggaggttgcagtgagccaagatcgtgccattgcactccagcctgggtgacagagcgagactccatctcagaaaaacaaaaaagaaccctactgacacctggatttcagacttccagcctccagaactgtgagatgttacatttctgtcatttaaacacccagtttgtagtactttgttgcaacagctctagtgagctaatacagccttgtaggacaggtaggaatttgtaatgcacagagaaagccaactggccacagttgttgaaaataatagaatcgaagcgcccctatcactaccaccccaggccatcactttcaaagctgttcaaaatgatgcagccgcgtgagaaggccggaaggccagggcgggagatgggctccaggtgggcccaggctgcctgcagaaccagcttgcctcactgcctggttgccaaggagcacctgtggctaggaggagatgcccaggaagaaaatttggccacatccctgcctgcctccctggcaatgggtgatgctctctgccagctggcccagctcccccaccacatacctggctaggagtcagtaggaaaacagtgtgtgtttgtagggctctgcactgaagggcattagatccatgcaaaggctaataaattagagataagtgggatttgtagatttgctggaggttagagctgcagggtctggcatcagctctgggtcttttccatggccccaggctggctcaggtgtgagctgaagaggcaaaactgtctgtttaggttgcattgggttcccctgaaagatctgttgaagtcctaacctcgggtacctctgtttgtgctatttgcaaacaggctctttgcagatgtaatcaaggaaagatgaggcaacgctgatttagtcaggccttaatccagtgactggtgtcttcataagacaaggaaatctggacacagacacacaaagaggaaaaagccaaagacacagagacacatgtacacagggagaactccatgggacaacgcaggcacagatcggagtgacgcggctgcaagccaaggagcgccaagattgccagcaaccccctggggctgcaagaggtgagaaggagccttcggagggaacatgcactgctgattccttgattccagatttctgacctccagaagcatgggagaacagatttcccttgtttgaaggcacccagtctgtggtccttcatcatggcagccctcaggaatggatacaggcccttccctgcctgcctggtggagcagcctccaaggggagcctttgctagcaggaagaggcatcgcatggagctcagacccgcctcagaggaacttctctcagcctcctctctccgcacacccgaccaaggtgtgaaatccctcccctttacctctgccacttgcaggtggcaggatgctggagctgtccctgcctctttgtaaagtgagggaagggcagccctctctgctctttttttttttttttttgagacagagtctcactctgtctcccaggctggagtgcaatagcacgatctcggctcactgcaacctccgcctcccaggttcaagcgattctcctgcctcaacctcctgagtagctggaattacaggtgcctgccaccacgcccagctaattttgtattgttagtagagccagggtttcaccatgtcggccaggctagtctcaaactcctgacctcaggtgatccacctgcctcggcctcccaaagtgctgcgattacagacatgagccaccacgcccggcctgctccacttctaaggcttcttgtgacaatgtaagagaaaggagatgacagagctttgcaacgggaggagggctatgtgttctggtgaccaattcactgtcttgtgtcgggacaggaagaagcccttcatacgggcagcaggctgggagccagggaggaggaaagatcacgatccactccctggtacatggcccttctgcaccccgcagtctccttccaggtgccacaacgagaaggcacacatccttggcacagcacttgaggcttttcaccactggctgcactcacccctccagactcactgccttgcaccaacccttttccgcccaccccactctatgctgtccacagcctccaccccagccacctgattctgcaggccaatgtcacattcttccagtccaggttctattctggcatttcttgtcattattttgctgagaatgtgtctctcttgactttgaacttattgagagcaggaatcatgactcagccatatatcccagcacttggcccagggcctgtcgtttccagggtaggtggtctaggctgattgaaggaatggcatttagtctttaaaatgaaagcatgttgcctagcttggttatttttgaactctataatcaaggactacgtttacctgaatagcctctgcagaacaccaattccgtaaggtgcttcacacacacacaccaattctatcatttaatacattttggaaaggctacatactactacagcctcttttacagattagcaatgtccatgagcgcactaaaggttgagacattctgcagtgaagaagcctatttcattttgtttaaccaagtatttctcaaatttatttgatcatatgtggcagaaaatgctgtgtctggcattcttcatttccctcttcctcctttaacatggaacccctgatgtctttagcttggcacatcgccacccagaataaaaactacctttcccagctcttcctgcagctaggggcagccctgggataaattctggacaatgaaatacaggcagaagtaaatcatatacgatttccatgaagggaccttaaacagaagtgtgcccttctcttccccacacattcctcctcctgtctgaaatgtagatgcaactgctggcatttgagcagccatcttgggccatgtggtagcttcttatggatgatctaggactaattcaagggtctagatttacctccaaactttgtttatctacaaaaaataaaactctatcttcttaaagc

SEQ ID NO: 8386 - protein, 165 aa, Homo sapiens
MEVFASSQAWIRAESGTESAPPPRLSLLPPTGRPGFSSSSSFFFSSSSSSSSSSSSSSSSFPTYSPSATASSSTSTTPSGAPRSLQSPWPAPPPLRPPESRACLAQAGRTEGQTDSSSLALRRCCLTRPRVGRTGIAPRAPRGVISGWLHASAEDPSSCQCHLSA

SEQ ID NO: 8387 - DNA, 7280 bp, Homo sapiens
gtgcttggctacagccgctgctgcctctcgcgaactgggctccggggctcccggctcccgagaactagaagagaaacgcgagcgaagggatcgaaacccggggggttaccgacttgcagacaccgccaggacagtctgtaacgcaggaagatcccagcggctccgggtctggtgaggggaccataagcatgactgatagcgaatgaggaagggcagccctaaacttttcaagcaaagcctcagagttttgggttcactcattagcataggaaatcgattcaccgaaaacccaaacaaagaaaaacaagccgacagtccaggcaggatgcaggcaaatccagttcgggattaagggtaaaaggctttttgggttttttttcctttggtttgattttttaaaatatggggaggggggtgacatctacccgattctaggctccggcaggaacgcaatgggttaatgaatggacaagccgcggagtattgatcggctgccgccggagaaagaaagaaaaacaaaaaccagaccgaacctgccttcccgctgtggctgctcggcgccccaattaagcagggtcatctcaggctggctgcatgcctcagctgaagatcccagctcctgtcaatgccacctctctgcttgactgtctccttccagattcgagcaggtatgagctgggaagaatgaaggcagggcatgcccgtgtgccagctctgcacagctggatagctgaggaaagatgtggaggagaagccggggattgtgtggaagtctaagggtgttgtttgccctttgggttccagaagatgcatgccaggaccctgggtggcactgccaggaagcaacagagaggagataaaactcacagcagacagacttgccttaacaacaactcccttgaattaaaacacgcttttcaagaaaacaaattatcagttcgatcagcaaacagcagagaagtttctctcataatggcaaagaagggccgggttgctgaccagtgaaagagcttcagaaaaggagaggggagatgagatggccagaaggagcaagagcaccgtacatccctggacaacctcattctaatgggtcaggggctgggacgtgcattttggagtgcaggagaagtggcaactcacaaatgctagattttcttctagagatgaccaagctgtagttcttaaagcagtggcactagggcagaaaactctcacactttgatgtgcacacacagcccctggggatcttgttgacatgtagattctgattccgtaagtcgggctgagattctgcatttccaacaagctcctagatgaggtccattttgctggtccatgaaacacacttagaataagtagcaaggtataggaggatactgactttgctcagtgatgcttgggcttccgtccaaactaaaataaaacaaaagcagacataaatggcccaattcaacagcctgagaagtttggtgataatgacccaagccctggcctggtgaccaagtggctgctcagagagctctatctccaaactccttcccttcctgcctcccctccaagagtgagtaatgtgccagagttcattggggtctgctgtccccagggaaaggtggcccagttgccaagtgcaagtgtatagaacggcttacctgtgcaaagctatcagccctggacctatgggcctagaaacattacttgccactcactcactcactatcattcattcatttctgcaacaaacacttcctgagcatatgctatacaccaggccctgagctcagctctggggatacaggatgaatggcagattgtgccatcaggaagccgactgcacagtcagcccgctggagcacatatgaaaaacaatacggatgttttgatttattatcatattgatcattatgatggtagcgtatacttttggaaggcttgccatacattaggcattgtgctaagcacattatatggttaatctcatcaatcttcacaacctatgtggcaggtactattattaaacccacttcaaagaggagggaactgaacctcagagagggtaagtgacttgcacaaggacacaagctagtgaggagaggaactgagaggaatggccagacaggccatcagcctctgtccccacatgctgggtctgagtgtctgacggtggacacattcccttcctggagggagagctcctagggagctgatggcagcactgagtctggaatgtgatgggagtgcattagatgacgtgggtgatctgatgagtacagaggcgtcacactgcaatgacttcatgcacatatctccccttgaatgcacagagattcagcagaggccaggagctcaagtttctggcccagtgtccccctcttcccctggggaaagccagggacacactgcctggctttgctacacctttctaggcaaaggcagtatgctctccctctccttggcctccctggctgtccacacatccacacccactcacacacacatgcacatgatcatacacattacacaagcccacatgcccacagacatgctcacactcacactcacatgcatacactgccatacacaacacacatacatacattcacacacacttgcacacacacacacacacacagttctgatggccaatcttttggggctatgttgacactgtgaagcaggtgaaacaaagtctttgccactccctgctttgggcctattatgtttgttttatagtttaactctcaaaagacaactttattttccaaaattattcaggttcccagccaggtgcagtggctcacacctgtaatcccagtactttgggaggccaaggcgggcagatcacctgaggtcaggagtttgagaccagcttggccaacatggtgaaacccagtctctactaaaaatacaaaaattagccagacatggtggcacacacatgtaatcccagctattcgggaggctgaggcaggagaatcgcttgaacccgggaggcggaggttgcagtgggccaagatcgtgccactgcactccagcctgggcaacagagcaagactccatctcaaaaaacaaaaacaaaatcattcaggttctgtaggggaccctcactgtgtcctggattccattccacttttaaagtcccaaacagcttgtatggccacttcccttgacacccaaaccagataggagtcttaaatgacacagagtattgatggtttctttaaaaggaaatccactctcaatgggaagctggataacttcgcatccagatttcatccatcttgggctttggtggctgctgtttgtttttgtgcaggagaatctctcccagccaacgtcgatttcactaacacagtggttaacctttgctctctactcctgcatcaatcttccgcctaccgcatgttgagccatgctgctttctggcattccttttggattttcagtttactacccaactaccagtcctaataacatcagataaaagggcttccgctgtgctgcacttgttttcaaaaactataaatgccatcgacccagagttaagtccagcctcagagagacagaatataaatacccaagtggccctgggccactgagttcctcagacattatgtgctatgggagttccagaaagggggattgcctggttttgagtgcagaaggcttcctggaggaggcgagatttctgatgggcctctgttatgagctaaattgagtccaccccaaaattcagatgttcaaatcctaacctgtagtacctaagcatgtggccttatttggaagcagaagcataacagaggtaattcgttaagatgaggtcacagtggaagagggtggaccccaatctgatacaactcgtgtccttataaaaagcagaaatttgaagacagacacacaagaagatgaaggcagagacctggctgatgcggctataagccaaggaacgccaaagattgccagcaaagcaccagcagccagggagaggcctcgaacaaattctccctcccagcaaaaaggaggaaggaaggaacctccaaaagaagcaggccaggcacagtggctcacgcctgtaatcccagtactttgggaggttaaggcaggcggatcacctgagatcaagagttcaagaccagcctggccaacatggtgaaacctcatctctacagaaaaatacaaaaattagtcaggtgtagtggcgtgcacctgtagtcccagttactcgggaggctgaggcaagagaatcgcttgaacctgggaggtggaggttgcagtgagccaagatcgtgccattgcactccagcctgggtgacagagcgagactccatctcagaaaaacaaaaaagaaccctactgacacctggatttcagacttccagcctccagaactgtgagatgttacatttctgtcatttaaacacccagtttgtagtactttgttgcaacagctctagtgagctaatacagccttgtaggacaggtaggaatttgtaatgcacagagaaagccaactggccacagttgttgaaaataatagaatcgaagcgcccctatcactaccaccccaggccatcactttcaaagctgttcaaaatgatgcagccgcgtgagaaggccggaaggccagggcgggagatgggctccaggtgggcccaggctgcctgcagaaccagcttgcctcactgcctggttgccaaggagcacctgtggctaggaggagatgcccaggaagaaaatttggccacatccctgcctgcctccctggcaatgggtgatgctctctgccagctggcccagctcccccaccacatacctggctaggagtcagtaggaaaacagtgtgtgtttgtagggctctgcactgaagggcattagatccatgcaaaggctaataaattagagataagtgggatttgtagatttgctggaggttagagctgcagggtctggcatcagctctgggtcttttccatggccccaggctggctcaggtgtgagctgaagaggcaaaactgtctgtttaggttgcattgggttcccctgaaagatctgttgaagtcctaacctcgggtacctctgtttgtgctatttgcaaacaggctctttgcagatgtaatcaaggaaagatgaggcaacgctgatttagtcaggccttaatccagtgactggtgtcttcataagacaaggaaatctggacacagacacacaaagaggaaaaagccaaagacacagagacacatgtacacagggagaactccatgggacaacgcaggcacagatcggagtgacgcggctgcaagccaaggagcgccaagattgccagcaaccccctggggctgcaagaggtgagaaggagccttcggagggaacatgcactgctgattccttgattccagatttctgacctccagaagcatgggagaacagatttcccttgtttgaaggcacccagtctgtggtccttcatcatggcagccctcaggaatggatacaggcccttccctgcctgcctggtggagcagcctccaaggggagcctttgctagcaggaagaggcatcgcatggagctcagacccgcctcagaggaacttctctcagcctcctctctccgcacacccgaccaaggtgtgaaatccctcccctttacctctgccacttgcaggtggcaggatgctggagctgtccctgcctctttgtaaagtgagggaagggcagccctctctgctctttttttttttttttttgagacagagtctcactctgtctcccaggctggagtgcaatagcacgatctcggctcactgcaacctccgcctcccaggttcaagcgattctcctgcctcaacctcctgagtagctggaattacaggtgcctgccaccacgcccagctaattttgtattgttagtagagccagggtttcaccatgtcggccaggctagtctcaaactcctgacctcaggtgatccacctgcctcggcctcccaaagtgctgcgattacagacatgagccaccacgcccggcctgctccacttctaaggcttcttgtgacaatgtaagagaaaggagatgacagagctttgcaacgggaggagggctatgtgttctggtgaccaattcactgtcttgtgtcgggacaggaagaagcccttcatacgggcagcaggctgggagccagggaggaggaaagatcacgatccactccctggtacatggcccttctgcaccccgcagtctccttccaggtgccacaacgagaaggcacacatccttggcacagcacttgaggcttttcaccactggctgcactcacccctccagactcactgccttgcaccaacccttttccgcccaccccactctatgctgtccacagcctccaccccagccacctgattctgcaggccaatgtcacattcttccagtccaggttctattctggcatttcttgtcattattttgctgagaatgtgtctctcttgactttgaacttattgagagcaggaatcatgactcagccatatatcccagcacttggcccagggcctgtcgtttccagggtaggtggtctaggctgattgaaggaatggcatttagtctttaaaatgaaagcatgttgcctagcttggttatttttgaactctataatcaaggactacgtttacctgaatagcctctgcagaacaccaattccgtaaggtgcttcacacacacacaccaattctatcatttaatacattttggaaaggctacatactactacagcctcttttacagattagcaatgtccatgagcgcactaaaggttgagacattctgcagtgaagaagcctatttcattttgtttaaccaagtatttctcaaatttatttgatcatatgtggcagaaaatgctgtgtctggcattcttcatttccctcttcctcctttaacatggaacccctgatgtctttagcttggcacatcgccacccagaataaaaactacctttcccagctcttcctgcagctaggggcagccctgggataaattctggacaatgaaatacaggcagaagtaaatcatatacgatttccatgaagggaccttaaacagaagtgtgcccttctcttccccacacattcctcctcctgtctgaaatgtagatgcaactgctggcatttgagcagccatcttgggccatgtggtagcttcttatggatgatctaggactaattcaagggtctagatttacctccaaactttgtttatctacaaaaaataaaactctatcttcttaaagc

SEQ ID NO: 8388 - protein, 60 aa, Homo sapiens [sequence omitted]

SEQ ID NO: 8389 - DNA, 2522 bp, Homo sapiens
cccctcagccaccgcctcctcctccaccagcaccactccctccggggcaccccggtccctgcagagtccctggccggcgccgcctccgctgcggccccctgaatcccgagcctgcctcgcccaagctggtaggacagaaggacagacagattcctctagcctagcgctccgccgctgctgccttacgcggccccgcgtcgggagaactgggatcgccccaagagcaccgcgaggggtcatctcaggctggctgcatgcctcagctgaagatcccagctcctgtcaatgccacctctctgcttgactgtctccttccagattcgagcaggtatgagctgggaagaatgaaggcagggcatgcccgtgtgccagctctgcacagctggatagctgaggaaagatgtggaggagaagccggggattgtgtggaagtctaagggtgttgtttgccctttgggttccagaagatgcatgccaggaccctgggtggcactgccaggaagcaacagagaggagataaaactcacagcagacagacttgccttaacaacaactcccttgaattaaaacacgcttttcaagaaaacaaattatcagttcgatcagcaaacagcagagaagtttctctcataatggcaaagaagggccgggttgctgaccagtgaaagagcttcagaaaaggagaggggagatgagatggccagaaggagcaagagcaccgtacatccctggacaacctcattctaatgggtcaggggctgggacgtgcattttggagtgcaggagaagtggcaactcacaaatgctagattttcttctagagatgaccaagctgtagttcttaaagcagtggcactagggcagaaaactctcacactttgatgtgcacacacagcccctggggatcttgttgacatgtagattctgattccgtaagtcgggctgagattctgcatttccaacaagctcctagatgaggtccattttgctggtccatgaaacacacttagaataagtagcaaggtataggaggatactgactttgctcagtgatgcttgggcttccgtccaaactaaaataaaacaaaagcagacataaatggcccaattcaacagcctgagaagtttggtgataatgacccaagccctggcctggtgaccaagtggctgctcagagagctctatctccaaactcctgacctcaggtgatccacctgcctcggcctcccaaagtgctgcgattacagacatgagccaccacgcccggcctgctccacttctaaggcttcttgtgacaatgtaagagaaaggagatgacagagctttgcaacgggaggagggctatgtgttctggtgaccaattcactgtcttgtgtcgggacaggaagaagcccttcatacgggcagcaggctgggagccagggaggaggaaagatcacgatccactccctggtacatggcccttctgcaccccgcagtctccttccaggtgccacaacgagaaggcacacatccttggcacagcacttgaggcttttcaccactggctgcactcacccctccagactcactgccttgcaccaacccttttccgcccaccccactctatgctgtccacagcctccaccccagccacctgattctgcaggccaatgtcacattcttccagtccaggttctattctggcatttcttgtcattattttgctgagaatgtgtctctcttgactttgaacttattgagagcaggaatcatgactcagccatatatcccagcacttggcccagggcctgtcgtttccagggtaggtggtctaggctgattgaaggaatggcatttagtctttaaaatgaaagcatgttgcctagcttggttatttttgaactctataatcaaggactacgtttacctgaatagcctctgcagaacaccaattccgtaaggtgcttcacacacacacaccaattctatcatttaatacattttggaaaggctacatactactacagcctcttttacagattagcaatgtccatgagcgcactaaaggttgagacattctgcagtgaagaagcctatttcattttgtttaaccaagtatttctcaaatttatttgatcatatgtggcagaaaatgctgtgtctggcattcttcatttccctcttcctcctttaacatggaacccctgatgtctttagcttggcacatcgccacccagaataaaaactacctttcccagctcttcctgcagctaggggcagccctgggataaattctggacaatgaaatacaggcagaagtaaatcatatacgatttccatgaagggaccttaaacagaagtgtgcccttctcttccccacacattcctcctcctgtctgaaatgtagatgcaactgctggcatttgagcagccatcttgggccatgtggtagcttcttatggatgatctaggactaattcaagggtctagatttacctccaaactttgtttatctacaaaaaataaaactctatcttctt

SEQ ID NO: 8390 - protein, 60 aa, Homo sapiens [sequence omitted]

SEQ ID NO: 8391 - DNA, 4551 bp, Homo sapiens
actccccctcagccaccgcctcctcctccaccagcaccactccctccggggcaccccggtccctgcagagtccctggccggcgccgcctccgctgcggccccctgaatcccgagcctgcctcgcccaagctggtaggacagaaggacagacagattcctctagcctagcgctccgccgctgctgccttacgcggccccgcgtcgggagaactgggatcgccccaagagcaccgcgaggggtcatctcaggctggctgcatgcctcagctgaagatcccagctcctgtcaatgccacctctctgcttgactgtctccttccagattcgagcaggtatgagctgggaagaatgaaggcagggcatgcccgtgtgccagctctgcacagctggatagctgaggaaagatgtggaggagaagccggggattgtgtggaagtctaagggtgttgtttgccctttgggttccagaagatgcatgccaggaccctgggtggcactgccaggaagcaacagagaggagataaaactcacagcagacagacttgccttaacaacaactcccttgaattaaaacacgcttttcaagaaaacaaattatcagttcgatcagcaaacagcagagaagtttctctcataatggcaaagaagggccgggttgctgaccagtgaaagagcttcagaaaaggagaggggagatgagatggccagaaggagcaagagcaccgtacatccctggacaacctcattctaatgggtcaggggctgggacgtgcattttggagtgcaggagaagtggcaactcacaaatgctagattttcttctagagatgaccaagctgtagttcttaaagcagtggcactagggcagaaaactctcacactttgatgtgcacacacagcccctggggatcttgttgacatgtagattctgattccgtaagtcgggctgagattctgcatttccaacaagctcctagatgaggtccattttgctggtccatgaaacacacttagaataagtagcaaggtataggaggatactgactttgctcagtgatgcttgggcttccgtccaaactaaaataaaacaaaagcagacataaatggcccaattcaacagcctgagaagtttggtgataatgacccaagccctggcctggtgaccaagtggctgctcagagagctctatctccaaactccttcccttcctgcctcccctccaagagtgagtaatgtgccagagttcattggggtctgctgtccccagggaaaggtggcccagttgccaagtgcaagtgtatagaacggcttacctgtgcaaagctatcagccctggacctatgggcctagaaacattacttgccactcactcactcactatcattcattcatttctgcaacaaacacttcctgagcatatgctatacaccaggccctgagctcagctctggggatacaggatgaatggcagattgtgccatcaggaagccgactgcacagtcagcccgctggagcacatatgaaaaacaatacggatgttttgatttattatcatattgatcattatgatggtagcgtatacttttggaaggcttgccatacattaggcattgtgctaagcacattatatggttaatctcatcaatcttcacaacctatgtggcaggtactattattaaacccacttcaaagaggagggaactgaacctcagagagggtaagtgacttgcacaaggacacaagctagtgaggagaggaactgagaggaatggccagacaggccatcagcctctgtccccacatgctgggtctgagtgtctgacggtggacacattcccttcctggagggagagctcctagggagctgatggcagcactgagtctggaatgtgatgggagtgcattagatgacgtgggtgatctgatgagtacagaggcgtcacactgcaatgacttcatgcacatatctccccttgaatgcacagagattcagcagaggccaggagctcaagtttctggcccagtgtccccctcttcccctggggaaagccagggacacactgcctggctttgctacacctttctaggcaaaggcagtatgctctccctctccttggcctccctggctgtccacacatccacacccactcacacacacatgcacatgatcatacacattacacaagcccacatgcccacagacatgctcacactcacactcacatgcatacactgccatacacaacacacatacatacattcacacacacttgcacacacacacacacacacagttctgatggccaatcttttggggctatgttgacactgtgaagcaggtgaaacaaagtctttgccactccctgctttgggcctattatgtttgttttatagtttaactctcaaaagacaactttattttccaaaattattcaggttcccagccaggtgcagtggctcacacctgtaatcccagtactttgggaggccaaggcgggcagatcacctgaggtcaggagtttgagaccagcttggccaacatggtgaaacccagtctctactaaaaatacaaaaattagccagacatggtggcacacacatgtaatcccagctattcgggaggctgaggcaggagaatcgcttgaacccgggaggcggaggttgcagtgggccaagatcgtgccactgcactccagcctgggcaacagagcaagactccatctcaaaaaacaaaaacaaaatcattcaggttctgtaggggaccctcactgtgtcctggattccattccacttttaaagtcccaaacagcttgtatggccacttcccttgacacccaaaccagataggagtcttaaatgacacagagtattgatggtttctttaaaaggaaatccactctcaatgggaagctggataacttcgcatccagatttcatccatcttgggctttggtggctgctgtttgtttttgtgcaggagaatctctcccagccaacgtcgatttcactaacacagtggttaacctttgctctctactcctgcatcaatcttccgcctaccgcatgttgagccatgctgctttctggcattccttttggattttcagtttactacccaactaccagtcctaataacatcagataaaagggcttccgctgtgctgcacttgttttcaaaaactataaatgccatcgacccagagttaagtccagcctcagagagacagaatataaatacccaagtggccctgggccactgagttcctcagacattatgtgctatgggagttccagaaagggggattgcctggttttgagtgcagaaggcttcctggaggaggcgagatttctgatgggcctctgttatgagctaaattgagtccaccccaaaattcagatgttcaaatcctaacctgtagtacctaagcatgtggccttatttggaagcagaagcataacagaggtaattcgttaagatgaggtcacagtggaagagggtggaccccaatctgatacaactcgtgtccttataaaaagcagaaatttgaagacagacacacaagaagatgaaggcagagacctggctgatgcggctataagccaaggaacgccaaagattgccacccaccccactctatgctgtccacagcctccaccccagccacctgattctgcaggccaatgtcacattcttccagtccaggttctattctggcatttcttgtcattattttgctgagaatgtgtctctcttgactttgaacttattgagagcaggaatcatgactcagccatatatcccagcacttggcccagggcctgtcgtttccagggtaggtggtctaggctgattgaaggaatggcatttagtctttaaaatgaaagcatgttgcctagcttggttatttttgaactctataatcaaggactacgtttacctgaatagcctctgcagaacaccaattccgtaaggtgcttcacacacacacaccaattctatcatttaatacattttggaaaggctacatactactacagcctcttttacagattagcaatgtccatgagcgcactaaaggttgagacattctgcagtgaagaagcctatttcattttgtttaaccaagtatttctcaaatttatttgatcatatgtggcagaaaatgctgtgtctggcattcttcatttccctcttcctcctttaacatggaacccctgatgtctttagcttggcacatcgccacccagaataaaaactacctttcccagctcttcctgcagctaggggcagccctgggataaattctggacaatgaaatacaggcagaagtaaatcatatacgatttccatgaagggaccttaaacagaagtgtgcccttctcttccccacacattcctcctcctgtctgaaatgtagatgcaactgctggcatttgagcagccatcttgggccatgtggtagcttcttatggatgatctaggactaattcaagggtctagatttacctccaaactttgtttatctacaaaaaataaaactctatcttctt

SEQ ID NO: 8392 - protein, 60 aa, Homo sapiens [sequence omitted]

SEQ ID NO: 8393 - DNA, 498 bp, Homo sapiens
tgcggccccctgaatcccgagcctgcctcgcccaagctggtaggacagaaggacagacagattcctctagcctagcgctccgccgctgctgccttacgcggccccgcgtcgggagaactgggatcgccccaagagcaccgcgaggggtcatctcaggctggctgcatgcctcagctgaagatcccagctcctgtcaatgccacctctctgcttgactgtctccttccagattcgagcaggtatgagctgggaagaatgaaggcagggcatgcccgtgtgccagctctgcacagctggatagctgaggaaagatgtggaggagaagccggggattgtgtggaagtctaagggtgttgtttgccctttgggttccagaagatgcatgccaggaccctgggtggcactgccaggaagcaacagagaggagataaaactcacagcagacagacttgccttaacaacaactcccttgaattaaaacacgcttttcaagaaaac

SEQ ID NO: 8394 - protein, 60 aa, Homo sapiens [sequence omitted]

SEQ ID NO: 8395 - DNA, 468 bp, Homo sapiens
gaacagaacaatagtatgctctcaataaataaggatgaacgcatgattgaaatagtttaaaaatcaagacccggaaaactgaagcttaaaaaggaagagaaggacatcagaaagttgatgggtcatctcaggctggctgcatgcctcagctgaagatcccagctcctgtcaatgccacctctctgcttgactgtctccttccagattcgagcaggtatgagctgggaagaatgaaggcagggcatgcccgtgtgccagctctgcacagctggatagctgaggaaagatgtggaggagaagccggggattgtgtggaagtctaagggtgttgtttgccctttgggttccagaagatgcatgccaggaccctgggtggcactgccaggaagcaacagagaggagataaaactcacagcagacagacttgccttaacaacaactcccttgaattaaaacacgcttttcaag

SEQ ID NO: 8396 - protein, 60 aa, Homo sapiens [sequence omitted]

SEQ ID NO: 8397 - DNA, 2041 bp, Homo sapiens
ctgtttatagagtgaaccaagatgtcagttttgtattggggatatgttttacataaatagaactcatttaaaagtatggttcaagtactgctcttctttttatggggaaattgatttttaaggagcgattcttttcctatataaaagctattgaggcttagctttattcatacatgagtgatttggttataactcaatcaaaatttttatctttaaatctgagacaagtattatatttaaaactagatctattaatacattcatcactgcctgaaaatttgctgttctaatgtttgtgaattttcactcattacctagagtaaacttattgcatattttcataatcagtcaaaataataaaactaaaaacaaaaagtaaaaattagttcccaagtaaatatatcagtgtttcctgtgtttgggcagaagtgcaaagtagttttaatttctcacgttgtagaaaaagaggccaaaaaggtcaccttagtttatttttccaaaacataactttaggtattctaatgtattttgttagttgcttagaaatggaaataaaatatatgtgcttattaaataatgcacagtacactagattatagagtttatttttgcttttatgctttaaagaatgcatgcccaaaacactactaccaacaagaggattttttaaaatcacagaattgatatttatctcaagactatcttaagctaatgtacttctgttacataattaaactatttctgctattatttttaaagcagtattattttataaccaattctaaaattcagctttaaaaatattgaacataccagggtcatatcttagaattgtatataaaacaacatgtaacccattcatgaaaaacgtttttaagtattgctttttgctgctatgttctgcattgagcctagttttgccattgtcccctgaatgtagtattatctatagattatacataactacatctattgcttttggtggtaaatcaagatttagttgtaattttccagctgtgaaaatgttgccttgtatttaaaagggtttcatgaatggaaacctaagtaaaactaagctcattagtgacagacttgttttcttcttgttattcctccagcaactccctcaccaccacgcctccctgcctaccatccccggaagggtgcttattctttaacaaagagaatctaaaaaaaaaaacaaaaaactgttgtctaatatatctacagtaaatgttacactagagcttttattttcctctgtagcttttcagaagaagcaatttaccttggatttgtaaatcaagctgaaacttttttgatgttcatgtactcatatgtcttgtaggtggtaggtgtcacttgtgtgtatgtgtaagtgaagtatgatgcatgctcattcacttggtccctttgaaataagggaaaggatcacagtgctgctgggccatgatggtatgtagaagggtctgtcagcacacatggaaagcccccatttgcacagatgtagaactttaataatccagatgcaatcattggaagtatttaatatgcaattggtagcaccttagctaattaatctgcatatgaagcattttctgatatatttaataagaggtatagaagctcttcaagcattaaaatagagttgatgtttcattccatttgttttatccatcaaaaaatgcactctcacagtggagttgaagtctaatacatgatacatgtgggcctgttagtcttcgaagcttccagatggtttgtgttttgaggtacaaaaaaatgctgcagatctagaaatgcatatatttagcgggtatttgaaagatagaagcattatttataactgaagagtataacacttatcttcttaagtaaatgctctcataacttgtatacatttttgcaggtacaaattcaaaagtatgtaagcattgtataatgtgacaattgtataatttatgtaatctgatgcatgaatcagaatttttatataatatatgattattgacttatagttgattaaagtgtttaaacttaa

SEQ ID NO: 8398 - protein, 59 aa, Homo sapiens
MKNVFKYCFLLLCSALSLVLPLSPECSIIYRLYITTSIAFGGKSRFSCNFPAVKMLPCI

SEQ ID NO: 8399 - DNA, 4367 bp, Homo sapiens
gctactaagaagtcgggatgctgtccaatgctggcatgctgcaaaactcctatgacacatatacattttcatatgagtccaacaagcaatgaagacctcaggaaaatcccggacagcaacccctttgatgccactgcagggtatcgtagtctgacctatgaagaggttctacaggagctggtgaaacacaaagaactccttgtaagggtaatggaagaaacgcccagtattctcagagtgccgtatgaaccatccaggaaagctggcaaattctctaacagttaataaagccaattgtattgtattgataattggacaaagagagagaaagaaagaaggaaggaaggaaaaacttgttactgaaagagactacactatcaggtttcattacatattctcctttattgtgaagagtagttttacctgtaaatattagcagggactatcaagagtgacctttgaagcaagctaaatcatttaaatgtttaaattgaaaatgggccagattctcaatgaataagtggttccttaggactcactcaggtgctggtactgacccactaatctgccataggcccagaaatatcttcagaagtacgtgagttgttcctcaggaatagatttttcataaagcagaattgatcctgtggctggtttctcagaaatcagtttgtagaaatatttagcttcaggaatactgctcgttataaacactactaaaaaaacagtttatattttatatacacatatgtacatgaatatatatatattcatgtatcttgtatataaaatataggcatatacctcatatatacatgtgtttttagaacatttagaaacaattgattgcctctaaagttaggctaccaatttcttgatttgaaaatgtgtgtgctctattgatgcaagacaagtcatccttcctactgtcatggtttgttatagagaagctgcttcaaatcactcttgactacatggaccttggtttcaaagtgagctgctatatattattctagcatcaaagtttttctctttccccaaaagtgatgatctcaagtccttttttaaagaatgacaaattttaggagacttcattaacttcataacagcatgaatttatttgaattaattaacatttgagtttgtttaaggtataagcagaagataagctaatatagcttgttttgttgaaattctgcatgcctttaaatcactagcaaagcaaatattataaagttatatctgaaaataattgtgggaagtatgtgattgcctggtgtgtctgataacccaaagcagcgggcagattccaggaatgaagaattaggcttggtttcaggttacataaataatagagcagatggttgcctttgggtcttgaaccaaaataagacttactaaaggaagagtgagtttttagaagagaactttacgagcgtgacattatgcattactccacatccaccctttaagaattgatttattacaaaattatgttctattttaaagtccactcccccaaaatactgatttcttccatggattatttttatatgatttgtacaaattttttctgaaatttaaattgacaagcaatgttataaaaatattgctaatcttctgcttatttttcagcctttaaagtctgaaatactataaaacactgagagtatctatgtctttctgaatttaaaatgaaaattcatgtccatatggagacttacatattccccaatctttccatgaattgcatttttttctaatacttatctctgttaagactccattgaaagttaaacaaaaagccgatataatagtttgggttttttttttttgcttattttagtattttgaatcagagaatacttggccaagctcgtatttgtaaactaaaaccccttgttatttgtatcttctgcatttcagttttactgtaagaacatacattttgaaattatgaacatttttttcataaaaattaaatgctttaagaaatggagaaggaaaaatagcttttatcaatttttttctcctcaagattctgtaataaacctcaaagtctggtgtagaatggtattttcccgtttgaggtcttggtagttttttttttttttttaaacatggtgccacttttaattaactaaatgttacaaaattctcagcatttgtttttgtctggtagtattattgagtcttttcatacacttcttaaaatgtgaaaatctatgttttcagtattatgacagtatctgcagatactataataatatgctttggccaaatttgctgtttatagagtgaaccaagatgtcagttttgtattggggatatgttttacataaatagaactcatttaaaagtatggttcaagtactgctcttctttttatggggaaattgatttttaaggagcgattcttttcctatataaaagctattgaggcttagctttattcatacatgagtgatttggttataactcaatcaaaatttttatctttaaatctgagacaagtattatatttaaaactagatctattaatacattcatcactgcctgaaaatttgctgttctaatgtttgtgaattttcactcattacctagagtaaacttattgcatattttcataatcagtcaaaataataaaactaaaaacaaaaagtaaaaattagttcccaagtaaatatatcagtgtttcctgtgtttgggcagaagtgcaaagtagttttaatttctcacgttgtagaaaaagaggccaaaaaggtcaccttagtttatttttccaaaacataactttaggtattctaatgtattttgttagttgcttagaaatggaaataaaatatatgtgcttattaaataatgcacagtacactagattatagagtttatttttgcttttatgctttaaagaatgcatgcccaaaacactactaccaacaagaggattttttaaaatcacagaattgatatttatctcaagactatcttaagctaatgtacttctgttacataattaaactatttctgctattatttttaaagcagtattattttataaccaattctaaaattcagctttaaaaatattgaacataccttcctaccacttacgcttcaagtttcatttattgaataccagggtcatatcttagaattgtatataaaacaacatgtaacccattcatgaaaaacgtttttaagtattgctttttgctgctatgttctgcattgagcctagttttgccattgtcccctgaatgtagtattatctatagattatacataactacatctattgcttttggtggtaaatcaagatttagttgtaattttccagctgtgaaaatgttgccttgtatttaaaagggtttcatgaatggaaacctaagtaaaactaagctcattagtgacagacttgttttcttcttgttattcctccagcaactccctcaccaccacgcctccctgcctaccatccccggaagggtgcttattctttaacaaagagaatctaaaaaaaaaaacaaaaaactgttgtctaatatatctacagtaaatgttacactagagcttttattttcctctgtagcttttcagaagaagcaatttaccttggatttgtaaatcaagctgaaacttttttgatgttcatgtactcatatgtcttgtaggtggtaggtgtcacttgtgtgtatgtgtaagtgaagtatgatgcatgctcattcacttggtccctttgaaataagggaaaggatcacagtgctgctgggccatgatggtatgtagaagggtctgtcagcacacatggaaagcccccatttgcacagatgtagaactttaataatccagatgcaatcattggaagtatttaatatgcaattggtagcaccttagctaattaatctgcatatgaagcattttctgatatatttaataagaggtatagaagctcttcaagcattaaaatagagttgatgtttcattccatttgttttatccatcaaaaaatgcactctcacagtggagttgaagtctaatacatgatacatgtgggcctgttagtcttcgaagcttccagatggtttgtgttttgaggtacaaaaaaatgctgcagatctagaaatgcatatatttagcgggtatttgaaagatagaagcattatttataactgaagagtataacacttatcttcttaagtaaatgctctcataacttgtatacatttttgcaggtacaaattcaaaagtatgtaagcattgtataatgtgacaattgtataatttatgtaatctgatgcatgaatcagaatttttatataatatatgattattgacttatagttgattaaagtgtttaaacttaa

SEQ ID NO: 8400 - protein, 85 aa, Homo sapiens
MLACCKTPMTHIHFHMSPTSNEDLRKIPDSNPFDATAGYRSLTYEEVLQELVKHKELLVRVMEETPSILRVPYEPSRKAGKFSNS

SEQ ID NO: 8401 - DNA, 6217 bp, Homo sapiens
gaggtttgcgagagggagcgaggccgcgttagccgccggcggttcgtattaccggggtcgggaggaggagccgggccgagcctgcggacgaacgccgggcgggcgggaggcgcggaggcagcggaggctgctcggccgcaaggaggcaggcgggaggccaggggtgcagaattggggcgggggctcccttcacccccgcagccctccgcccgggtccgtgtggccaggcctcacgtgccccgcaggcctggggaaggtggagacaggggcgggggtccgcgcagaggcctgcacggcgcggccaggtgatggtgggcctctgtgtttctccagacgaaaggggacccccggagcggccgtgcccctgggctgcccccgcgaggcgttttgacatcagccatagggaagtcggggagccctgagcctgcctgtttccgttaagtgtccttaggatgcagtgattaaggaattaggctctccctccgggaggggcactgcctgtgctagggaactcgggggcagagaaacaggacaggatgatgctgtccgagcaagcccaaaagtggtttccaacccacgtgcaggtcacagtgctccaagccaaagatctgaagccaaaaggcaaaagtggtaccaatgacacatacactataattcagctgggcaaggaaaagtactccacctctgtagctgagaaaacccttgagccagtttggaaggaggaggcctctttcgagctacctggattgctaattcagggaagtccagagaaatacattcttttccttatagttatgcacaggtccctggtgggtctggataaatttttagggcaggtggcaatcaatctcaatgacatctttgaggacaaacaaagaaggaaaacagagtggtttagattagaatccaaacaaggaaaacgaatcaaaaacaggggtgagataaaggtcaatattcagtttatgaggaacaatatgaccgcaagtatgtttgacttatcaatgaaggacaaaaccagatctccttttgcaaagttaaaagataagatgaagggtagaaaaaatgatggaacattttctgatacgtcttctgcaatcattccaagtactcacatgcccgatgccaatagtgaattttcaagtggtgaaatacagatgaaatccaaaccaaaaaagccttttctcttgggtcctcagcgactctcgtcagcgcattcaatgtctgatttatctgggtcccatatgtcttctgagaaactgaaggctggcaccataggtcaaacacatcttctcggacaccagttagattcctttggaacagttccagaaagtggaagtctcaaatctccacacagaagaacattaagctttgatacttctaaaatgaaccaacctgacagcattgtggatgaaggtgaattgtgtttcggaagacaaaatgacccatttacaaatgtgactgcttcattaccccaaaaatttgcaacactgccaaggaagaaaaatccatttgaagaaagcagcgaaacatgggacagcagcatgaatttattttcaaaaccaattgaaataagaaaagaaaataaaagagagaaaagggagaaagttagcctgtttgaaagagtgactggaaaaaaagatagcagaagatctgataaacttaacaatgggggatctgatagcccttgtgacttgaaatcacctaatgcatttagtgaaaatcgccaggactattttgattatgagtcaaccaatccatttacagcaaaattcagggcttcaaatataatgccatcttcaagaaatactttgctgacccctgcagtagctgaatggagaggatctttgagatgggcagagctttttcatatgagtccaacaagcaatgaagacctcaggaaaatcccggacagcaacccctttgatgccactgcagggtatcgtagtctgacctatgaagaggttctacaggagctggtgaaacacaaagaactccttaggaggaaagacacccacatccgggaactcgaggactacatcgacaacctccttgtaagggtaatggaagaaacgcccagtattctcagagtgccgtatgaaccatccaggaaagctggcaaattctctaacagttaataaagccaattgtattgtattgataattggacaaagagagagaaagaaagaaggaaggaaggaaaaacttgttactgaaagagactacactatcaggtttcattacatattctcctttattgtgaagagtagttttacctgtaaatattagcagggactatcaagagtgacctttgaagcaagctaaatcatttaaatgtttaaattgaaaatgggccagattctcaatgaataagtggttccttaggactcactcaggtgctggtactgacccactaatctgccataggcccagaaatatcttcagaagtacgtgagttgttcctcaggaatagatttttcataaagcagaattgatcctgtggctggtttctcagaaatcagtttgtagaaatatttagcttcaggaatactgctcgttataaacactactaaaaaaacagtttatattttatatacacatatgtacatgaatatatatatattcatgtatcttgtatataaaatataggcatatacctcatatatacatgtgtttttagaacatttagaaacaattgattgcctctaaagttaggctaccaatttcttgatttgaaaatgtgtgtgctctattgatgcaagacaagtcatccttcctactgtcatggtttgttatagagaagctgcttcaaatcactcttgactacatggaccttggtttcaaagtgagctgctatatattattctagcatcaaagtttttctctttccccaaaagtgatgatctcaagtccttttttaaagaatgacaaattttaggagacttcattaacttcataacagcatgaatttatttgaattaattaacatttgagtttgtttaaggtataagcagaagataagctaatatagcttgttttgttgaaattctgcatgcctttaaatcactagcaaagcaaatattataaagttatatctgaaaataattgtgggaagtatgtgattgcctggtgtgtctgataacccaaagcagcgggcagattccaggaatgaagaattaggcttggtttcaggttacataaataatagagcagatggttgcctttgggtcttgaaccaaaataagacttactaaaggaagagtgagtttttagaagagaactttacgagcgtgacattatgcattactccacatccaccctttaagaattgatttattacaaaattatgttctattttaaagtccactcccccaaaatactgatttcttccatggattatttttatatgatttgtacaaattttttctgaaatttaaattgacaagcaatgttataaaaatattgctaatcttctgcttatttttcagcctttaaagtctgaaatactataaaacactgagagtatctatgtctttctgaatttaaaatgaaaattcatgtccatatggagacttacatattccccaatctttccatgaattgcatttttttctaatacttatctctgttaagactccattgaaagttaaacaaaaagccgatataatagtttgggttttttttttttgcttattttagtattttgaatcagagaatacttggccaagctcgtatttgtaaactaaaaccccttgttatttgtatcttctgcatttcagttttactgtaagaacatacattttgaaattatgaacatttttttcataaaaattaaatgctttaagaaatggagaaggaaaaatagcttttatcaatttttttctcctcaagattctgtaataaacctcaaagtctggtgtagaatggtattttcccgtttgaggtcttggtagttttttttttttttttaaacatggtgccacttttaattaactaaatgttacaaaattctcagcatttgtttttgtctggtagtattattgagtcttttcatacacttcttaaaatgtgaaaatctatgttttcagtattatgacagtatctgcagatactataataatatgctttggccaaatttgctgtttatagagtgaaccaagatgtcagttttgtattggggatatgttttacataaatagaactcatttaaaagtatggttcaagtactgctcttctttttatggggaaattgatttttaaggagcgattcttttcctatataaaagctattgaggcttagctttattcatacatgagtgatttggttataactcaatcaaaatttttatctttaaatctgagacaagtattatatttaaaactagatctattaatacattcatcactgcctgaaaatttgctgttctaatgtttgtgaattttcactcattacctagagtaaacttattgcatattttcataatcagtcaaaataataaaactaaaaacaaaaagtaaaaattagttcccaagtaaatatatcagtgtttcctgtgtttgggcagaagtgcaaagtagttttaatttctcacgttgtagaaaaagaggccaaaaaggtcaccttagtttatttttccaaaacataactttaggtattctaatgtattttgttagttgcttagaaatggaaataaaatatatgtgcttattaaataatgcacagtacactagattatagagtttatttttgcttttatgctttaaagaatgcatgcccaaaacactactaccaacaagaggattttttaaaatcacagaattgatatttatctcaagactatcttaagctaatgtacttctgttacataattaaactatttctgctattatttttaaagcagtattattttataaccaattctaaaattcagctttaaaaatattgaacataccttcctaccacttacgcttcaagtttcatttattgaataccagggtcatatcttagaattgtatataaaacaacatgtaacccattcatgaaaaacgtttttaagtattgctttttgctgctatgttctgcattgagcctagttttgccattgtcccctgaatgtagtattatctatagattatacataactacatctattgcttttggtggtaaatcaagatttagttgtaattttccagctgtgaaaatgttgccttgtatttaaaagggtttcatgaatggaaacctaagtaaaactaagctcattagtgacagacttgttttcttcttgttattcctccagcaactccctcaccaccacgcctccctgcctaccatccccggaagggtgcttattctttaacaaagagaatctaaaaaaaaaaacaaaaaactgttgtctaatatatctacagtaaatgttacactagagcttttattttcctctgtagcttttcagaagaagcaatttaccttggatttgtaaatcaagctgaaacttttttgatgttcatgtactcatatgtcttgtaggtggtaggtgtcacttgtgtgtatgtgtaagtgaagtatgatgcatgctcattcacttggtccctttgaaataagggaaaggatcacagtgctgctgggccatgatggtatgtagaagggtctgtcagcacacatggaaagcccccatttgcacagatgtagaactttaataatccagatgcaatcattggaagtatttaatatgcaattggtagcaccttagctaattaatctgcatatgaagcattttctgatatatttaataagaggtatagaagctcttcaagcattaaaatagagttgatgtttcattccatttgttttatccatcaaaaaatgcactctcacagtggagttgaagtctaatacatgatacatgtgggcctgttagtcttcgaagcttccagatggtttgtgttttgaggtacaaaaaaatgctgcagatctagaaatgcatatatttagcgggtatttgaaagatagaagcattatttataactgaagagtataacacttatcttcttaagtaaatgctctcataacttgtatacatttttgcaggtacaaattcaaaagtatgtaagcattgtataatgtgacaattgtataatttatgtaatctgatgcatgaatcagaatttttatataatatatgattattgacttatagttgattaaagtgtttaaacttaa

SEQ ID NO: 8402 - protein, 532 aa, Homo sapiens
MMLSEQAQKWFPTHVQVTVLQAKDLKPKGKSGTNDTYTIIQLGKEKYSTSVAEKTLEPVWKEEASFELPGLLIQGSPEKYILFLIVMHRSLVGLDKFLGQVAINLNDIFEDKQRRKTEWFRLESKQGKRIKNRGEIKVNIQFMRNNMTASMFDLSMKDKTRSPFAKLKDKMKGRKNDGTFSDTSSAIIPSTHMPDANSEFSSGEIQMKSKPKKPFLLGPQRLSSAHSMSDLSGSHMSSEKLKAGTIGQTHLLGHQLDSFGTVPESGSLKSPHRRTLSFDTSKMNQPDSIVDEGELCFGRQNDPFTNVTASLPQKFATLPRKKNPFEESSETWDSSMNLFSKPIEIRKENKREKREKVSLFERVTGKKDSRRSDKLNNGGSDSPCDLKSPNAFSENRQDYFDYESTNPFTAKFRASNIMPSSRNTLLTPAVAEWRGSLRWAELFHMSPTSNEDLRKIPDSNPFDATAGYRSLTYEEVLQELVKHKELLRRKDTHIRELEDYIDNLLVRVMEETPSILRVPYEPSRKAGKFSNS

SEQ ID NO: 8403 - DNA, 6157 bp, Homo sapiens
gaggtttgcgagagggagcgaggccgcgttagccgccggcggttcgtattaccggggtcgggaggaggagccgggccgagcctgcggacgaacgccgggcgggcgggaggcgcggaggcagcggaggctgctcggccgcaaggaggcaggcgggaggccaggggtgcagaattggggcgggggctcccttcacccccgcagccctccgcccgggtccgtgtggccaggcctcacgtgccccgcaggcctggggaaggtggagacaggggcgggggtccgcgcagaggcctgcacggcgcggccaggtgatggtgggcctctgtgtttctccagacgaaaggggacccccggagcggccgtgcccctgggctgcccccgcgaggcgttttgacatcagccatagggaagtcggggagccctgagcctgcctgtttccgttaagtgtccttaggatgcagtgattaaggaattaggctctccctccgggaggggcactgcctgtgctagggaactcgggggcagagaaacaggacaggatgatgctgtccgagcaagcccaaaagtggtttccaacccacgtgcaggtcacagtgctccaagccaaagatctgaagccaaaaggcaaaagtggtaccaatgacacatacactataattcagctgggcaaggaaaagtactccacctctgtagctgagaaaacccttgagccagtttggaaggaggaggcctctttcgagctacctggattgctaattcagggaagtccagagaaatacattcttttccttatagttatgcacaggtccctggtgggtctggataaatttttagggcaggtggcaatcaatctcaatgacatctttgaggacaaacaaagaaggaaaacagagtggtttagattagaatccaaacaaggaaaacgaatcaaaaacaggggtgagataaaggtcaatattcagtttatgaggaacaatatgaccgcaagtatgtttgacttatcaatgaaggacaaaaccagatctccttttgcaaagttaaaagataagatgaagggtagaaaaaatgatggaacattttctgatacgtcttctgcaatcattccaagtactcacatgcccgatgccaatagtgaattttcaagtggtgaaatacagatgaaatccaaaccaaaaaagccttttctcttgggtcctcagcgactctcgtcagcgcattcaatgtctgatttatctgggtcccatatgtcttctgagaaactgaaggctggcaccataggtcaaacacatcttctcggacaccagttagattcctttggaacagttccagaaagtggaagtctcaaatctccacacagaagaacattaagctttgatacttctaaaatgaaccaacctgacagcattgtggatgaaggtgaattgtgtttcggaagacaaaatgacccatttacaaatgtgactgcttcattaccccaaaaatttgcaacactgccaaggaagaaaaatccatttgaagaaagcagcgaaacatgggacagcagcatgaatttattttcaaaaccaattgaaataagaaaagaaaataaaagagagaaaagggagaaagttagcctgtttgaaagagtgactggaaaaaaagatagcagaagatctgataaacttaacaatgggggatctgatagcccttgtgacttgaaatcacctaatgcatttagtgaaaatcgccaggactattttgattatgagtcaaccaatccatttacagcaaaattcagggcttcaaatataatgccatcttcaagttttcatatgagtccaacaagcaatgaagacctcaggaaaatcccggacagcaacccctttgatgccactgcagggtatcgtagtctgacctatgaagaggttctacaggagctggtgaaacacaaagaactccttaggaggaaagacacccacatccgggaactcgaggactacatcgacaacctccttgtaagggtaatggaagaaacgcccagtattctcagagtgccgtatgaaccatccaggaaagctggcaaattctctaacagttaataaagccaattgtattgtattgataattggacaaagagagagaaagaaagaaggaaggaaggaaaaacttgttactgaaagagactacactatcaggtttcattacatattctcctttattgtgaagagtagttttacctgtaaatattagcagggactatcaagagtgacctttgaagcaagctaaatcatttaaatgtttaaattgaaaatgggccagattctcaatgaataagtggttccttaggactcactcaggtgctggtactgacccactaatctgccataggcccagaaatatcttcagaagtacgtgagttgttcctcaggaatagatttttcataaagcagaattgatcctgtggctggtttctcagaaatcagtttgtagaaatatttagcttcaggaatactgctcgttataaacactactaaaaaaacagtttatattttatatacacatatgtacatgaatatatatatattcatgtatcttgtatataaaatataggcatatacctcatatatacatgtgtttttagaacatttagaaacaattgattgcctctaaagttaggctaccaatttcttgatttgaaaatgtgtgtgctctattgatgcaagacaagtcatccttcctactgtcatggtttgttatagagaagctgcttcaaatcactcttgactacatggaccttggtttcaaagtgagctgctatatattattctagcatcaaagtttttctctttccccaaaagtgatgatctcaagtccttttttaaagaatgacaaattttaggagacttcattaacttcataacagcatgaatttatttgaattaattaacatttgagtttgtttaaggtataagcagaagataagctaatatagcttgttttgttgaaattctgcatgcctttaaatcactagcaaagcaaatattataaagttatatctgaaaataattgtgggaagtatgtgattgcctggtgtgtctgataacccaaagcagcgggcagattccaggaatgaagaattaggcttggtttcaggttacataaataatagagcagatggttgcctttgggtcttgaaccaaaataagacttactaaaggaagagtgagtttttagaagagaactttacgagcgtgacattatgcattactccacatccaccctttaagaattgatttattacaaaattatgttctattttaaagtccactcccccaaaatactgatttcttccatggattatttttatatgatttgtacaaattttttctgaaatttaaattgacaagcaatgttataaaaatattgctaatcttctgcttatttttcagcctttaaagtctgaaatactataaaacactgagagtatctatgtctttctgaatttaaaatgaaaattcatgtccatatggagacttacatattccccaatctttccatgaattgcatttttttctaatacttatctctgttaagactccattgaaagttaaacaaaaagccgatataatagtttgggttttttttttttgcttattttagtattttgaatcagagaatacttggccaagctcgtatttgtaaactaaaaccccttgttatttgtatcttctgcatttcagttttactgtaagaacatacattttgaaattatgaacatttttttcataaaaattaaatgctttaagaaatggagaaggaaaaatagcttttatcaatttttttctcctcaagattctgtaataaacctcaaagtctggtgtagaatggtattttcccgtttgaggtcttggtagttttttttttttttttaaacatggtgccacttttaattaactaaatgttacaaaattctcagcatttgtttttgtctggtagtattattgagtcttttcatacacttcttaaaatgtgaaaatctatgttttcagtattatgacagtatctgcagatactataataatatgctttggccaaatttgctgtttatagagtgaaccaagatgtcagttttgtattggggatatgttttacataaatagaactcatttaaaagtatggttcaagtactgctcttctttttatggggaaattgatttttaaggagcgattcttttcctatataaaagctattgaggcttagctttattcatacatgagtgatttggttataactcaatcaaaatttttatctttaaatctgagacaagtattatatttaaaactagatctattaatacattcatcactgcctgaaaatttgctgttctaatgtttgtgaattttcactcattacctagagtaaacttattgcatattttcataatcagtcaaaataataaaactaaaaacaaaaagtaaaaattagttcccaagtaaatatatcagtgtttcctgtgtttgggcagaagtgcaaagtagttttaatttctcacgttgtagaaaaagaggccaaaaaggtcaccttagtttatttttccaaaacataactttaggtattctaatgtattttgttagttgcttagaaatggaaataaaatatatgtgcttattaaataatgcacagtacactagattatagagtttatttttgcttttatgctttaaagaatgcatgcccaaaacactactaccaacaagaggattttttaaaatcacagaattgatatttatctcaagactatcttaagctaatgtacttctgttacataattaaactatttctgctattatttttaaagcagtattattttataaccaattctaaaattcagctttaaaaatattgaacataccttcctaccacttacgcttcaagtttcatttattgaataccagggtcatatcttagaattgtatataaaacaacatgtaacccattcatgaaaaacgtttttaagtattgctttttgctgctatgttctgcattgagcctagttttgccattgtcccctgaatgtagtattatctatagattatacataactacatctattgcttttggtggtaaatcaagatttagttgtaattttccagctgtgaaaatgttgccttgtatttaaaagggtttcatgaatggaaacctaagtaaaactaagctcattagtgacagacttgttttcttcttgttattcctccagcaactccctcaccaccacgcctccctgcctaccatccccggaagggtgcttattctttaacaaagagaatctaaaaaaaaaaacaaaaaactgttgtctaatatatctacagtaaatgttacactagagcttttattttcctctgtagcttttcagaagaagcaatttaccttggatttgtaaatcaagctgaaacttttttgatgttcatgtactcatatgtcttgtaggtggtaggtgtcacttgtgtgtatgtgtaagtgaagtatgatgcatgctcattcacttggtccctttgaaataagggaaaggatcacagtgctgctgggccatgatggtatgtagaagggtctgtcagcacacatggaaagcccccatttgcacagatgtagaactttaataatccagatgcaatcattggaagtatttaatatgcaattggtagcaccttagctaattaatctgcatatgaagcattttctgatatatttaataagaggtatagaagctcttcaagcattaaaatagagttgatgtttcattccatttgttttatccatcaaaaaatgcactctcacagtggagttgaagtctaatacatgatacatgtgggcctgttagtcttcgaagcttccagatggtttgtgttttgaggtacaaaaaaatgctgcagatctagaaatgcatatatttagcgggtatttgaaagatagaagcattatttataactgaagagtataacacttatcttcttaagtaaatgctctcataacttgtatacatttttgcaggtacaaattcaaaagtatgtaagcattgtataatgtgacaattgtataatttatgtaatctgatgcatgaatcagaatttttatataatatatgattattgacttatagttgattaaagtgtttaaacttaa

SEQ ID NO: 8404 - protein, 512 aa, Homo sapiens; identical to SEQ ID NO: 1207

SEQ ID NO: 8405 - DNA, 897 bp, Homo sapiens
aggctagacaaggagggctctgcaaacatatggcgtggcctggggctgtcagacagtagtgtcgctgcaggacacggaggagactggcagcgaggcagcagggtcggcaggagcccataaaggttctgatgacgcattcctcaggcccaatccgtagagcaggaggaatctaactggtgtccgagaagatgtgtttgacctatggtgccagccttcagtttctcagaagacatatgggacccagataaatcagacattgaatgcgctgacgagagtcgctgaggacccaagagaaaaggcttttttggtttggatttcatctgtatttcaccacttgaaaattcactattggcatcgggcatgtatagactcccatcaaggcacactgaccctgaaaaatggctgagctaaaataaaagctgtgtttataacgctgaaacgaaatactgagttctaaatctggtgatttatcttttgacagctacaaagtgcgacacatcaacattacattgccagatttaatttctcatcttccatttcattgataattgtaaggtttaaaatccataacaatttatatgaagttctagttggtcaatactgtgatccagtcctcatactgaaacaatgttaacttacttaaaatccaccacaaaatattcaattatttgacagatgtttaacagaaagaataagggatcattaatgattccatttaaaaaatatttcatcacgagtgctacttttacttcagattcatgcaaatatggtgcttaaaactggatcatatttcaatccaaaaaccaacgcccgaagtatacggataatttccaagaacagaaaaaccataaataagatataaactcccccaaattcaaaataaattacataacttac

SEQ ID NO: 8406 - protein, 33 aa, Homo sapiens
MFNRKNKGSLMIPFKKYFITSATFTSDSCKYGA

SEQ ID NO: 8407 - DNA, 1049 bp, Homo sapiens
catgtcatgaggctactcagaaggacacgcaaattaaaacttaggaattatttctggaattttccatttaatatttttggactatggtggttaactgaaactgtggaaagcaaaaccacagataaggggatgggactactttatttcctaagctttcagtaagtattcactgtgaatggagatcaggaattgtgctggcaaatgcgtacttaaattagacaacttagtcatattagctctgcttgcaggtccctaactaaggtagagggtatagtaaggaagttagcttggctaaaacagagatatggtggaaaggagtaaaagatatggctgaataggttaaacacacacacacgcacgcacgcacctaatgcacacacacacaccctaaattatagtgagcattgaagaccaggcagaaaagtctattaaatatttatggcatctatgaatgaattgtttctcaggattgaggtaaaacctgagagtcaatagtgatgaatgacgattattttctgctctactgtggtagttgtgaatgccatgtagcaaattcttaactactcctgaataactaaatggtatgttctgtaatattatttctagtattaattgattttccaaagcatgtatttccatttttaatgtttggtggaagagcctccctcctttttagcagatgatctcacgccaaatagttatattttaggatggtacagaaatagtatctaagatgcagacttgtaatgttttagtgatttttcatggcagtgtgccttccacttctgaggtcaggtctacctgattctccccctcttccttctttccttccttaatgagtcaattcctgtctgtgcttgtatcataccttcctcaggaggtacaaaaaaattggttacctggaatgtatatttaaatgtctttctaattttcaaatcaccataagcttgtaagcatgtagccatttttatgaaattgtgtaacatgttcattaaaagtcaaagactgtttactgtagaatttacattttgatttttaaaaagtatagt

SEQ ID NO: 8408 - protein, 51 aa, Homo sapiens
MRLLRRTRKLKLRNYFWNFPFNIFGLWWLTETVESKTTDKGMGLLYFLSFQ

SEQ ID NO: 8409 - DNA, 865 bp, Homo sapiens
ggaaaatactacaaagcaactgctattttgatttactaaatttagaaattaaactttaaaaactaaaagggtagttcagaccaatgagtacacaagaatgtgacacttaccactttctggaactgttccaaaggaatctaactggtgtccgagaagatgtgtttgacctatggtgccagccttcagtttctcagaagacatatgggacccagataaatcagacattgaatgcgctgacgagagtcgctgaggacccaagagaaaaggcttttttggtttggatttcatctgtatttcaccacttgaaaattcactattggcatcgggcatgtatagactcccatcaaggcacactgaccctgaaaaatggctgagctaaaataaaagctgtgtttataacgctgaaacgaaatactgagttctaaatctggtgatttatcttttgacagctacaaagtgcgacacatcaacattacattgccagatttaatttctcatcttccatttcattgataattgtaaggtttaaaatccataacaatttatatgaagttctagttggtcaatactgtgatccagtcctcatactgaaacaatgttaacttacttaaaatccaccacaaaatattcaattatttgacagatgtttaacagaaagaataagggatcattaatgattccatttaaaaaatatttcatcacgagtgctacttttacttcagattcatgcaaatatggtgcttaaaactggatcatatttcaatccaaaaaccaacgcccgaagtatacggataatttccaagaacagaaaaaccataaataagatataaactcccccaaattcaaaataaattacataacttac

SEQ ID NO: 8410 - protein, 96 aa, Homo sapiens
MSTQECDTYHFLELFQRNLTGVREDVFDLWCQPSVSQKTYGTQINQTLNALTRVAEDPREKAFLVWISSVFHHLKIHYWHRACIDSHQGTLTLKNG

SEQ ID NO: 8411 - DNA, 858 bp, Homo sapiens
ggaatctaactggtgtccgagaagatgtgtttgacctatggtgccagccttcagtttctcagaagacatatgggacccagataaatcagacattgaatgcgctgacgagagtcgctgaggacccaagagaaaaggcttttttggtttggatttcatctgtatttcaccacttgaaaattcactattggcatcgggcataaccaacccagacatcctctaaaggaggagatacagaagttctcttcccaggcccactcaaagggttctggctcagaccctttttccccattccttaagagagaaaaaagacatatattttcaaggtatagactcccatcaaggcacactgaccctgaaaaatggctgagctaaaataaaagctgtgtttataacgctgaaacgaaatactgagttctaaatctggtgatttatcttttgacagctacaaagtgcgacacatcaacattacattgccagatttaatttctcatcttccatttcattgataattgtaaggtttaaaatccataacaatttatatgaagttctagttggtcaatactgtgatccagtcctcatactgaaacaatgttaacttacttaaaatccaccacaaaatattcaattatttgacagatgtttaacagaaagaataagggatcattaatgattccatttaaaaaatatttcatcacgagtgctacttttacttcagattcatgcaaatatggtgcttaaaactggatcatatttcaatccaaaaaccaacgcccgaagtatacggataatttccaagaacagaaaaaccataaataagatataaactcccccaaattcaaaataaattacataacttac

SEQ ID NO: 8412 - protein, 33 aa, Homo sapiens; identical to SEQ ID NO: 8406

SEQ ID NO: 8413 - DNA, 2727 bp, Homo sapiens
agcgggctgcagggctgcgggcgcttggttcggcctggcccggccggcggctcctaacaccgggcgggcggctgcggcggcacttccgggttggccttctccatgttggtctcgggaacgtgaaggggcggggcctcgaggtcaggggtcagcacctccctggttgccgtggcgactggaggcgcgcgacgcgggcgcaatggcggggacccggggcttgatgctgcttgggcctggcccagtggcgggtcctagggacgtgggtacctgcagaggccggcaggtgagccgtgtgtaaggacaacataccagaattgaagagacattatagtctttagacttcagacacacaccacacctcaaatatatacacaactgaaaggaaaattaaggaagtttttcaaagaaccctattccgagtaagaagtgtgttgcatgaatttctaagagccagaaaatgcatgacacaggagaagatgtaccctcatctgttcagtgagagatgtgcaaatcaacatcaacacagaactgctgaagaaaaaaaatatgtctctgaaaagcaacttattcactggagatgtgaggagccatccgcacatcacaattctatagacatcaaacgcatgaagcatttcggatctgctttaagactgaggcagactttccatctggacacagccgaccatccatgtgtcattacaacccctaatgtttatatattaattatttcaatacccgtgtctttactgagtccctcctatgaagcatacatcaagacatatgtgtgatacattaactaaacttttaacagtatcttaaataggatttcaatgactaacagctcttggaaatatccaaggtaacatttgggggcaaatgtcttatgatttgattatcattggtaaatagagcatatctttttttccactaacaatgtttaagaagttaaaaaaaaatcaagaaaaccccgtatggcactagagacttattgcattaagacatcatcttaacagattgtttagttttggtaatataatttgacatctaaacataagctgagagggatctccctcaaaacctttgataatatgattcattgtcaaatgtttgttttgcctatctggcactcattaattaattctttttaatatagcttggatttactgattttgaaaaagagaattattcttattgatgttgctaaaatatccaggtggcttgaatttcaccaactagatagtttaatctagcacatttgtgtagccctaatcaaatctttactaacagatgtgagaagcccagtactggagctaatgtttgtgtctcaatgataattaaattagcttaataaggaaaataaatgaacaataatcaccaaaatttttccctaaacctgtgttatagtcttaaaaacattttttcccctatggaggcttttggtaataaaacacaaattgagggattttaattaaaagaaatttttttttcaagaactggtcatgtactaaattgcttataatcaaataatcaagtagcatttcttttattataagagcaaaacctataattaagccaaaattcaaatttgtttttaaaggttgaataatcttttgttttggccaatagtatgtggattttttttttaagtattatctctttgtagtattttctaatggataggaaatgcctttctcaggttgaatgattatttccacatagaattagttcctgcttacaacagtgctccactaatgtaatggctcggtgaattggctttataattcattaatcatagctcacattgagcttttggctccaggtgacagtgcccaccacaggccaaataacttctcatttaaaggcaatttgtacaaatagggaaggtgagaattctcacagtcccagagggattgaagagttttaaaaaaccaagataaggcattttatggaagacaggttgatggaagaaaagtggccattggaggatgaggcagatggctttccagggaggccctggagctgccaccatggggaaggccatgttgcagctgctgatcagagcacattggacggtgtttccgtgtgaacatgaagacaatgctgcctctgtttctgtgacgctgtgctctgatcttgctggaggcgaagtggtgtcagctgtgcttacaggacagtcagtggtggtagaaaagaggccagtgtgacctgtgaaggactgggcccctctcactcaacctgagtgcctgcagttgtggccacctttatttgtgtattctactgtatttatttatttgcctggctaattagctctgtgccacattcctaagctagatgtgtcccttcatgtaagtgagagggagacagaaagaaagactgaggtggggggtagggccttctaattttatttcatttctccaataaatgttcctatattaagactttagacaaagattagaaatatgatttgacagaaagtgtatggatgtgttgttctattgcattgtaagtaaagtatccatggcaatatacaaataatacagctcctacccctattctctgttgttactttcatgtgttgtcttaactttttaaatttcaagataatattgcgcttatttatttttccatgaggaggcctaggatttagcttgattagaaaagctgtggaaaatgaatgtgctaattactttaaatcaaattgaaaataaattttatcctgtttcatgc

SEQ ID NO: 8414 - protein, 108 aa, Homo sapiens
MTQEKMYPHLFSERCANQHQHRTAEEKKYVSEKQLIHWRCEEPSAHHNSIDIKRMKHFGSALRLRQTFHLDTADHPCVITTPNVYILIISIPVSLLSPSYEAYIKTYV

SEQ ID NO: 8415 - DNA, 1559 bp, Homo sapiens
ggcgactggaggcgcgcgacgcgggcgcaatggcggggacccggggcttgatgctgcttgggcctggcccagtggcgggtcctagggacgtgggtacctgcagaggccggcagatggagattcagaaacataaggacaacaagaaacttccccaaggtatcattatagtctttagacttcagacacacaccacacctcaaatatatacacaactgaaaggaaaattaaggaagtttttcaaagaaccctattccgagtaagaagtgtgttgcatgaatttctaagagccagaaaatgcatgacacaggagaagatgtaccctcatctgttcagtgagagatgtgcaaatcaacatcaacacagaactgctgaagaaaaaaaatatgtgtgtggattatatatatacatataagtgtgtgtatatatatatatatatatatttacatatatagtatgggctatttcacctttgcaagctgggagccattaagtaatggctaccaccactcccccacccccttcagtaaaacacatcctgaacattgggcccatgttttcaagaagaatgtgccccactgccccttggaaactccatttcatttacttggttcagttagttaatgacggtccattttgactcaaatatccagttccctttcatcaatcatgtctttctggactgtcagttttagggcaaggattacaaagcccttccatgcagatatccacagagaaagacccagacccacatccccatttaggattgcttagggactcatttcttccgcttccttccaaatgaaaagaatgagctatgtgaaaggggaaaaccccactggaaaatgaatgttggtgactcaagtgttaatctagaaagtcttatgatttggtgctggaaaagggcattgtaataagatggttctttataccatgcaaaccaggggaatacaaaacactgtcaaccatgaaaataagatttaatttggaatcacaacacatagggttttttccactttaaattctttttattcattcatatttgttataaatattcaatagaaatgcagtttttcaagactgaaatggtctttaatgaagcaagccatgtgtggcttttcaggcgagcattttcatgcttggttaactgtaaggatgttcatgttcctttcccaaaaaatatgatttgtgattctgcttaggtctctgaaaagcaacttattcactggagatgtgaggagccatccgcacatcacaattctatagacatcaaacgcatgaagcatttcggatctgctttaagactgaggcagactttccatctggacacagccgaccatccatgtgtcattacaatgaatccagcacttccctggaagctggaagggtcaaattcaacttcaactctgccacttcctgcttaacttgctgtttaaccttgggcaagctgccatcccacacgaggccgaaggtgtcggtttttaaaatacagaaatttggttccatgagggattatcaatatactgctggtgggccaaattccatctgctacttgcctttgt

SEQ ID NO: 8416 - protein, 76 aa, Homo sapiens
MAGTRGLMLLGPGPVAGPRDVGTCRGRQMEIQKHKDNKKLPQGIIIVFRLQTHTTPQIYTQLKGKLRKFFKEPYSE

SEQ ID NO: 8417 - DNA, 1881 bp, Homo sapiens
gcgactggaggcgcgcgacgcgggcgcaatggcggggacccggggcttgatgctgcttgggcctggcccagtggcgggtcctagggacgtgggtacctgcagaggccggcagatggagattcagaaacataaggacaacaagaaacttccccaaggtatcattatagtctttagacttcagacacacaccacacctcaaatatatacacaactgaaaggaaaattaaggaagtttttcaaagaaccctattccgagtaagaagtgtgttgcatgaatttctaaggtcaaagatgttgattcattcatagtgtgaggcccagaaatcggcatttttaaacaagtacactggacatttctaaagctggctaaagtttgagagacactatccaagggaaatttctccgtaactctttttctcagaagaaaagtaaactaaaagtaaaaataagcagtaccactaagtttcaagtgatcttctcctaaaagaagaaaaggcctatattcaggcacaagaaaagtatattctcttttatccatgcagaaaacagctagtggttgaaaatcaacacttcagacctcttgtctacataaagccaactgcccctttgttttactgatgtcttcaatgattttacttagatttttctacggcatttactgaattagctaagcagacacagatccagtccttcatgaatatggtttggagactctctactgaatcagcactcttagcttcaccgacatagtctcttggtagaccagaaggtgtatcttatctggaaagactgctatatctacacccacaaaaagcattatttatctgaacactaaattctgacttccttgccattttagggagccactttaaaacattttcaatatttgctattttgtagcagcaaatccttcagaaggaggtcaagtgatggcctttatctgttcccagtgtcttgcccttaggtcctcagggcaccccctggacagcagccttaggaaccaggtacaaagcacaagcactgctggtccgcatggtaaggaatcacttccagactgggccttcccatgggcttccctgagcttcctggactcaaatcatagtccttcttttcctctcccctttggacttgataaacgcagtcccattcatttaatctccaacttagaaatccggagaatgtgagccctgggatttactttcagacaccctcgtcgataaccttggccacttaggttgctgcagcctgtccccagggagacagttagaatggaacaatgacacaaacaacaccaacaataacaacagcagcagaagcagaagcaacaatagtagaacgagaaataatttataacatgcttactacatgccaggcactaagtgcttacccatattaactcagttaattcttataacaaccagatgagatagattttcttattatcccgattttacaaatgagcaaacagaggcacaagcaggttaagaaacctccccaaggttaaacagtgagaaacagcaaagatttgaacagtgagaaacagcaaagatttgaaacagcaaagatttgaacctattgttcgggagtccatgctgttactcatttctttatgctgccataatctaatataaaattgaataacaataaatgcaccttatatttgtatagctatacacactaatttacatgatcttcataagaactatgaaatggctgtgattatccccatttttaaaatgatactataaaggcataaaatgctgtatttatggtatgcaaccctttggtgaacaaccctataaatatttaattacttatattgatgttcttcctacgtctaagaaaaatgttatttccattcccaagatgttagtagagacg

SEQ ID NO: 8418 - protein, 76 aa, Homo sapiens; identical to SEQ ID NO: 8416

SEQ ID NO: 8419 - DNA, 1946 bp, Homo sapiens
gcgactggaggcgcgcgacgcgggcgcaatggcggggacccggggcttgatgctgcttgggcctggcccagtggcgggtcctagggacgtgggtacctgcagaggccggcagatggagattcagaaacataaggacaacaagaaacttccccaaggtatcattatagtctttagacttcagacacacaccacacctcaaatatatacacaactgaaaggaaaattaaggaagtttttcaaagaaccctattccgagtaagaagtgtgttgcatgaatttctaaggtcaaagatgttgattcattcatagtgtgaggcccagaaatcggcatttttaaacaagtacactggacatttctaaagctggctaaagtttgagagacactatccaagggaaatttctccgtaactctttttctcagaagaaaagtaaactaaaagtaaaaataagcagtaccactaagtttcaagtgatcttctcctaaaagaagaaaaggcctatattcaggcacaagaaaagtatattctcttttatccatgcagaaaacagctagtggttgaaaatcaacacttcagacctcttgtctacataaagccaactgcccctttgttttactgatgtcttcaatgattttacttagatttttctacggcatttactgaattagctaagcagacacagatccagtccttcatgaatatggtttggagactctctactgaatcagcactcttagcttcaccgacatagtctcttggtagaccagaaggtgtatcttatctggaaagactgctatatctacacccacaaaaagcattatttatctgaacactaaattctgacttccttgccattttagggagccactttaaaacattttcaatatttgctattttgtagcagcaaatccttcagaaggaggtcaagtgatggcctttatctgttcccagtgtcttgcccttaggtcctcagggcaccccctggacagcagccttaggaaccaggtacaaagcacaagcactgctggtccgcatggtaaggaatcacttccagactgggccttcccatgggcttccctgagcttcctggactcaaatcatagtccttcttttcctctcccctttggacttgataaacgcagtcccattcatttaatctccaacttagaaatccggagaatgtgagccctgggatttactttcagacaccctcgtcgataaccttggccacttaggttgctgcagcctgtccccagggagacagttagaatggaacaatgacacaaacaacaccaacaataacaacagcagcagaagcagaagcaacaatagtagaacgagaaataatttataacatgcttactacatgccaggcactaagtgcttacccatattaactcagttaattcttataacaaccagatgagatagattttcttattatcccgattttacaaatgagcaaacagaggcacaagcaggttaagaaacctccccaaggttaaacagtgagaaacagcaaagatttgaacagtgagaaacagcaaagatttgaaacagcaaagatttgaacctattgttcgggagtccatgctgttactcatttctttatgctgccataatctaatataaaattgaataacaataaatgcaccttatatttgtatagctatacacactaatttacatgatcttcataagaactatgaaatggctgtgattatccccatttttaaaatgatactataaaggcataaaatgctgtatttatggtatgcaaccctttggtgaacaaccctataaatatttaattacttatattgatgttcttcctacgtctaagaaaaatgttatttccattcccaagatgttagtagagacgaagatttttcaatttgtctccttgattttgttggattatagcattaaagttatttttacaaagcc

SEQ ID NO: 8420 - protein, 76 aa, Homo sapiens; identical to SEQ ID NO: 8416

SEQ ID NO: 8421 - DNA, 2219 bp, Homo sapiens
gcgactggaggcgcgcgacgcgggcgcaatggcggggacccggggcttgatgctgcttgggcctggcccagtggcgggtcctagggacgtgggtacctgcagaggccggcagatggagattcagaaacataaggacaacaagaaacttccccaaggtatcattatagtctttagacttcagacacacaccacacctcaaatatatacacaactgaaaggaaaattaaggaagtttttcaaagaaccctattccgagtaagaagtgtgttgcatgaatttctaaggtcaaagatgttgattcattcatagtgtgaggcccagaaatcggcatttttaaacaagtacactggacatttctaaagctggctaaagtttgagagacactatccaagggaaatttctccgtaactctttttctcagaagaaaagtaaactaaaagtaaaaataagcagtaccactaagtttcaagtgatcttctcctaaaagaagaaaaggcctatattcaggcacaagaaaagtatattctcttttatccatgcagaaaacagctagtggttgaaaatcaacacttcagacctcttgtctacataaagccaactgcccctttgttttactgatgtcttcaatgattttacttagatttttctacggcatttactgaattagctaagcagacacagatccagtccttcatgaatatggtttggagactctctactgaatcagcactcttagcttcaccgacatagtctcttggtagaccagaaggtgtatcttatctggaaagactgctatatctacacccacaaaaagcattatttatctgaacactaaattctgacttccttgccattttagggagccactttaaaacattttcaatatttgctattttgtagcagcaaatccttcagaaggaggtcaagtgatggcctttatctgttcccagtgtcttgcccttaggtcctcagggcaccccctggacagcagccttaggaaccaggtacaaagcacaagcactgctggtccgcatggtaaggaatcacttccagactgggccttcccatgggcttccctgagcttcctggactcaaatcatagtccttcttttcctctcccctttggacttgataaacgcagtcccattcatttaatctccaacttagaaatccggagaatgtgagccctgggatttactttcagacaccctcgtcgataaccttggccacttaggttgctgcagcctgtccccagggagacagttagaatggaacaatgacacaaacaacaccaacaataacaacagcagcagaagcagaagcaacaatagtagaacgagaaataatttataacatgcttactacatgccaggcactaagtgcttacccatattaactcagttaattcttataacaaccagatgagatagattttcttattatcccgattttacaaatgagcaaacagaggcacaagcaggttaagaaacctccccaaggttaaacagtgagaaacagcaaagatttgaacagtgagaaacagcaaagatttgaaacagcaaagatttgaacctattgttcgggagtccatgctgttactcatttctttatgctgccataatctaatataaaattgaataacaataaatgcaccttatatttgtatagctatacacactaatttacatgatcttcataagaactatgaaatggctgtgattatccccatttttaaaatgatactataaaggcataaaatgctgtatttatggtatgcaaccctttggtgaacaaccctataaatatttaattacttatattgatgttcttcctacgtctaagaaaaatgttatttccattcccaagatgttagtagagacgaagatttttcaatttgtctccttgattttgttggattatagcattaaagttatttttacaaagccatctacggtaacccagtagaaagggtaagcctgttggcttaggaaaactgaatggcattcagtttcttcaaagaaatttgggacagatgtgggttttttttcttcttcttcttcaacaaatccagaagatgaaaaatgtattttatttcttgtgaaatgcatttttctgttcatctcagtatgtgggactgttgaagtttataagtttggcagtgttctaacatggccatcctgttctcctttagcaacttattaaatgtattttttttaatg

SEQ ID NO: 8422 - protein, 76 aa, Homo sapiens; identical to SEQ ID NO: 8416

SEQ ID NO: 8423 - DNA, 3232 bp, Homo sapiens; identical to SEQ ID NO: 1208

SEQ ID NO: 8424 - protein, 76 aa, Homo sapiens; identical to SEQ ID NO: 8416

SEQ ID NO: 8425 - DNA, 756 bp, Homo sapiens; identical to SEQ ID NO: 1209

SEQ ID NO: 8426 - protein, 102 aa, Homo sapiens
MTQEKMYPHLFSERCANQHQHRTAEEKKYVSEKQLIHWRCEEPSAHHNSIDIKRMKHFGSALRLRQTFHLDTADHPCVITMNPALPWKLEGSNSTSTLPLPA

SEQ ID NO: 8427 - DNA, 1867 bp, Homo sapiens
gacgcgggcgcaatggcggggacccggggcttgatgctgcttgggcctggcccagtggcgggtcctagggacgtgggtacctgcagaggccggcagatggagattcagaaacataaggacaacaagaaacttccccaaggaaaattaaggaagtttttcaaagaaccctattccgagtaagaagtgtgttgcatgaatttctaaggtcaaagatgttgattcattcatagtgtgaggcccagaaatcggcatttttaaacaagtacactggacatttctaaagctggctaaagtttgagagacactatccaagggaaatttctccgtaactctttttctcagaagaaaagtaaactaaaagtaaaaataagcagtaccactaagtttcaagtgatcttctcctaaaagaagaaaaggcctatattcaggcacaagaaaagtatattctcttttatccatgcagaaaacagctagtggttgaaaatcaacacttcagacctcttgtctacataaagccaactgcccctttgttttactgatgtcttcaatgattttacttagatttttctacggcatttactgaattagctaagcagacacagatccagtccttcatgaatatggtttggagactctctactgaatcagcactcttagcttcaccgacatagtctcttggtagaccagaaggtgtatcttatctggaaagactgctatatctacacccacaaaaagcattatttatctgaacactaaattctgacttccttgccattttagggagccactttaaaacattttcaatatttgctattttgtagcagcaaatccttcagaaggaggtcaagtgatggcctttatctgttcccagtgtcttgcccttaggtcctcagggcaccccctggacagcagccttaggaaccaggtacaaagcacaagcactgctggtccgcatggtaaggaatcacttccagactgggccttcccatgggcttccctgagcttcctggactcaaatcatagtccttcttttcctctcccctttggacttgataaacgcagtcccattcatttaatctccaacttagaaatccggagaatgtgagccctgggatttactttcagacaccctcgtcgataaccttggccacttaggttgctgcagcctgtccccagggagacagttagaatggaacaatgacacaaacaacaccaacaataacaacagcagcagaagcagaagcaacaatagtagaacgagaaataatttataacatgcttactacatgccaggcactaagtgcttacccatattaactcagttaattcttataacaaccagatgagatagattttcttattatcccgattttacaaatgagcaaacagaggcacaagcaggttaagaaacctccccaaggttaaacagtgagaaacagcaaagatttgaacagtgagaaacagcaaagatttgaaacagcaaagatttgaacctattgttcgggagtccatgctgttactcatttctttatgctgccataatctaatataaaattgaataacaataaatgcaccttatatttgtatagctatacacactaatttacatgatcttcataagaactatgaaatggctgtgattatccccatttttaaaatgatactataaaggcataaaatgctgtatttatggtatgcaaccctttggtgaacaaccctataaatatttaattacttatattgatgttcttcctacgtctaagaaaaatgttatttccattcccaagatgttagtagagacgaagatttttcaatttgtctccttgattttgttggattatagcattaaagttatttttacaaagcc

SEQ ID NO: 8428 - protein, 55 aa, Homo sapiens
MAGTRGLMLLGPGPVAGPRDVGTCRGRQMEIQKHKDNKKLPQGKLRKFFKEPYSE

SEQ ID NO: 8429 - DNA, 650 bp, Homo sapiens
gacgcgggcgcaatggcggggacccggggcttgatgctgcttgggcctggcccagtggcgggtcctagggacgtgggtacctgcagaggccggcagatggagattcagaaacataaggacaacaagaaacttccccaaggtatcattatagtctttagacttcagacacacaccacacctcaaatatatacacaactgaaaggaaaattaaggaagtttttcaaagaaccctattccgagtaagaagtgtgttgcatgaatttctaaggtctctgaaaagcaacttattcactggagatgtgaggagccatccgcacatcacaattctatagacatcaaacgcatgaagcatttcggatctgctttaagactgaggcagactttccatctggacacagccgaccatccatgtgtcattacaatgaatccagcacttccctggaagctggaagggtcaaattcaacttcaactctgccacttcctgcttaacttgctgtttaaccttgggcaagctgccatcccacacgaggccgaaggtgtcggtttttaaaatacagaaatttggttccatgagggattatcaatatactgctggtgggccaaattccatctgctacttgcctttgtaaataaagttttattgaaacac

SEQ ID NO: 8430 - protein, 76 aa, Homo sapiens; identical to SEQ ID NO: 8416

SEQ ID NO: 8431 - DNA, 1570 bp, Homo sapiens
atacgaggatgctataggtctccagcatcacatctctttacagggtcccctgagcattgtgcagatgctgccattcctcctaggtaaagtccatggccatatcttcaaaggacaccaacccctataatggcttatttctcaagtcattgggcctgggtcacacagttttctgggaatttgcccttctgtgtgtgtgtatcttacatgtaggtatgctcactgacagcccccaccaagcctccagccacccactgccagctaccactgagccatcatgcatgccaacccagctgtgctttcagatgacccatcatagctgctgccttactgcaccggtgggtgagacaagccagcctgctgagactccctaagccacagaaacagaagtactagtaaactgtttgaaactgctatgtttcaggggtggttttttaaagcagattagataacaggaacagaatttggcagctggaatggggtgctgtggtaataagaagctatgacatgcagcactggacctaagactgagcagaagctgggcctcaaggagaccgttcatggaagctggaagggtgtcaagactcttggcgctgctgggaggctcagctggccccggggcctgcctgctgtcctgcctgcatggaccaccaggctgagctgcccgctgtcctgcctgcagggcccgcctgccggggctgcccgctgtgcagcctgcaaggcccaccttccggggttgccctctaagctgcctacagtgcccgcctgccggggctgccttccgggattgcccgctctcctgcctgcaggccctgctgggaggctcagctggctcagcctgcagggccggcctgccggggctgcccgctgtacgtcctcgagttccgactggaaggctcagctggccccagggccccatgcggggcctctccgctgtcccgccttcagggctcgccagcctccgctgcccgctgtcctgtctgcaggggctgccttccgggattgcccgctctcctgcgtgcaggccctgctgggaggctcagctggccccggggaccgcctgccgggtctgcccgctgtgctgcctgcatggaccaccagcctgagctgcccgctctcctgcctgcaggcccggctgggaggctcagctggccccggggaccgcctgccgtgtcggcccgctaacctgcctgcagggcccgccagcctgagctgctcgctgtcctgcctgcagggcccgcctgccggggctgcccgctgtgcagcctgcaaggcccacctgccggggttgccctctaagctgcctacagtgcccgcctgccggtgctgcccactgtacatctttcaggcccagctgggaggctcagctggcactggggcttgcatgccgggcctgtctgctgtcctgccttcagagctcgccagcctgggctgcccgcggtcctgtctgcaggggccgcctgccgggattgcccgctctcctgctggcaggcccggctgggaggctcagcttgtcccggggaccgcctgccgggtctgcccgctgtcctgcctgcatggaccaccagcctga

SEQ ID NO: 8432 - protein, 356 aa, Homo sapiens
MTCSTGPKTEQKLGLKETVHGSWKGVKTLGAAGRLSWPRGLPAVLPAWTTRLSCPLSCLQGPPAGAARCAACKAHLPGLPSKLPTVPACRGCLPGLPALLPAGPAGRLSWLSLQGRPAGAARCTSSSSDWKAQLAPGPHAGPLRCPAFRARQPPLPAVLSAGAAFRDCPLSCVQALLGGSAGPGDRLPGLPAVLPAWTTSLSCPLSCLQARLGGSAGPGDRLPCRPANLPAGPASLSCSLSCLQGPPAGAARCAACKAHLPGLPSKLPTVPACRCCPLYIFQAQLGGSAGTGACMPGLSAVLPSELASLGCPRSCLQGPPAGIARSPAGRPGWEAQLVPGTACRVCPLSCLHGPPA

SEQ ID NO: 8433 - DNA, 1642 bp, Homo sapiens
atacgaggatgctataggtctccagcatcacatctctttacagggtcccctgagcattgtgcagatgctgccattcctcctaggtaaagtccatggccatatcttcaaaggacaccaacccctataatggcttatttctcaagtcattgggcctgggtcacacagttttctgggaatttgcccttctgtgtgtgtgtatcttacatgtaggtatgctcactgacagcccccaccaagcctccagccacccactgccagctaccactgagccatcatgcatgccaacccagctgtgctttcagatgacccatcatagctgctgccttactgcaccggtgggtgagacaagccagcctgctgagactccctaagccacagaaacagaagtactagtaaactgtttgaaactgctatgtttcaggggtggttttttaaagcagattagataacaggaacagaatttggcagctggaatggggtgctgtggtaataagaagctatgacatgcagcactggacctaagactgagcagaagctgggcctcaaggagaccgttcatggaagctggaagggtgtcaagactcttggcgctgctgggaggctcagctggccccggggcctgcctgctgtcctgcctgcatggaccaccaggctgagctgcccgctgtcctgcctgcagggcccgcctgccggggctgcccgctgtgcagcctgcaaggcccaccttccggggttgccctctaagctgcctacagtgcccgcctgccggggctgccttccgggattgcccgctctcctgcctgcaggccctgctgggaggctcagctggctcagcctgcagggccggcctgccggggctgcccgctgtacgtcctcgagttccgactggaaggctcagctggccccagggccccatgcggggcctctccgctgtcccgccttcagggctcgccagcctccgctgcccgctgtcctgtctgcaggggctgccttccgggattgcccgctctcctgcgtgcaggccctgctgggaggctcagctggccccggggaccgcctgccgggtctgcccgctgtgctgcctgcatggaccaccagcctgagctgcccgctctcctgcctgcaggcccggctgggaggctcagctggccccggggaccgcctgccgtgtcggcccgctaacctgcctgcagggcccgccagcctgagctgctcgctgtcctgcctgcagggcccgcctgccggggctgcccgctgtgcagcctgcaaggcccacctgccggggttgccctctaagctgcctacagtgcccgcctgccgagctcgccagcctgggctgcccgcggtcctgtctgcaggggccgcctgccgggattgcccgctctcctgctggcaggcccggctgggaggctcagcttgtcccggggaccgcctgccgggtctgcccgctgtcctgcctgcatggaccaccagcctgagctgcccgctgtcctgcctgcagggcctgcaggcccggctgggaggctcagctggccccggggaccgcctgccgggtctgcccgctctcctgcctgcagggcccgccagcctgagctgctcgctgtcctgcctgcagggcccgcctgccggggttgccctctaa

SEQ ID NO: 8434 - protein, 380 aa, Homo sapiens
MTCSTGPKTEQKLGLKETVHGSWKGVKTLGAAGRLSWPRGLPAVLPAWTTRLSCPLSCLQGPPAGAARCAACKAHLPGLPSKLPTVPACRGCLPGLPALLPAGPAGRLSWLSLQGRPAGAARCTSSSSDWKAQLAPGPHAGPLRCPAFRARQPPLPAVLSAGAAFRDCPLSCVQALLGGSAGPGDRLPGLPAVLPAWTTSLSCPLSCLQARLGGSAGPGDRLPCRPANLPAGPASLSCSLSCLQGPPAGAARCAACKAHLPGLPSKLPTVPACRARQPGLPAVLSAGAACRDCPLSCWQARLGGSACPGDRLPGLPAVLPAWTTSLSCPLSCLQGLQARLGGSAGPGDRLPGLPALLPAGPASLSCSLSCLQGPPAGVAL

SEQ ID NO: 8435 - DNA, 2505 bp, Homo sapiens
ggagcattcggcctcggggacattcggctcgtctcggctcggcctcgggctgactcggcttccgccggcggcgggaacgggcgaaacccgcggcactaagctctctctgagaggcagaattgcgccggccgccggcgagaatctgcctagagccgtccagccctgtcggccggggacgacagccgcctcagcctgtcaggacagtgaggagagcaggggccgagtctctcggaagccctcgtgaggactcggacctattcggactgattcggcttcccacttcggggaacttcgaccctcctcggttcaggactcggtctcggctcggcggcttcgtgcaggttcggctcctactcgggcagcctctgttcgcctcggctccgctccgcgggcggactcggctcggctctgctcggcggctggctgccttttcggtccctattcgggcggcggcttcgggcggcctcggcccagctcgggcgtcctcttcgggccccgcttcgggctccgcgaccggcgcttcgggcggtcccggacggcgccttcgggaaggctcggcggagtccggatggaggactcggactcggcggcaaagcagctgggcctggctgaggcggcggcggtggcggccgcggccgctgtggcggcggcggccgcggccgcggcaggaggcgaggcggaggagccggtgctgagcagggacgaggactcggaggaggacgcagactcggaggcggagcgggagacgccgcgggtcacggcagtggcggtgatggcggcggagcccgggcacatggacatgggcgccgaggccctgcccggccccgacgaggccgccgctgccgcagccttcgcaggcaagtgaccacagtgacagtggccaacgtgggggctgctgcagacaatgtcttcaccacgtctgtggcgaacgcggcatccatctcaggacatgttctgtctggtaggacggcccttcagatcggggacagcctgaacaccgaaaaagcgacactgattgtcgtccacacagatgggagcatcgtggagaccaccgggctgaaaggcccggcagctcccctcaccccaggtcctcagtctcctccaacccctctggctcccggccaagaaaaaggtggaactaaatacaactgggacccttctgtgtacgacagtgagctgcccgtacggtgccggaacatcagcggcactctgtacaagaacaggctcggctcaggcggccggggacggtgcatcaagcagggggagaactggtacagtcccaccgagtttgaggccatggcaggaagagccagcagtaaggactggaaaagaagcattcgctacgcgggccgacccttgcagtgcctcatccaggatgggatcttaaaccctcacgctgcctcttgcacctgtgctgcctgctgcgacgacatgaccttaagtggcccagtcaggctttttgtgccttacaaaaggcgcaagaaggagaatgaactgcccacaactcccgtgaagaaggactcccccaagaacatcacattgcttccagccaccgcggctaccaccttcaccgtgaccccctcgggacagatcacgacctcgggggcactgacctttgaccgagcgtccacggtagaggccactgctgtcatatcagagagtccggcccagggcgacgtcttcgcaggggccacagtccaagaggccagcgtgcagcccccatgcagggccagccaccctgagcctcactaccccggctatcaggacagctgccagatcgcaccgtttccagaagctgcgttgccaacgtcacatcccaaaatagtgttgacatccctgcctgcgctggcggtcccacccccgactcccaccaaagcggcacctcccgcgttggtcaatgggctggagctgtcagagccgcggagctggctgtacctagaagagatggtcaactccttgctcaacacagcgcagcagctgaagacgctgtttgagcaagccaagcatgccagcacctaccgagaagctgccacaaaccaggccaagatccacgctgacgcagagcggaaggagaggactggaaggatcaccagcacatatgcggccagtcagcagctgtcaccgtccaggcagacgaagtccacgtggctgaaagcgtgatggagaaggtgaccgtgtgaggctccatcggccgccctgggagctggggcccctcgcactcctgtgaggcttttgcaggtcgaaggcccccctgaggactctggggggacgttgagaagaggggtgtgggaaggtaaagaaacttgctggacaagtcattaacacactttaagcgaatggtgccctgggaagcgcactccccctgcccgggccccctgcccgctcgcggacagattttttatccctgggatcatgagcgtccggtcttgcccacagggcctgtgctgcgacgcacatacatacgtgttgtgtctgtcaataaagtgtaaataaggtctccctgcc

SEQ ID NO: 8436 - protein, 287 aa, Homo sapiens
MAGRASSKDWKRSIRYAGRPLQCLIQDGILNPHAASCTCAACCDDMTLSGPVRLFVPYKRRKKENELPTTPVKKDSPKNITLLPATAATTFTVTPSGQITTSGALTFDRASTVEATAVISESPAQGDVFAGATVQEASVQPPCRASHPEPHYPGYQDSCQIAPFPEAALPTSHPKIVLTSLPALAVPPPTPTKAAPPALVNGLELSEPRSWLYLEEMVNSLLNTAQQLKTLFEQAKHASTYREAATNQAKIHADAERKERTGRITSTYAASQQLSPSRQTKSTWLKA

SEQ ID NO: 8437 - DNA, 2592 bp, Homo sapiens
tgacgaaggggcccgaccgcgccgcgtttcgggagcggacgtccgagccacggccgaggcccgattagtccgtccggcaccgctcgggcactttcggaagggaagaggtggagaaccgacgttcgggagcattcggcctcggggacattcggctcgtctcggctcggcctcgggctgactcggcttccgccggcggcgggaacgggcgaaacccgcggcactaagctctctctgagaggcagaattgcgccggccgccggcgagaatctgcctagagccgtccagccctgtcggccggggacgacagccgcctcagcctgtcaggacagtgaggagagcaggggccgagtctctcggaagccctcgtgaggactcggacctattcggactgattcggcttcccacttcggggaactggctggctgccttttcggtccctattcgggcggcggcttcgggcggcctcggcccagctcgggcgtcctcttcgggccccgcttcgggctccgcgaccggcgcttcgggcggtcccggacggcgccttcgggaaggctcggcggagtccggatggaggactcggactcggcggcaaagcagctgggcctggctgaggcggcggcggtggcggccgcggccgctgtggcggcggcggccgcggccgcggcaggaggcgaggcggaggagccggtgctgagcagggacgaggactcggaggaggacgcagactcggaggcggagcgggagacgccgcgggtcacggcagtggcggtgatggcggcggagcccgggcacatggacatgggcgccgaggccctgcccggccccgacgaggccgccgctgccgcagccttcgcaggcaagtgaccacagtgacagtggccaacgtgggggctgctgcagacaatgtcttcaccacgtctgtggcgaacgcggcatccatctcaggacatgttctgtctggtaggacggcccttcagatcggggacagcctgaacaccgaaaaagcgacactgattgtcgtccacacagatgggagcatcgtggagaccaccgggctgaaaggcccggcagctcccctcaccccaggtcctcagtctcctccaacccctctggctcccggccaagaaaaaggtggaactaaatacaactgggacccttctgtgtacgacagtgagctgcccgtacggtgccggaacatcagcggcactctgtacaagaacaggctcggctcaggcggccggggacggtgcatcaagcagggggagaactggtacagtcccaccgagtttgaggccatggcaggaagagccagcagtaaggactggaaaagaagcattcgctacgcgggccgacccttgcagtgcctcatccaggatgggatcttaaaccctcacgctgcctcttgcacctgtgctgcctgctgcgacgacatgaccttaagtggcccagtcaggctttttgtgccttacaaaaggcgcaagaaggagaatgaactgcccacaactcccgtgaagaaggactcccccaagaacatcacattgcttccagccaccgcggctaccaccttcaccgtgaccccctcgggacagatcacgacctcgggggcactgacctttgaccgagcgtccacggtagaggccactgctgtcatatcagagagtccggcccagggcgacgtcttcgcaggggccacagtccaagaggccagcgtgcagcccccatgcagggccagccaccctgagcctcactaccccggctatcaggacagctgccagatcgcaccgtttccagaagctgcgttgccaacgtcacatcccaaaatagtgttgacatccctgcctgcgctggcggtcccacccccgactcccaccaaagcggcacctcccgcgttggtcaatgggctggagctgtcagagccgcggagctggctgtacctagaagagatggtcaactccttgctcaacacagcgcagcagctgaagacgctgtttgagcaagccaagcatgccagcacctaccgagaagctgccacaaaccaggccaagatccacgctgacgcagagcggaaggagcagtcctgcgttaactgcggccgggaggctatgagcgagtgcaccggctgccacaaggtcaactactgctccaccttctgccaacgcaaggactggaaggatcaccagcacatatgcggccagtcagcagctgtcaccgtccaggcagacgaagtccacgtggctgaaagcgtgatggagaaggtgaccgtgtgaggctccatcggccgccctgggagctggggcccctcgcactcctgtgaggcttttgcaggtcgaaggcccccctgaggactctggggggacgttgagaagaggggtgtgggaaggtaaagaaacttgctggacaagtcattaacacactttaagcgaatggtgccctgggaagcgcactccccctgcccgggccccctgcccgctcgcggacagattttttatccctgggatcatgagcgtccggtcttgcccacagggcctgtgctgcgacgcacatacatacgtgttgtgtctgtcaataaagtgtaaataaggtctccctgcc

SEQ ID NO: 8438 - protein, 323 aa, Homo sapiens
MAGRASSKDWKRSIRYAGRPLQCLIQDGILNPHAASCTCAACCDDMTLSGPVRLFVPYKRRKKENELPTTPVKKDSPKNITLLPATAATTFTVTPSGQITTSGALTFDRASTVEATAVISESPAQGDVFAGATVQEASVQPPCRASHPEPHYPGYQDSCQIAPFPEAALPTSHPKIVLTSLPALAVPPPTPTKAAPPALVNGLELSEPRSWLYLEEMVNSLLNTAQQLKTLFEQAKHASTYREAATNQAKIHADAERKEQSCVNCGREAMSECTGCHKVNYCSTFCQRKDWKDHQHICGQSAAVTVQADEVHVAESVMEKVTV

SEQ ID NO: 8439 - DNA, 554 bp, Homo sapiens
atggagactctggcttcctgtggcggggtctgtgccgcctgaaggctgattttggaagcaggcagcagttgcagcagcttcagccatctggtaggacggcccttcagatcggggacagcctgaacaccgaaaaagcgacactgattgtcgtccacacagatgggagcatcgtggagaccaccgggctgaaaggcccggcagctcccctcaccccaggtcctcagtctcctccaacccctctggctcccggccaagaaaaaggtggaactaaatacaactgggacccttctgtgtacgacagtgagctgcccgtacggtgccggaacatcagcggcactctgtacaagaacaggctcggctcaggcggccggggacggtgcatcaagcagggggagaactggtacagtcccaccgagtttgaggccatggcaggaagagccagcagtaaggactggaaaagaagcattcgctacgcgggccgacccttgcagtgcctcatccaggtatctttccgggtctttcacgtggggatgacgatgatcgtgaccctgtga

SEQ ID NO: 8440 - protein, 42 aa, Homo sapiens
MAGRASSKDWKRSIRYAGRPLQCLIQVSFRVFHVGMTMIVTL

SEQ ID NO: 8441 - DNA, 1381 bp, Homo sapiens
ggagcattcggcctcggggacattcggctcgtctcggctcggcctcgggctgactcggcttccgccggcggcgggaacgggcgaaacccgcggcactaagctctctctgagaggcagaattgcgccggccgccggcgagaatctgcctagagccgtccagccctgtcggccggggacgacagccgcctcagcctgtcaggacagtgaggagagcaggggccgagtctctcggaagccctcgtgaggactcggacctattcggactgattcggcttcccacttcggggaacttcgaccctcctcggttcaggactcggtctcggctcggcggcttcgtgcaggttcggctcctactcgggcagcctctgttcgcctcggctccgctccgcgggcggactcggctcggctctgctcggcggctggctgccttttcggtccctattcgggcggcggcttcgggcggcctcggcccagctcgggcgtcctcttcgggccccgcttcgggctccgcgaccggcgcttcgggcggtcccggacggcgccttcgggaaggctcggcggagtccggatggaggactcggactcggcggcaaagcagctgggcctggctgaggcggcggcggtggcggccgcggccgctgtggcggcggcggccgcggccgcggcaggaggcgaggcggaggagccggtgctgagcagggacgaggactcggaggaggacgcagactcggaggcggagcgggagacgccgcgggtcacggcagtggcggtgatggcggcggagcccgggcacatggacatgggcgccgaggccctgcccggccccgacgaggccgccgctgccgcagccttcgcaggcaagtgaccacagtgacagtggccaacgtgggggctgctgcagacaatgtcttcaccacgtctgtggcgaacgcggcatccatctcaggacatgttctgtctggtaggacggcccttcagatcggggacagcctgaacaccgaaaaagcgacactgattgtcgtccacacagatgggagcatcgtggagaccaccgggctgaaaggcccggcagctcccctcaccccaggtcctcagtctcctccaacccctctggctcccggccaagaaaaaggtggaactaaatacaactgggacccttctgtgtacgacagtgagctgcccgtacggtgccggaacatcagcggcactctgtacaagaacaggctcggctcaggcggccggggacggtgcatcaagcagggggagaactggtacagtcccaccgagtttgaggccatggcaggaagagccagcagtaaggactggaaaagaagcattcgctacgcgggccgacccttgcagtgcctcatccaggtatcgt

SEQ ID NO: 8442 - protein, 98 aa, Homo sapiens
MEDSDSAAKQLGLAEAAAVAAAAAVAAAAAAAAGGEAEEPVLSRDEDSEEDADSEAERETPRVTAVAVMAAEPGHMDMGAEALPGPDEAAAAAAFAGK

SEQ ID NO: 8443 - DNA, 575 bp, Homo sapiens
acttttcccctacggagctttgcgggttgaggaactggatcccagtcctggtgtgctggaggtgaccacagtgacagtggccaacgtgggggctgctgcagacaatgtcttcaccacgtctgtggcgaacgcggcatccatctcaggacatgttctgtctggtaggacggcccttcagatcggggacagcctgaacaccgaaaaagcgacactgattgtcgtccacacagatgggagcatcgtggagaccaccgggctgaaaggcccggcagctcccctcaccccaggtcctcagtctcctccaacccctctggctcccggccaagaaaaaggtggaactaaatacaactgggacccttctgtgtacgacagtgagctgcccgtacggtgccggaacatcagcggcactctgtacaagaacaggctcggctcaggcggccggggacggtgcatcaagcagggggagaactggtacagtcccaccgagtttgaggccatggcaggaagagccagcagtaaggactggaaaagaagcattcgctacgcgggccgacccttgcagtgcctcatccagg

SEQ ID NO: 8444 - protein, 104 aa, Homo sapiens
KARQLPSPQVLSLLQPLWLPAKKKVELNTTGTLLCTTVSCPYGAGTSAALCTRTGSAQAAGDGASSRGRTGTVPPSLRPWQEEPAVRTGKEAFATRADPCSASS

SEQ ID NO: 8445 - DNA, 248 bp, Homo sapiens
ggtgaccacagtgacagtggccaacgtgggggctgctgcagacaatgtcttcaccacgtctgtggcgaacgcggcatccatctcaggacatgttctggccaggaagaccagagactggtgtgttcctgtttggaaactgacaacaaagcggggcacggtctgaaataactgtgtgttcccttcctaagaaaaatactctgtgactcttaaacaaacacaagacattccttttctccagtgaagagctg

SEQ ID NO: 8446 - protein, 31 aa, Homo sapiens
MSSPRLWRTRHPSQDMFWPGRPETGVFLFGN

SEQ ID NO: 8447 - DNA, 3158 bp, Homo sapiens
atttgtggcaggtggggcaggctggtcacctggagcaggttcctcctctcccggccccgccccggcccggccccgccgagcgtcccacccgcccgcgggagacctggcgccccggccgaggcgcgaacagacggacgcaccggcgagcgccgaggggacaggccgagcgcggggcgccggaggcaggtgtgggacaggcactggcctcagaccggggccacactgaggtctgcccttctcccgctggccgccacccaagacaccatgagccagtccggggccgtgagctgctgcccgggtgccaccaatggcagcctgggccggtccgacggtgtggccaagatgagccccaaggacctgtttgagcagaggaagaagtattccaactccaacgtcatcatgcacgagacctcgcagtaccacgtccagcacctggccacattcatcatggacaagagcgaagccatcacgtctgtggacgacgccatccggaagctggtgcagctgagctccaaggagaagatctggacccaggagatgctgctgcaggtgaacgaccagtcgctgcggctgctggacatcgagtcacaggaggagctggaagacttcccgctgcccacggtgcagcgcagccagacggtcctcaaccagctgcgctacccgtctgtgctgctgctcgtgtgccaggactcggagcagagcaagccggatgtccacttcttccactgcgatgaggtggaggcagagctggtgcacgaggacatcgagagcgcgttggccgactgccggctgggcaagaagatgcggccgcagaccctgaagggacaccaggagaagattcggcagcggcagtccatcctgcctcctccccagggcccggcgcccatccccttccagcaccgcggcggggattccccggaggccaagaatcgcgtgggcccgcaggtgccactcagcgagccaggtttccgccgtcgggagtcgcaggaggagccgcgggccgtgctggctcagaagatagagaaggagacgcaaatcctcaactgcgccctggacgacatcgagtggtttgtggcccggctgcagaaggcagccgaggctttcaagcagctgaaccagcggaaaaaggggaagaagaagggcaagaaggcgccagcagagggcgtcctcacactgcgggcacggcccccctctgagggcgagttcatcgactgcttccagaaaatcaagctggcgattaacttgctggcaaagctgcagaagcacatccagaaccccagcgccgcggagctcgtgcacttcctcttcgggcctctggacctgatcgtcaacacctgcagtggcccagacatcgcacgctccgtctcctgcccactgctctcccgagatgccgtggacttcctgcgcggccacctggtccctaaggagatgtcgctgtgggagtcactgggagagagctggatgcggccccgttccgagtggccgcgggagccacaggtgcccctctacgtgcccaagttccacagcggctgggagcctcctgtggatgtgctgcaggaggccccctgggaggtggaggggctggcgtctgcccccatcgaggaggtgagtccagtgagccgacagtccataagaaactcccagaagcacagccccacttcagagcccacccccccgggggatgccctaccaccagtcagctccccacatactcacaggggctaccagccaacaccagccatggccaagtacgtcaagatcctgtatgacttcacagcccgaaatgccaacgagctatcggtgctcaaggatgaggtcctagaggtgctggaggacggccggcagtggtggaagctgcgcagccgcagcggccaggcggggtacgtgccctgcaacatcctaggcgaggcgcgaccggaggacgccggcgccccgttcgagcaggccggtcagaagtactggggccccgccagcccgacccacaagctacccccaagcttcccggggaacaaagacgagctcatgcagcacatggacgaggtcaacgacgagctcatccggaaaatcagcaacatcagggcgcagccacagaggcacttccgcgtggagcgcagccagcccgtgagccagccgctcacctacgagtcgggtccggacgaggtccgcgcctggctggaagccaaggccttcagcccgcggatcgtggagaacctgggcatcctgaccgggccgcagctcttctccctcaacaaggaggagctgaagaaagtgtgcggcgaggagggcgtccgcgtgtacagccagctcaccatgcagaaggccttcctggagaagcagcaaagtgggtcggagctggaagaactcatgaacaagtttcattccatgaatcagaggaggggggaggacagctaggcccagctgccttgggctggggcctgcggaggggaagcccacccacaatgcatggagtattatttttatatgtgtatgtattttgtatcaaggacacggagggggtgtggtgctggctagaggtccctgcccctgtctggaggcacaacgcccatccttaggccaaacagtacccaaggcctcagcccacaccaagactaatctcagccaaacctgctgcttggtggtgccagccccttgtccaccttctcttgaggccacagaactccctggggctggggcctctttctctggcctcccctgtgcacctggggggtcctggcccctgtgatgctcccccatccccacccacttctacatccatccacaccccagggtgagctggagctccaggctggccaggctgaacctcgcacacacgcagagttctgctccctgaggggggcccgggaggggctccagcaggaggccgtgggtgccattcgggggaaagtgggggaacgacacacacttcacctgcaagggccgacaacgcaggggacaccgtgccggcttcagacactcccagcgcccactcttacaggcccaggactggagctttctctggccaagtttcaggccaatgatccccgcatggtgttgggggtgctggtgtgtcttggtgcctggacttgagtctcaccctacagatgagaggtggctgaggcaccagggctaagcaattaaaccagttaagtctcccagga

SEQ ID NO: 8448 - protein, 715 aa, Homo sapiens; identical to SEQ ID NO: 1215

SEQ ID NO: 8449 - DNA, 1575 bp, Homo sapiens
gcagccagccgccgagcagagccgagccgagtccgcccgcggagcggagccgaggcgaacagaggctgcccgagtaggagccgaacctgcacgaagccgccgagccgagaccgagtcctgaaccgaggagggtcgaagttccccgaagtgggaagccgaatcagtccgaataggtccgagtcctcacgagggcttccgagagactcggcccctgctctcctcactgtcctgacaggctgaggcggctgtcgtccccggccgacagggctggacggctctaggcagattctcgccggcggccggcgcaattctgcctctcagagagagcttagtgccgcgggtttcgcccgttcccgccgccggcggaagccgagtcagcccgaggccgagccgagacgagccgaatgtccccgaggccgaatgctcccgaacgtcggttctccacctcttcccttccgaaagtgcccgagcggtgccggacggactaatcgggcctcggccgtggctcggacgtccgctcccgaaacgcggcgcggtcgggccccttcgtcaggagacgcgaaaatggccgaaggagcgcgagcgcgcgggccgagaggctgccgggatcgcgacggaccggcgggcggggcgggtaagatggcggccccgcggcgagggagaggatcctccacagtgctctcttcagttccccttcaaatgctgttttatctcagcggaacgtactacgccctgtatttcctcgccacgctcctgatgatcacgtataaaagtcaggtgttcagctatcctcaccgctacctggtcctcgatcttgctctgctgtttctgatggggattctagaagcagttcggttatacctgggtgagtggactgttaacaccgtgaagaacctgtcctaagagttgctatctgtttccacagcctttcaagagtaattattttatagtgtggttctcagagacattttttatccaaactgcttacccagttgctttgcaggctcaccttacagtgtcattaagtattaatcaagaagttttgtcccagagacaaataacactgggggcatcgttgggagagactctgtgtttggaagcatgtcttgtagaagccactgggtaatggcactgagatcagaaaagcccagcccaccaccacatctggagctccggaatattcaccagcacccctttccttccccttgcccttagctgtctgaggagagagccctggagagttctgccaggtcccaaaaggcagcagagtctggaggggtgggagcccccagcctccccactccagctctagggatccccaagtctgcaaccccttccagtgacctactttttttgagacgaggtctcactctgttgcccaggctggagtgcagtggtgcagtcacagctcactgcagccttgacctcctgggcttgagcgatcctcctgcctcagccctcccctcctcccaagtagctgggattacaggcacctgccaccacgcccagctaattttgttttgttttgttttgtttttttttggtagagacgagacaaggtttcttttttttttt

SEQ ID NO: 8450 - protein, 160 aa, Homo sapiens
MLPNVGSPPLPFRKCPSGAGRTNRASAVARTSAPETRRGRAPSSGDAKMAEGARARGPRGCRDRDGPAGGAGKMAAPRRGRGSSTVLSSVPLQMLFYLSGTYYALYFLATLLMITYKSQVFSYPHRYLVLDLALLFLMGILEAVRLYLGEWTVNTVKNLS

SEQ ID NO: 8451 - DNA, 2052 bp, Homo sapiens
gcagccagccgccgagcagagccgagccgagtccgcccgcggagcggagccgaggcgaacagaggctgcccgagtaggagccgaacctgcacgaagccgccgagccgagaccgagtcctgaaccgaggagggtcgaagttccccgaagtgggaagccgaatcagtccgaataggtccgagtcctcacgagggcttccgagagactcggcccctgctctcctcactgtcctgacaggctgaggcggctgtcgtccccggccgacagggctggacggctctaggcagattctcgccggcggccggcgcaattctgcctctcagagagagcttagtgccgcgggtttcgcccgttcccgccgccggcggaagccgagtcagcccgaggccgagccgagacgagccgaatgtccccgaggccgaatgctcccgaacgtcggttctccacctcttcccttccgaaagtgcccgagcggtgccggacggactaatcgggcctcggccgtggctcggacgtccgctcccgaaacgcggcgcggtcgggccccttcgtcaggagacgcgaaaatggccgaaggagcgcgagcgcgcgggccgagaggctgccgggatcgcgacggaccggcgggcggggcgggtaagatggcggccccgcggcgagggagaggatcctccacagtgctctcttcagttccccttcaaatgctgttttatctcagcggaacgtactacgccctgtatttcctcgccacgctcctgatgatcacgtataaaagtcaggtgttcagctatcctcaccgctacctggtcctcgatcttgctctgctgtttctgatggggattctagaagcagttcggttatacctgggcaccaggggcaacctgacagaggctgagaggccgctggccgccagcctggccctcacggctggcaccgccctcctctctgcccacttcctgctttggcaggccctagtgttgtgggcggactgggccctcagcgccacgctcctggcccttcacggcctggaggccgtcctgcaggtggttgccatcgcggccttcaccaggtagctacggacacccgggataccccacactggggccctcctcctgggcctgaccagtcccccagctgtcacctccccattcctggacaggaagggcacttttcctagtgactggccatagatggttttggatggttccatctgttctggcaggagtgggagcaggagccagggcagaacaaactgctggaggccctggtgttgggaacagctgcggggagggtagggaccagacagaactgccttcaagatgagtcccaggagcgcacactcagccctgtcagtggggtctggctttagcagccaggcctccacagacccccatgggcccccagggccgagagggaggacagagcccttcagaacagaggcctcatctcactgcatcccccatcaccccctagttccccaatggtcctaatttgtgttctgagatcccagtttactccgtggccaggccccacctgtgtttccaagtcgggctggagacgcaggatggggtaggccttgtgctctgagcaaccccagctctgcctcacaggcaggcaggcccggtgcaagagtggactctgggttcctaaagcaataaatgcaaacaagccaacagctctgctgcctagcaatttccatcttagccacacttctcccttcaggggcttcggaggagaggtcagggctaaggccggggatgagactgcaggagagagagcagcggagggccacattcggagcctccgtccactccagttttatcagcttttgccttttgcacggagtgctaaacaaattctagctctgtgtttttttcccattcccagatttactatcagttctccttaaaaagtatctaagctgttacagtagctttcccttcacttgattctattgtgtgttttctatgtttggaataattacacccaaatatctagatattttctcttcaccgcattttgtaaataaagagatgtgtatgcctccctgaatt

SEQ ID NO: 8452 - protein, 216 aa, Homo sapiens
MLPNVGSPPLPFRKCPSGAGRTNRASAVARTSAPETRRGRAPSSGDAKMAEGARARGPRGCRDRDGPAGGAGKMAAPRRGRGSSTVLSSVPLQMLFYLSGTYYALYFLATLLMITYKSQVFSYPHRYLVLDLALLFLMGILEAVRLYLGTRGNLTEAERPLAASLALTAGTALLSAHFLLWQALVLWADWALSATLLALHGLEAVLQVVAIAAFTR

SEQ ID NO: 8453 - DNA, 2035 bp, Homo sapiens
acggaccggcgggcggggcgggtaagatggcggccccgcggcgagggagaggatcctccacagtggtatcctgctgcgtgcccctccaggacagcacccagaggcccgaattgctgctgcacagagagcactcggcctcaccccacgttttccctaagttctgtctagtaattccactttggagaggggggtgttccttgacagatttagagagttgatgtaacttcctcggatcagttctgctggctccatcccctacctgctcagccctgcacaaagtggctaagcacgccacactgccggctcccaaggcgatggccacctgcctctgtctcggccgctagtggcaggaagatggaaatccctcactttgtccctagattcattttattttatttttgtttgtttatgtttttttaaggacagagccttcctctcacccaggctggagtgtggcaatcacagctcactgcagcctcagcctcctgaagctctggcatcaggcgggagccactgtgcctggccccatagactcatgttagcataaacaaataggaaatgtacacagctcaggaaatggctactagatacttaagtcccccaaacagaaatatatttcctctgaagaaactgaaaaaagtggccgggcgcagtggctcatgcctgtaatcccaacactctgggaggctgaggtggacagatcacttgacaccaggagtttcagaccagcctggccaacatggtgaaaccctgtccctactaaaaatacaaaaaattagctgggcatggttttgcacgcctgtaatcccagctactcaggaggctgaggcagaagaatcacttgaacccaggaggcggaggttgcagtgagccaagattgtgccactgcacagtgtccagtctgggcaacagagcaagactctatctcaaaaaaaaaaagaaaatgacaaagttattttttctctcttaactcataactggggccaaaggcagggtgacatcactggggatgccagtgtgtggaggctgtcccctgaccagtcctgtccacagtcaggagggcaggggctgcagtgcacagaccgcattgttgtggcatggaggggggtcccacaaaggccttgtcagctcatgggaccacattggcagccagcatagtgacagaagcctcagataggcagtgagccattgccaagactccatggtcccttggtgtctgtggccaccaaacagatgacagaaccagcccctcttgttcagccacctgggaggctgctcccaagcctgttgagcttgaggatccttaaccactcaccagctctcttcagttccccttcaaatgctgttttatctcagcggaacgtactacgccctgtatttcctcgccacgctcctgatgatcacgtataaaagtcaggtgttcagctatcctcaccgctacctggtcctcgatcttgctctgctgtttctgatggggattctagaagcagttcggttatacctgggcaccaggggcaacctgacagaggctgagaggccgctggccgccagcctggccctcacggctggcaccgccctcctctctgcccacttcctgctttggcaggccctagtgttgtgggcggactgggccctcagcgccacgctcctggcccttcacggcctggaggccgtcctgcaggtggttgccatcgcggccttcaccaggggcttcggaggagaggtcagggctaaggccggggatgagactgcaggagagagagcagcggagggccacattcggagcctccgtccactccagttttatcagcttttgccttttgcacggagtgctaaacaaattctagctctgtgtttttttcccattcccagatttactatcagttctccttaaaaagtatctaagctgttacagtagctttcccttcacttgattctattgtgtgttttctatgtttggaataattacacccaaatatctagatattttctcttcaccgcattttgtaaataaagagatgtgtatgcctccctg

SEQ ID NO: 8454 - protein, 184 aa, Homo sapiens
MLFYLSGTYYALYFLATLLMITYKSQVFSYPHRYLVLDLALLFLMGILEAVRLYLGTRGNLTEAERPLAASLALTAGTALLSAHFLLWQALVLWADWALSATLLALHGLEAVLQVVAIAAFTRGFGGEVRAKAGDETAGERAAEGHIRSLRPLQFYQLLPFARSAKQILALCFFPIPRFTISSP

SEQ ID NO: 8455 - DNA, 1731 bp, Homo sapiens
ctctcttaactcataactggggccaaaggcagggtgacatcactggggatgccagtgtgtggaggctgtcccctgaccagtcctgtccacagtcaggagggcaggggctgcagtgcacagaccgcattgttgtggcatggaggggggtcccacaaaggccttgtcagctcatgggaccacattggcagccagcatagtgacagaagcctcagataggcagtgagccattgccaagactccatggtcccttggtgtctgtggccaccaaacagatgacagaaccagcccctcttgttcagccacctgggaggctgctcccaagcctgttgagcttgaggatccttaaccactcaccagctctcttcagttccccttcaaatgctgttttatctcagcggaacgtactacgccctgtatttcctcgccacgctcctgatgatcacgtataaaagtcaggtgttcagctatcctcaccgctacctggtcctcgatcttgctctgctgtttctgatggggattctagaagcagttcggttatacctgggcaccaggggcaacctgacagaggctgagaggccgctggccgccagcctggccctcacggctggcaccgccctcctctctgcccacttcctgctttggcaggccctagtgttgtgggcggactgggccctcagcgccacgctcctggcccttcacggcctggaggccgtcctgcaggtggttgccatcgcggccttcaccaggtagctacggacacccgggataccccacactggggccctcctcctgggcctgaccagtcccccagctgtcacctccccattcctggacaggaagggcacttttcctagtgactggccatagatggttttggatggttccatctgttctggcaggagtgggagcaggagccagggcagaacaaactgctggaggccctggtgttgggaacagctgcggggagggtagggaccagacagaactgccttcaagatgagtcccaggagcgcacactcagccctgtcagtggggtctggctttagcagccaggcctccacagacccccatgggcccccagggccgagagggaggacagagcccttcagaacagaggcctcatctcactgcatcccccatcaccccctagttccccaatggtcctaatttgtgttctgagatcccagtttactccgtggccaggccccacctgtgtttccaagtcgggctggagacgcaggatggggtaggccttgtgctctgagcaaccccagctctgcctcacaggcaggcaggcccggtgcaagagtggactctgggttcctaaagcaataaatgcaaacaagccaacagctctgctgcctagcaatttccatcttagccacacttctcccttcaggggcttcggaggagaggtcagggctaaggccggggatgagactgcaggagagagagcagcggagggccacattcggagcctccgtccactccagttttatcagcttttgccttttgcacggagtgctaaacaaattctagctctgtgtttttttcccattcccagatttactatcagttctccttaaaaagtatctaagctgttacagtagctttcccttcacttgattctattgtgtgttttctatgtttggaataattacacccaaatatctagatattttctcttcaccgcattttgtaaataaagagatgtgtatgcctccctgaatt

SEQ ID NO: 8456 - protein, 123 aa, Homo sapiens
MLFYLSGTYYALYFLATLLMITYKSQVFSYPHRYLVLDLALLFLMGILEAVRLYLGTRGNLTEAERPLAASLALTAGTALLSAHFLLWQALVLWADWALSATLLALHGLEAVLQVVAIAAFTR

SEQ ID NO: 8457 - DNA, 536 bp, Homo sapiens
ctcaccagctctcttcagttccccttcaaatgctgttttatctcagcggaacgtactacgccctgtatttcctcgccacctctgcctcacaggcaggcaggcccggtgcaagagtggactctgggttcctaaagcaataaatgcaaacaagccaacagctctgctgcctagcaatttccatcttagccacacttctcccttcaggggcttcggaggagaggtcagggctaaggccggggatgagactgcaggagagagagcagcggagggccacattcggagcctccgtccactccagttttatcagcttttgccttttgcacggagtgctaaacaaattctagctctgtgtttttttcccattcccagatttactatcagttctccttaaaaagtatctaagctgttacagtagctttcccttcacttgattctattgtgtgttttctatgtttggaataattacacccaaatatctagatattttctcttcaccgcattttgtaaataaagagatgtgtatgcctccctgaatt

SEQ ID NO: 8458 - protein, 36 aa, Homo sapiens
MLFYLSGTYYALYFLATSASQAGRPGARVDSGFLKQ

SEQ ID NO: 8459 - DNA, 3358 bp, Homo sapiens
attcccacccctacccaggaccggcagccggagccttgggtccctgcatgggcctggggcgccctgtgccccttcacctcgtcctcgtccagttgactgctgtggcagccggtgctacccgctgtgtccactgcaccctggccctgttctgagcggtcacagcagctggggagaagggccatcctggaagccgggcagatgaggacggaaccagacagtcccactgtggtgggcagaggttcctcctctcccggccccgccccggcccggccccgccgagcgtcccacccgcccgcgggagacctggcgccccggccgaggcgcgaacagacggacgcaccggcgagcgccgaggggacaggccgagcgcggggcgccggaggcaggtgtgggacaggcactggcctcagaccggggccacactgaggtctgcccttctcccgctggccgccacccaagacaccatgagccagtccggggccgtgagctgctgcccgggtgccaccaatggcagcctgggccggtccgacggtgtggccaagatgagccccaaggacctgtttgagcagaggaagaagtattccaactccaacgtcatcatgcacgagacctcgcagtaccacgtccagcacctggccacattcatcatggacaagagcgaagccatcacgtctgtggacgacgccatccggaagctggtgcagctgagctccaaggagaagatctggacccaggagatgctgctgcaggtgaacgaccagtcgctgcggctgctggacatcgagtcacaggaggagctggaagacttcccgctgcccacggtgcagcgcagccagacggtcctcaaccagctgcgctacccgtctgtgctgctgctcgtgtgccaggactcggagcagagcaagccggatgtccacttcttccactgcgatgaggtggaggcagagctggtgcacgaggacatcgagagcgcgttggccgactgccggctgggcaagaagatgcggccgcagaccctgaagggacaccaggagaagattcggcagcggcagtccatcctgcctcctccccagggcccggcgcccatccccttccagcaccgcggcggggattccccggaggccaagaatcgcgtgggcccgcaggtgccactcagcgagccaggtttccgccgtcgggagtcgcaggaggagccgcgggccgtgctggctcagaagatagagaaggagacgcaaatcctcaactgcgccctggacgacatcgagtggtttgtggcccggctgcagaaggcagccgaggctttcaagcagctgaaccagcggaaaaaggggaagaagaagggcaagaaggcgccagcagagggcgtcctcacactgcgggcacggcccccctctgagggcgagttcatcgactgcttccagaaaatcaagctggcgattaacttgctggcaaagctgcagaagcacatccagaaccccagcgccgcggagctcgtgcacttcctcttcgggcctctggacctgatcgtcaacacctgcagtggcccagacatcgcacgctccgtctcctgcccactgctctcccgagatgccgtggacttcctgcgcggccacctggtccctaaggagatgtcgctgtgggagtcactgggagagagctggatgcggccccgttccgagtggccgcgggagccacaggtgcccctctacgtgcccaagttccacagcggctgggagcctcctgtggatgtgctgcaggaggccccctgggaggtggaggggctggcgtctgcccccatcgaggaggtgagtccagtgagccgacagtccataagaaactcccagaagcacagccccacttcagagcccacccccccgggggatgccctaccaccagtcagctccccacatactcacaggggctaccagccaacaccagccatggccaagtacgtcaagatcctgtatgacttcacagcccgaaatgccaacgagctatcggtgctcaaggatgaggtcctagaggtgctggaggacggccggcagtggtggaagctgcgcagccgcagcggccaggcggggtacgtgccctgcaacatcctaggcgaggcgcgaccggaggacgccggcgccccgttcgagcaggccggtcagaagtactggggccccgccagcccgacccacaagctacccccaagcttcccggggaacaaagacgagctcatgcagcacatggacgaggtcaacgacgagctcatccggaaaatcagcaacatcagggcgcagccacagaggcacttccgcgtggagcgcagccagcccgtgagccagccgctcacctacgagtcgggtccggacgaggtccgcgcctggctggaagccaaggccttcagcccgcggatcgtggagaacctgggcatcctgaccgggccgcagctcttctccctcaacaaggaggagctgaagaaagtgtgcggcgaggagggcgtccgcgtgtacagccagctcaccatgcagaaggccttcctggagaagcagcaaagtgggtcggagctggaagaactcatgaacaagtttcattccatgaatcagaggaggggggaggacagctaggcccagctgccttgggctggggcctgcggaggggaagcccacccacaatgcatggagtattatttttatatgtgtatgtattttgtatcaaggacacggagggggtgtggtgctggctagaggtccctgcccctgtctggaggcacaacgcccatccttaggccaaacagtacccaaggcctcagcccacaccaagactaatctcagccaaacctgctgcttggtggtgccagccccttgtccaccttctcttgaggccacagaactccctggggctggggcctctttctctggcctcccctgtgcacctggggggtcctggcccctgtgatgctcccccatccccacccacttctacatccatccacaccccagggtgagctggagctccaggctggccaggctgaacctcgcacacacgcagagttctgctccctgaggggggcccgggaggggctccagcaggaggccgtgggtgccattcgggggaaagtgggggaacgacacacacttcacctgcaagggccgacaacgcaggggacaccgtgccggcttcagacactcccagcgcccactcttacaggcccaggactggagctttctctggccaagtttcaggccaatgatccccgcatggtgttgggggtgctggtgtgtcttggtgcctggacttgagtctcaccctacagatgagaggtggctgaggcaccagggctaagcaattaaaccagttaagtctcccagga

SEQ ID NO: 8460 - protein, 715 aa, Homo sapiens; identical to SEQ ID NO: 1215

SEQ ID NO: 8461 - DNA, 213 bp, Homo sapiens
gacctggcgccccggccgaggcgcgaacagacggacgcaccggcgagcgccgaggggacaggccgagcgcggggcgccggaggcaggtgtgggacaggcactggcctcagaccggggccacactgaggtctgcccttctcccgctggccgccacccaagacaccatgagccagtccggggccgtgagctgctgcccgggtgccaccaacccct

SEQ ID NO: 8462 - protein, 69 aa, Homo sapiens
TWRPGRGANRRTHRRAPRGQAERGAPEAGVGQALASDRGHTEVCPSPAGRHPRHHEPVRGRELLPGCHQ

SEQ ID NO: 8463 - DNA, 1078 bp, Homo sapiens
cgcgaacagacggacgcaccggcgagcgccgaggggacaggccgagcgcggggcgccggaggcaggtgtgggacaggcactggcctcagaccggggccacactgaggtctgcccttctcccgctggccgccacccaagacaccatgagccagtccggggccgtgagctgctgcccgggtgccaccaatggcagcctgggccggtccgacggtgtggccaagatgagccccaaggacctgtttggtgagtgaggtttgagaacgggctggacgtcacaggggagaaatgggcactgcatccaggtgggggacagctgctcctgccccacagctgtgcctggtctggcccaggggatctccgggtgcccagggaggcctctggaccctaatcaaccttccgaaagctcctggccactggatcccctcccccacacccgtaaggggagaggcctttactaataattcagggagcatcaatattgattccgctgcactcattgctgtaacctgatcacagcgaggttcaggcaggataagccgccaggtgtctgctccaggaggggggcctggccagcccccacctccccccactctgcccttccccagagacgaccctgccctctcgctagctagatgcacccttcacttatgtctttggacaaggtgcctagtctggaaagcgagaagacctgggagggcagggagagtgaagctggcagctctcagagtgggaagaagccgggctgggacccccttcctgtcccctcaccctccgggacagaaaccccccgggcacaggctgctggtccccactccactcagagcaagcccatcgccttctccgagctgcgtccttctccaagggggcttccctggagggagggagggggcttcctgcaggtcctgatttcacacccacatccttcctggtggccaagaggtccacggagcagcctccctccgcttgactccaccttcccttgtgggtccagtcccaactggacgggaggctgtgggtcctgcccgtcgggggagtgactggtgtctcccggttcagagcagaggaagaagtattccaa

SEQ ID NO: 8464 - protein, 35 aa, Homo sapiens
MSQSGAVSCCPGATNGSLGRSDGVAKMSPKDLFGE

SEQ ID NO: 8465 - DNA, 1199 bp, Homo sapiens
agacggacgcaccggcgagcgccgaggggacaggccgagcgcggggcgccggaggcagcaggaccctcccgagggcctgaccgtggaggtagcactgcacacccactccctgtgggccggagccaggaggcacttcctgggtgtcggagcccagaaggaaaccagtggccgggaagcaccagctgggtgtgggacaggcactggcctcagaccggggccacactgaggtctgcccttctcccgctggccgccacccaagacaccatgagccagtccggggccgtgagctgctgcccgggtgccaccaatggcagcctgggccggtccgacggtgtggccaagatgagccccaaggacctgtttggtgagtgaggtttgagaacgggctggacgtcacaggggagaaatgggcactgcatccaggtgggggacagctgctcctgccccacagctgtgcctggtctggcccaggggatctccgggtgcccagggaggcctctggaccctaatcaaccttccgaaagctcctggccactggatcccctcccccacacccgtaaggggagaggcctttactaataattcagggagcatcaatattgattccgctgcactcattgctgtaacctgatcacagcgaggttcaggcaggataagccgccaggtgtctgctccaggaggggggcctggccagcccccacctccccccactctgcccttccccagagacgaccctgccctctcgctagctagatgcacccttcacttatgtctttggacaaggtgcctagtctggaaagcgagaagacctgggagggcagggagagtgaagctggcagctctcagagtgggaagaagccgggctgggacccccttcctgtcccctcaccctccgggacagaaaccccccgggcacaggctgctggtccccactccactcagagcaagcccatcgccttctccgagctgcgtccttctccaagggggcttccctggagggagggagggggcttcctgcaggtcctgatttcacacccacatccttcctggtggccaagaggtccacggagcagcctccctccgcttgactccaccttcccttgtgggtccagtcccaactggacgggaggctgtgggtcctgcccgtcgggggagtgactggtgtctcccggttcagagcagaggaagaagtattccaa

SEQ ID NO: 8466 - protein, 35 aa, Homo sapiens; identical to SEQ ID NO: 8464

SEQ ID NO: 8467 - DNA, 1199 bp, Homo sapiens
aatccctgcgtccggagagcgctggtggtagggaggcttctcccggttctgtgagcagcaggaccctcccgagggcctgaccgtggaggtagcactgcacacccactccctgtgggccggagccaggaggcacttcctgggtgtcggagcccagaaggaaaccagtggccgggaagcaccagctgggtgtgggacaggcactggcctcagaccggggccacactgaggtctgcccttctcccgctggccgccacccaagacaccatgagccagtccggggccgtgagctgctgcccgggtgccaccaatggcagcctgggccggtccgacggtgtggccaagatgagccccaaggacctgtttggtgagtgaggtttgagaacgggctggacgtcacaggggagaaatgggcactgcatccaggtgggggacagctgctcctgccccacagctgtgcctggtctggcccaggggatctccgggtgcccagggaggcctctggaccctaatcaaccttccgaaagctcctggccactggatcccctcccccacacccgtaaggggagaggcctttactaataattcagggagcatcaatattgattccgctgcactcattgctgtaacctgatcacagcgaggttcaggcaggataagccgccaggtgtctgctccaggaggggggcctggccagcccccacctccccccactctgcccttccccagagacgaccctgccctctcgctagctagatgcacccttcacttatgtctttggacaaggtgcctagtctggaaagcgagaagacctgggagggcagggagagtgaagctggcagctctcagagtgggaagaagccgggctgggacccccttcctgtcccctcaccctccgggacagaaaccccccgggcacaggctgctggtccccactccactcagagcaagcccatcgccttctccgagctgcgtccttctccaagggggcttccctggagggagggagggggcttcctgcaggtcctgatttcacacccacatccttcctggtggccaagaggtccacggagcagcctccctccgcttgactccaccttcccttgtgggtccagtcccaactggacgggaggctgtgggtcctgcccgtcgggggagtgactggtgtctcccggttcagagcagaggaagaagtattccaa

SEQ ID NO: 8468 - protein, 35 aa, Homo sapiens; identical to SEQ ID NO: 8464

SEQ ID NO: 8469 - DNA, 3544 bp, Homo sapiens
gggacagctgctcctgccccacagctgtgcctggtctggcccaggggatctccgggtgcccagggaggcctctggaccctaatcaaccttccgaaagctcctggccactggatcccctcccccacacccgtaaggggagaggcctttactaataattcagggagcatcaatattgattccgctgcactcattgctgtaacctgatcacagcgaggttcaggcaggataagccgccaggtgtctgctccaggaggggggcctggccagcccccacctccccccactctgcccttccccagagacgaccctgccctctcgctagctagatgcacccttcacttatgtctttggacaaggtgcctagtctggaaagcgagaagacctgggagggcagggagagtgaagctggcagctctcagagtgggaagaagccgggctgggacccccttcctgtcccctcaccctccgggacagaaaccccccgggcacaggctgctggtccccactccactcagagcaagcccatcgccttctccgagctgcgtccttctccaagggggcttccctggagggagggagggggcttcctgcaggtcctgatttcacacccacatccttcctggtggccaagaggtccacggagcagcctccctccgcttgactccaccttcccttgtgggtccagtcccaactggacgggaggctgtgggtcctgcccgtcgggggagtgactggtgtctcccggttcagagcagaggaagaagtattccaactccaacgtcatcatgcacgagacctcgcagtaccacgtccagcacctggccacattcatcatggacaagagcgaagccatcacgtctgtggacgacgccatccggaagctggtgcagctgagctccaaggagaagatctggacccaggagatgctgctgcaggtgaacgaccagtcgctgcggctgctggacatcgagtcacaggaggagctggaagacttcccgctgcccacggtgcagcgcagccagacggtcctcaaccagctgcgctacccgtctgtgctgctgctcgtgtgccaggactcggagcagagcaagccggatgtccacttcttccactgcgatgaggtggaggcagagctggtgcacgaggacatcgagagcgcgttggccgactgccggctgggcaagaagatgcggccgcagaccctgaagggacaccaggagaagattcggcagcggcagtccatcctgcctcctccccagggcccggcgcccatccccttccagcaccgcggcggggattccccggaggccaagaatcgcgtgggcccgcaggtgccactcagcgagccaggtttccgccgtcgggagtcgcaggaggagccgcgggccgtgctggctcagaagatagagaaggagacgcaaatcctcaactgcgccctggacgacatcgagtggtttgtggcccggctgcagaaggcagccgaggctttcaagcagctgaaccagcggaaaaaggggaagaagaagggcaagaaggcgccagcagagggcgtcctcacactgcgggcacggcccccctctgagggcgagttcatcgactgcttccagaaaatcaagctggcgattaacttgctggcaaagctgcagaagcacatccagaaccccagcgccgcggagctcgtgcacttcctcttcgggcctctggacctgatcgtcaacacctgcagtggcccagacatcgcacgctccgtctcctgcccactgctctcccgagatgccgtggacttcctgcgcggccacctggtccctaaggagatgtcgctgtgggagtcactgggagagagctggatgcggccccgttccgagtggccgcgggagccacaggtgcccctctacgtgcccaagttccacagcggctgggagcctcctgtggatgtgctgcaggaggccccctgggaggtggaggggctggcgtctgcccccatcgaggaggtgagtccagtgagccgacagtccataagaaactcccagaagcacagccccacttcagagcccacccccccgggggatgccctaccaccagtcagctccccacatactcacaggggctaccagccaacaccagccatggccaagtacgtcaagatcctgtatgacttcacagcccgaaatgccaacgagctatcggtgctcaaggatgaggtcctagaggtgctggaggacggccggcagtggtggaagctgcgcagccgcagcggccaggcggggtacgtgccctgcaacatcctaggcgaggcgcgaccggaggacgccggcgccccgttcgagcaggccggtcagaagtactggggccccgccagcccgacccacaagctacccccaagcttcccggggaacaaagacgagctcatgcagcacatggacgaggtcaacgacgagctcatccggaaaatcagcaacatcagggcgcagccacagaggcacttccgcgtggagcgcagccagcccgtgagccagccgctcacctacgagtcgggtccggacgaggtccgcgcctggctggaagccaaggccttcagcccgcggatcgtggagaacctgggcatcctgaccgggccgcagctcttctccctcaacaaggaggagctgaagaaagtgtgcggcgaggagggcgtccgcgtgtacagccagctcaccatgcagaaggccttcctggagaagcagcaaagtgggtcggagctggaagaactcatgaacaagtttcattccatgaatcagaggaggggggaggacagctaggcccagctgccttgggctggggcctgcggaggggaagcccacccacaatgcatggagtattatttttatatgtgtatgtattttgtatcaaggacacggagggggtgtggtgctggctagaggtccctgcccctgtctggaggcacaacgcccatccttaggccaaacagtacccaaggcctcagcccacaccaagactaatctcagccaaacctgctgcttggtggtgccagccccttgtccaccttctcttgaggccacagaactccctggggctggggcctctttctctggcctcccctgtgcacctggggggtcctggcccctgtgatgctcccccatccccacccacttctacatccatccacaccccagggtgagctggagctccaggctggccaggctgaacctcgcacacacgcagagttctgctccctgaggggggcccgggaggggctccagcaggaggccgtgggtgccattcgggggaaagtgggggaacgacacacacttcacctgcaagggccgacaacgcaggggacaccgtgccggcttcagacactcccagcgcccactcttacaggcccaggactggagctttctctggccaagtttcaggccaatgatccccgcatggtgttgggggtgctggtgtgtcttggtgcctggacttgagtctcaccctacagatgagaggtggctgaggcaccagggctaagcaattaaaccagttaagtctcccagga

SEQ ID NO: 8470 - protein, 670 aa, Homo sapiens [sequence omitted]

SEQ ID NO: 8471 - DNA, 1942 bp, Homo sapiens
gcagaaggcagccgaggctttcaagcagctgaaccagcggaaaaaggggaagaagaagggcaagaaggcgccagcaggtgcaggggacagggacggggccggcaggtgcaggggacggggccagcaggtgcaggggacagggacggggacggggccagggacatccatgggggctactcatggaggtggaggaaggtccagcccacacagatgggctgcgtgggacagaaggcgcaggggccggggagatcagggccagcctggctcacgcggtgcctcccatgccagagggcgtcctcacactgcgggcacggcccccctctgagggcgagttcatcgactgcttccagaaaatcaagctggcgattaacttgctggtgggtccggtggccccagccctgccccactgtctgtgctgaggggagggtggaggccccgccccgccccggcacctgctcacttgttcccacccccaggcaaagctgcagaagcacatccagaaccccagcgccgcggagctcgtgcacttcctcttcgggcctctggacctggtgcctggggccgggcggcaggggcgcgcagggtgggggcccagaggcctctgcagcatctccccggggtcggggttggggcagcaggtgcccgccttgggcagcccggttcacgctgtgtggccactctccctggggtccaaagtcccttcccgagggccagcctgtggagctacgggggtgctgggccagggtctgtgggcctcagtcccctctgaacctcactgtgccccagatcgtcaacacctgcagtggcccagacatcgcacgctccgtctcctgcccactgctctcccgagatgccgtggacttcctgcgcggccacctggtccctaaggagatgtcgctgtgggagtcactgggagagagctggatgcggccccgttccgagtggccgcgggagccacaggtgcccctctacgtgcccaagttccacagcggctgggagcctcctgtggatgtgctgcaggaggccccctgggaggtggaggggctggcgtctgcccccatcgaggaggtgagtccagtgagccgacagtccataagaaactcccagaagcacagccccacttcagagcccacccccccgggggatgccctaccaccagtcagctccccacatactcacaggggctaccagccaacaccagccatggccaagtacgtcaagatcctgtatgacttcacagcccgaaatgccaacgagctatcggtgctcaaggatgaggtcctagaggtgctggaggacggccggcagtggtggaagctgcgcagccgcagcggccaggcggggtacgtgccctgcaacatcctaggcgaggcgcgaccggaggacgccggcgccccgttcgagcaggccggtcagaagtactggggccccgccagcccgacccacaagctacccccaagcttcccggggaacaaagacgagctcatgcagcacatggacgaggtcaacgacgagctcatccggaaaatcagcaacatcagggcgcagccacagaggcacttccgcgtggagcgcagccagcccgtgagccagccgctcacctacgagtcgggtccggacgaggtccgcgcctggctggaagccaaggccttcagcccgcggatcgtggagaacctgggcatcctgaccgggccgcagctcttctccctcaacaaggaggagctgaagaaagtgtgcggcgaggagggcgtccgcgtgtacagccagctcaccatgcagaaggccttcctggagaagcagcaaagtgggtcggagctggaagaactcatgaacaagtttcattccatgaatcagaggaggggggaggacagctaggcccagctgccttgggctggggcctgcggaggggaagcccacccacaatgcatggagtattattttt

SEQ ID NO: 8472 - protein, 554 aa, Homo sapiens
MGCVGQKAQGPGRSGPAWLTRCLPCQRASSHCGHGPPLRASSSTASRKSSWRLTCWWVRWPQPCPTVCAEGRVEAPPRPGTCSLVPTPRQSCRSTSRTPAPRSSCTSSSGLWTWCLGPGGRGAQGGGPEASAASPRGRGWGSRCPPWAARFTLCGHSPWGPKSLPEGQPVELRGCWARVCGPQSPLNLTVPQIVNTCSGPDIARSVSCPLLSRDAVDFLRGHLVPKEMSLWESLGESWMRPRSEWPREPQVPLYVPKFHSGWEPPVDVLQEAPWEVEGLASAPIEEVSPVSRQSIRNSQKHSPTSEPTPPGDALPPVSSPHTHRGYQPTPAMAKYVKILYDFTARNANELSVLKDEVLEVLEDGRQWWKLRSRSGQAGYVPCNILGEARPEDAGAPFEQAGQKYWGPASPTHKLPPSFPGNKDELMQHMDEVNDELIRKISNIRAQPQRHFRVERSQPVSQPLTYESGPDEVRAWLEAKAFSPRIVENLGILTGPQLFSLNKEELKKVCGEEGVRVYSQLTMQKAFLEKQQSGSELEELMNKFHSMNQRRGEDS

SEQ ID NO: 8473 - DNA, 2621 bp, Homo sapiens
gcagaaggcagccgaggctttcaagcagctgaaccagcggaaaaaggggaagaagaagggcaagaaggcgccagcaggtgcaggggacagggacggggccggcaggtgcaggggacggggccagcaggtgcaggggacagggacggggacggggccagggacatccatgggggctactcatggaggtggaggaaggtccagcccacacagatgggctgcgtgggacagaaggcgcaggggccggggagatcagggccagcctggctcacgcggtgcctcccatgccagagggcgtcctcacactgcgggcacggcccccctctgagggcgagttcatcgactgcttccagaaaatcaagctggcgattaacttgctggtgggtccggtggccccagccctgccccactgtctgtgctgaggggagggtggaggccccgccccgccccggcacctgctcacttgttcccacccccaggcaaagctgcagaagcacatccagaaccccagcgccgcggagctcgtgcacttcctcttcgggcctctggacctggtgcctggggccgggcggcaggggcgcgcagggtgggggcccagaggcctctgcagcatctccccggggtcggggttggggcagcaggtgcccgccttgggcagcccggttcacgctgtgtggccactctccctggggtccaaagtcccttcccgagggccagcctgtggagctacgggggtgctgggccagggtctgtgggcctcagtcccctctgaacctcactgtgccccagatcgtcaacacctgcagtggcccagacatcgcacgctccgtctcctgcccactgctctcccgagatgccgtggacttcctgcgcggccacctggtccctaaggagatgtcgctgtgggagtcactgggagagagctggatgcggccccgttccgagtggccgcgggagccacaggtgcccctctacgtgcccaagttccacagcggctgggagcctcctgtggatgtgctgcaggaggccccctgggaggtggaggggctggcgtctgcccccatcgaggaggtgagtccagtgagccgacagtccataagaaactcccagaagcacagccccacttcagagcccacccccccgggggatgccctaccaccagtcagctccccacatactcacaggggctaccagccaacaccagccatggccaagtacgtcaagatcctgtatgacttcacagcccgaaatgccaacgagctatcggtgctcaaggatgaggtcctagaggtgctggaggacggccggcagtggtggaagctgcgcagccgcagcggccaggcggggtacgtgccctgcaacatcctaggcgaggcgcgaccggaggacgccggcgccccgttcgagcaggccggtcagaagtactggggccccgccagcccgacccacaagctacccccaagcttcccggggaacaaagacgagctcatgcagcacatggacgaggtcaacgacgagctcatccggaaaatcagcaacatcagggcgcagccacagaggcacttccgcgtggagcgcagccagcccgtgagccagccgctcacctacgagtcgggtccggacgaggtccgcgcctggctggaagccaaggccttcagcccgcggatcgtggagaacctgggcatcctgaccgggccgcagctcttctccctcaacaaggaggagctgaagaaagtgtgcggcgaggagggcgtccgcgtgtacagccagctcaccatgcagaaggccttcctggagaagcagcaaagtgggtcggagctggaagaactcatgaacaagtttcattccatgaatcagaggaggggggaggacagctaggcccagctgccttgggctggggcctgcggaggggaagcccacccacaatgcatggagtattatttttatatgtgtatgtattttgtatcaaggacacggagggggtgtggtgctggctagaggtccctgcccctgtctggaggcacaacgcccatccttaggccaaacagtacccaaggcctcagcccacaccaagactaatctcagccaaacctgctgcttggtggtgccagccccttgtccaccttctcttgaggccacagaactccctggggctggggcctctttctctggcctcccctgtgcacctggggggtcctggcccctgtgatgctcccccatccccacccacttctacatccatccacaccccagggtgagctggagctccaggctggccaggctgaacctcgcacacacgcagagttctgctccctgaggggggcccgggaggggctccagcaggaggccgtgggtgccattcgggggaaagtgggggaacgacacacacttcacctgcaagggccgacaacgcaggggacaccgtgccggcttcagacactcccagcgcccactcttacaggcccaggactggagctttctctggccaagtttcaggccaatgatccccgcatggtgttgggggtgctggtgtgtcttggtgcctggacttgagtctcaccctacagatgagaggtggctgaggcaccagggctaagcaattaaaccagttaagtctcccagga

SEQ ID NO: 8474 - protein, 554 aa, Homo sapiens; identical to SEQ ID NO: 8472

SEQ ID NO: 8475 - DNA, 923 bp, Homo sapiens
attccgggctgacgctgcctgcagcctctctccacggtgacctccagaacagaaaagaggcagccagtcgtgcacctgggaagctgctgccccccagccactgcccaggtctcagaggagacccccaccagactgggcctcagcccctcctgttcctcacaggggctaccagccaacaccagccatggccaagtacgtcaagatcctgtatgacttcacagcccgaaatgccaacgagctatcggtgctcaaggatgaggtcctagaggtgctggaggacggccggcagtggtggaagctgcgcagccgcagcggccaggcggggtacgtgccctgcaacatcctaggcgaggcgcgaccggaggacgccggcgccccgttcgagcaggccggtcagaagtactggggccccgccagcccgacccacaagctacccccaagcttcccggggaacaaagacgagctcatgcagcacatggacgaggtcaacgacgagctcatccggaaaatcagcaacatcagggcgcagccacagaggcacttccgcgtggagcgcagccagcccgtgagccagccgctcacctacgagtcgggtccggacgaggtccgcgcctggctggaagccaaggccttcagcccgcggatcgtggagaacctgggcatcctgaccgggccgcagctcttctccctcaacaaggaggagctgaagaaagtgtgcggcgaggagggcgtccgcgtgtacagccagctcaccatgcagaaggccttcctggagaagcagcaaagtgggtcggagctggaagaactcatgaacaagtttcattccatgaatcagaggaggggggaggacagctaggcccagctgccttgggctggggcctgcggaggggaagcccacccacaatgcatggagtattattttt

SEQ ID NO: 8476 - protein, 223 aa, Homo sapiens [sequence omitted]

SEQ ID NO: 8477 - DNA, 1602 bp, Homo sapiens
attccgggctgacgctgcctgcagcctctctccacggtgacctccagaacagaaaagaggcagccagtcgtgcacctgggaagctgctgccccccagccactgcccaggtctcagaggagacccccaccagactgggcctcagcccctcctgttcctcacaggggctaccagccaacaccagccatggccaagtacgtcaagatcctgtatgacttcacagcccgaaatgccaacgagctatcggtgctcaaggatgaggtcctagaggtgctggaggacggccggcagtggtggaagctgcgcagccgcagcggccaggcggggtacgtgccctgcaacatcctaggcgaggcgcgaccggaggacgccggcgccccgttcgagcaggccggtcagaagtactggggccccgccagcccgacccacaagctacccccaagcttcccggggaacaaagacgagctcatgcagcacatggacgaggtcaacgacgagctcatccggaaaatcagcaacatcagggcgcagccacagaggcacttccgcgtggagcgcagccagcccgtgagccagccgctcacctacgagtcgggtccggacgaggtccgcgcctggctggaagccaaggccttcagcccgcggatcgtggagaacctgggcatcctgaccgggccgcagctcttctccctcaacaaggaggagctgaagaaagtgtgcggcgaggagggcgtccgcgtgtacagccagctcaccatgcagaaggccttcctggagaagcagcaaagtgggtcggagctggaagaactcatgaacaagtttcattccatgaatcagaggaggggggaggacagctaggcccagctgccttgggctggggcctgcggaggggaagcccacccacaatgcatggagtattatttttatatgtgtatgtattttgtatcaaggacacggagggggtgtggtgctggctagaggtccctgcccctgtctggaggcacaacgcccatccttaggccaaacagtacccaaggcctcagcccacaccaagactaatctcagccaaacctgctgcttggtggtgccagccccttgtccaccttctcttgaggccacagaactccctggggctggggcctctttctctggcctcccctgtgcacctggggggtcctggcccctgtgatgctcccccatccccacccacttctacatccatccacaccccagggtgagctggagctccaggctggccaggctgaacctcgcacacacgcagagttctgctccctgaggggggcccgggaggggctccagcaggaggccgtgggtgccattcgggggaaagtgggggaacgacacacacttcacctgcaagggccgacaacgcaggggacaccgtgccggcttcagacactcccagcgcccactcttacaggcccaggactggagctttctctggccaagtttcaggccaatgatccccgcatggtgttgggggtgctggtgtgtcttggtgcctggacttgagtctcaccctacagatgagaggtggctgaggcaccagggctaagcaattaaaccagttaagtctcccagga

SEQ ID NO: 8478 - protein, 223 aa, Homo sapiens [sequence omitted]

SEQ ID NO: 8479 - DNA, 1369 bp, Homo sapiens
cgccggcgccccgttcgagcaggccggtcagaagtactggggccccgccagcccgacccacaagctacccccaagcttcccggggaacaaagacggtgagaggtgctgcttcgaggcgggggtcccgggcccagggccacctgggggaggaagtgtggggggggtccctgggccgggggcgggggcaggggcaaggcagcggcgggcctgagtcgcgcgccccctcagagctcatgcagcacatggacgaggtcaacgacgagctcatccggaaaatcagcaacatcagggcgcagccacagaggcacttccgcgtggagcgcagccagcccgtgagccagccgctcacctacgagtcgggtccggacgaggtccgcgcctggctggaagccaaggccttcagcccgcggatcgtggagaacctgggcatcctgaccgggccgcagctcttctccctcaacaaggaggagctgaagaaagtgtgcggcgaggagggcgtccgcgtgtacagccagctcaccatgcagaaggccttcctggagaagcagcaaagtgggtcggagctggaagaactcatgaacaagtttcattccatgaatcagaggaggggggaggacagctaggcccagctgccttgggctggggcctgcggaggggaagcccacccacaatgcatggagtattatttttatatgtgtatgtattttgtatcaaggacacggagggggtgtggtgctggctagaggtccctgcccctgtctggaggcacaacgcccatccttaggccaaacagtacccaaggcctcagcccacaccaagactaatctcagccaaacctgctgcttggtggtgccagccccttgtccaccttctcttgaggccacagaactccctggggctggggcctctttctctggcctcccctgtgcacctggggggtcctggcccctgtgatgctcccccatccccacccacttctacatccatccacaccccagggtgagctggagctccaggctggccaggctgaacctcgcacacacgcagagttctgctccctgaggggggcccgggaggggctccagcaggaggccgtgggtgccattcgggggaaagtgggggaacgacacacacttcacctgcaagggccgacaacgcaggggacaccgtgccggcttcagacactcccagcgcccactcttacaggcccaggactggagctttctctggccaagtttcaggccaatgatccccgcatggtgttgggggtgctggtgtgtcttggtgcctggacttgagtctcaccctacagatgagaggtggctgaggcaccagggctaagcaattaaaccagttaagtctcccagga

SEQ ID NO: 8480 - protein, 129 aa, Homo sapiens [sequence omitted]

SEQ ID NO: 8481 - DNA, 463 bp, Homo sapiens
gagctcatgcagcacatggacgaggtcaacgacgagctcatccggaaaatcagcaacatcagggcgcagccacagaggcacttccgcgtggagcgcagccagcccgtgagccagccgctcacctacgagtcgggtccggacgaggtccgcgcctggctggaagccaaggccttcagcccgcggatcgtggagaacctgggcatcctgaccgggccgcagctcttctccctcaacaaggaggagctgaagaaagtgtgcggcgaggagggcgtccgcgtgtacagccagctcaccatgcagaaggccttcctggagaagcagcaaagtgggtcggagctggaagaactcatgaacaagtttcattccatgaatcagaggaggggggaggacagctaggcccagctgccttgggctggggcctgcggaggggaagcccacccacaatgcatggagtattattttt

SEQ ID NO: 8482 - protein, 129 aa, Homo sapiens [sequence omitted]

SEQ ID NO: 8483 - DNA, 339 bp, Homo sapiens
cgggcgccaggcagcctcgctcacagcgcggccctgacgcccaactgcccgcccccaggatcgtggagaacctgggcatcctgaccgggccgcagctcttctccctcaacaaggaggagctgaagaaagtgtgcggcgaggagggcgtccgcgtgtacagccagctcaccatgcagaaggccttcctggagaagcagcaaagtgggtcggagctggaagaactcatgaacaagtttcattccatgaatcagaggaggggggaggacagctaggcccagctgccttgggctggggcctgcggaggggaagcccacccacaatgcatggagtattattttt

SEQ ID NO: 8484 - protein, 33 aa, Homo sapiens
MQKAFLEKQQSGSELEELMNKFHSMNQRRGEDS

SEQ ID NO: 8485 - DNA, 472 bp, Homo sapiens
gaatcagaggaggggggaggacagctaggcccagctgccttgggctggggcctgcggaggggaagcccacccacaatgcatggagtattatttttatatgtggtgagctggagctccaggctggccaggctgaacctcgcacacacgcagagttctgctccctgaggggggcccgggaggggctccagcaggaggccgtgggtgccattcgggggaaagtgggggaacgacacacacttcacctgcaagggccgacaacgcaggggacaccgtgccggcttcagacactcccagcgcccactcttacaggcccaggactggagctttctctggccaagtttcaggccaatgatccccgcatggtgttgggggtgctggtgtgtcttggtgcctggacttgagtctcaccctacagatgagaggtggctgaggcaccagggctaagcaattaaaccagttaagtctcccagga

SEQ ID NO: 8486 - protein, 31 aa, Homo sapiens
MIPAWCWGCWCVLVPGLESHPTDERWLRHQG

SEQ ID NO: 8487 - DNA, 602 bp, Homo sapiens
tggagtattatttttatatgtgtatgtattttgtatcaaggacacggagggggtgtggtgctggctagaggtccctgcccctgtctggaggcacaacgcccatccttaggccaaacagtacccaaggcctcagcccacaccaagactaatctcagccaaacctgctgcttggtggtgccagccccttgtccaccttctcttgaggccacagaactccctggggctggggcctctttctctggcctccaggctggccaggctgaacctcgcacacacgcagagttctgctccctgaggggggcccgggaggggctccagcaggaggccgtgggtgccattcgggggaaagtgggggaacgacacacacttcacctgcaagggccgacaacgcaggggacaccgtgccggcttcagacactcccagcgcccactcttacaggcccaggactggagctttctctggccaagtttcaggccaatgatccccgcatggtgttgggggtgctggtgtgtcttggtgcctggacttgagtctcaccctacagatgagaggtggctgaggcaccagggctaagcaattaaaccagttaagtctcccagga

SEQ ID NO: 8488 - protein, 31 aa, Homo sapiens; identical to SEQ ID NO: 8486

SEQ ID NO: 8489 - DNA, 913 bp, Homo sapiens
tttccgattggcagccgcccgcggggcattgtgggccgtccgcgcgcccgtcccgtcgccgccgccgccgccgcagacccctcggtcttgctatgtcgagctcacccgtgaagcgtcagaggatggagtccgcgctggaccagctcaagcagttcaccaccgtggtggccgacacgggcgacttccacgccatcgacgagtacaagccccaggatgctaccaccaacccgtccctgatcctggccgcagcacagatgcccgcttaccaggagctggtggaggaggcgattgcctatggccggaagctgggcgggtcacaagaggaccagattaaaaatgctattgataaactttttgtgttgtttggagcagaaatactaaagaagattccgggccgagtatccacagaagtagacgcaaggctctcctttgataaagatgcgatggtggccagagccaggcggctcatcgagctctacaaggaagctgggatcagcaaggaccgaattcttataaagctgtcatcaacctgggaaggaattcaggctggaaagtaagtggtcccccacaaggaaggagctctcagagatttttcctctgttggagcagggtctacatggcatcaggcaagtttgactctctcagccctggggaatgccagactggggagcacagcccacagcttggacttgaccagctcatgtcagcctagatctgccctctgctccagagccagctccctcacttgctggtgatcagaaatgagggatttcccaggaagtaccatccacccactcagcagagaagaaaagccactagttagcacctgcagattcagattctgtccttcctctgtcctgatcaacacaagcctatgtttacatgatttttaaaaagtaaactattgttatat

SEQ ID NO: 8490 - protein, 154 aa, Homo sapiens
MSSSPVKRQRMESALDQLKQFTTVVADTGDFHAIDEYKPQDATTNPSLILAAAQMPAYQELVEEAIAYGRKLGGSQEDQIKNAIDKLFVLFGAEILKKIPGRVSTEVDARLSFDKDAMVARARRLIELYKEAGISKDRILIKLSSTWEGIQAGK

SEQ ID NO: 8491 - DNA, 846 bp, Homo sapiens
tttccgattggcagccgcccgcggggcattgtgggccgtccgcgcgcccgtcccgtcgccgccgccgccgccgcagacccctcggtcttgctatgtcgagctcacccgtgaagcgtcagaggatggagtccgcgctggaccagctcaagcagttcaccaccgtggtggccgacacgggcgacttccacgccatcgacgagtacaagccccaggatgctaccaccaacccgtccctgatcctggccgcagcacagatgcccgcttaccaggagctggtggaggaggcgattgcctatggccggaagctgggcgggtcacaagaggaccagattaaaaatgctattgataaactttttgtgttgtttggagcagaaatactaaagaagattccgggccgagtatccacagaagtagacgcaaggctctcctttgataaagatgcgatggtggccagagccaggcggctcatcgagctctacaaggaagctgggatcagcaaggaccgaattcttataaagctgtcatcaacctgggaaggaattcaggctggaaaggagctcgaggagcagcacggcatccactgcaacatgacgttactcttctccttcgcccaggctgtggcctgtgccgaggcgggtgtgaccctcatctccccatttgttgggcgcatccttgattggcatgtggcaaacaccgacaagaaatcctatgagcccctggaagaccctggggtaaagagtgtcactaaaatctacaactactacaagaagtttagctacaaaaccattgtcatgggcgcctccttccgcaacacgggcgagatcaaagccagcactgccgtgccac

SEQ ID NO: 8492 - protein, 250 aa, Homo sapiens
MSSSPVKRQRMESALDQLKQFTTVVADTGDFHAIDEYKPQDATTNPSLILAAAQMPAYQELVEEAIAYGRKLGGSQEDQIKNAIDKLFVLFGAEILKKIPGRVSTEVDARLSFDKDAMVARARRLIELYKEAGISKDRILIKLSSTWEGIQAGKELEEQHGIHCNMTLLFSFAQAVACAEAGVTLISPFVGRILDWHVANTDKKSYEPLEDPGVKSVTKIYNYYKKFSYKTIVMGASFRNTGEIKASTAV

SEQ ID NO: 8493 - DNA, 1285 bp, Homo sapiens
tttccgattggcagccgcccgcggggcattgtgggccgtccgcgcgcccgtcccgtcgccgccgccgccgccgcagacccctcggtcttgctatgtcgagctcacccgtgaagcgtcagaggatggagtccgcgctggaccagctcaagcagttcaccaccgtggtggccgacacgggcgacttccacgccatcgacgagtacaagccccaggatgctaccaccaacccgtccctgatcctggccgcagcacagatgcccgcttaccaggagctggtggaggaggcgattgcctatggccggaagctgggcgggtcacaagaggaccagattaaaaatgctattgataaactttttgtgttgtttggagcagaaatactaaagaagattccgggccgagtatccacagaagtagacgcaaggctctcctttgataaagatgcgatggtggccagagccaggcggctcatcgagctctacaaggaagctgggatcagcaaggaccgaattcttataaagctgtcatcaacctgggaaggaattcaggctggaaaggagctcgaggagcagcacggcatccactgcaacatgacgttactcttctccttcgcccaggctgtggcctgtgccgaggcgggtgtgaccctcatctccccatttgttgggcgcatccttgattggcatgtggcaaacaccgacaagaaatcctatgagcccctggaagaccctggggtaaagagtgtcactaaaatctacaactactacaagaagtttagctacaaaaccattgtcatgggcgcctccttccgcaacacgggcgagatcaaagcactggccggctgtgacttcctcaccatctcacccaagctcctgggagagctgctgcaggacaacgccaagctggtgcctgtgctctcagccaaggcggcccaagccagtgacctggaaaaaatccacctggatgagaagtctttccgttggttgcacaacgaggaccagatggctgtggagaagctctctgacgggatccgcaagtttgccgctgatgcagtgaagctggagcggatgctgacagaacgaatgttcaatgcagagaatggaaagtagcgcatccctgaggctggactccagatctgcaccgccggccagctgggatctgactgcacgtggcttctgatgaatcttgcgttttttacaaattggagcagggacagatcatagatttctgattttatgtaaaattttgcctaatacattaaagcagtcacttttcctgtgctgtttca

SEQ ID NO: 8494 - protein, 337 aa, Homo sapiens; identical to SEQ ID NO: 1217

SEQ ID NO: 8495 - DNA, 568 bp, Homo sapiens
attgtgggccgtccgcgcgcccgtcccgtcgccgccgccgccgccgcagacccctcggtcttgctatgtcgagctcacccgtgaagcgtcagaggatggagtccgcgctggaccagctcaagcagttcaccaccgtggtggccgacacgggcgacttccacgccatcgacgagtacaagccccaggatgctaccaccaacccgtccctgatcctggccgcagcacagatgcccgcttaccaggagctggtggaggaggcgattgcctatggccggaagctgggcgggtgagtgcctggactcgggagggtcccagctaggccctcgtgctagtctagttggccttgcttccctccctaactgaattttagttctcaaacaccatgaactcaaggggggaaaaaaaccctatctttttgcctatttttgtttattgaagtgtaatctgcatgaagtaacctgcacctgtggtaaatgagcagttcagagagttttgccaatgtgtgtaccctgtaaataccaccccagtcaagatgcagagcacttgcagacccccacaggcccctcct

SEQ ID NO: 8496 - protein, 74 aa, Homo sapiens
MSSSPVKRQRMESALDQLKQFTTVVADTGDFHAIDEYKPQDATTNPSLILAAAQMPAYQELVEEAIAYGRKLGG

SEQ ID NO: 8497 - DNA, 501 bp, Homo sapiens
cggtcttgctatgtcgagctcacccgtgaagcgtcagaggatggagtccgcgctggaccagctcaagcacatctcacccaagctcctgggagagctgctgcaggacaacgccaagctggtgcctgtgctctcagccaaggcggcccaagccagtgacctggaaaaaatccacctggatgagaagtctttccgttggttgcacaacgaggaccagatggctgtggagaagctctctgacgggatccgcaagtttgccgctgatgcagtgaagctggagcggatgctgacagaacgaatgttcaatgcagagaatggaaagtagcgcatccctgaggctggactccagatctgcaccgccggccagctgggatctgactgcacgtggcttctgatgaatcttgcgttttttacaaattggagcagggacagatcatagatttctgattttatgtaaaattttgcctaatacattaaagcagtcacttttcctgtgctgtttca

SEQ ID NO: 8498 - protein, 103 aa, Homo sapiens
MSSSPVKRQRMESALDQLKHISPKLLGELLQDNAKLVPVLSAKAAQASDLEKIHLDEKSFRWLHNEDQMAVEKLSDGIRKFAADAVKLERMLTERMFNAENGK

SEQ ID NO: 8499 - DNA, 318 bp, Homo sapiens
ctcatgttggcatccacgtgtgcaactgtggacacctgaccagcccatccagtgcaggagcaagcatccttaccttgcgtctacttctgtggatactcggcccggaatcttctttagtatttctgctccaaacaacacaaaaagtttatcaatagcatttttaatctggtcctcttgtgacctgaaattcaaagggaaaaaaagcaggttagaagcttctgaggttcgccaggtgcggtggctcacgcccagctaatttttatatttttttgtagagacagagttttgccctattgcctagactgttctcgaactctt

SEQ ID NO: 8500 - protein, 84 aa, Homo sapiens [sequence omitted]

SEQ ID NO: 8501 - DNA, 887 bp, Homo sapiens
ggggtaaagagtgtcactaaaatctacaactactacaagaagtttagctacaaaaccattgtcatgggcgcctccttccgcaacacgggcgagatcaaagcactggccggctgtgacttcctcaccatctcacccaagctcctgggagagctgctgcaggacaacgccaagctggtgcctgtgctctcagccaaggcgggtgaggccccactgcccagctgtggctcctgctcgggcaaggccagcactgccgtgccacgctgccctgtgggtgatccctcccacctgtggggcgagctcatcttgggagacatgagggtgaagtagacctcaacggagggcttggctttcctaacacatctcactcaagtcatcagccaaggctctgtgggctgaaccccacttccagcgtgagccttgctggggccaaggcctggccctggtgggagatgcttgggtgcagcagttcaggccctgagcccaaggggccaaggtgggcagggacatggagcaggcatggaaggctggttcttgtcccccagcccaagccagtgacctggaaaaaatccacctggatgagaagtctttccgttggttgcacaacgaggaccagatggctgtggagaagctctctgacgggatccgcaagtttgccgctgatgcagtgaagctggagcggatgctgacagaacgaatgttcaatgcagagaatggaaagtagcgcatccctgaggctggactccagatctgcaccgccggccagctgggatctgactgcacgtggcttctgatgaatcttgcgttttttacaaattggagcagggacagatcatagatttctgattttatgtaaaattttgcctaatacattaaagcagtcacttttc

SEQ ID NO: 8502 - protein, 71 aa, Homo sapiens [sequence omitted]

SEQ ID NO: 8503 - DNA, 1650 bp, Homo sapiens
ataaggagaatttggaaaaaagtggaagaaggaagcgctgcagccacatccccgccctgaaggctgcgtccctccagtgcctcgcagattagtcaggatgcccacttagcactggccacggggccttgctctgtcccgggtccactctcatccccgtgtggtgatggacctctgtggacaaatgctttttattttatttattttttgagatggagtttgtctctcgtcacccaggctggagtgcagtggcacaatcttggctcactgcaacctctgtctcccgggttcaagcgattctcctgcctcagcctccggagtagctgggattacaggtgtgcgccaccacgcctggctaatttttgtatttttcgtagagaccgagtttcaccatgttggccaggctggtctcgaactcctgacctcaagtgatcctcccgcctcggcctcccaaagtgttaggattacaggcgtgagccactgcgcccggcgtaatttttgtttttagtagagatggggtttcatcatgttggccaggctggtcttgaactcctgacctcaggtgatccatcttcctcagcctcccaaagtgctgggattacaggcgtgagccgccacgtccggctaacaagtacttttttatttttattttattttttggatggagtctcactctgtcgcccaggaggcggaggttgcagtgagctgacatcgtgccactgcactctagtctgggtgacagagcaagactccatctcaaaaaaaaaaaaaaagaaaatattgtaaacctagtggcttataaacaacagaaatcagtttcagttttggaggctggaagcccaagatgaaagcaccagtagatgcaacctcttttgtgagggtgatggtcccatgatgaggctgtgcccctgccctgtgaccggatgacctcccaaatgccccacctaataccatccccttgcaggtgaggacttaagcaggtgggttttggggggacgtgctcaggccacagcagggtgcatgaagagccagtgagcctcattgagcccctctggtcagccagatctgacattgagcccagcattgaagatcaaagcaggtggggctttgggatgtgaagtgggttctgacgcggggccccacagacctgtctccgcgtgagctgcctgcaggcccctgcgtcattcctcagctgcgtgcgaggcctctggcttggagagcctccccgctgtgcacagttctctctttgccagggcagggcttggggcagcaccaggctggggcagaggaggaaagcaagaggacagacctccagaagagcagcggagggcgggtgcagttactgctcgctgcagccttgaactggcctcaagtgatccttccacctcagcctctccagtagacaagactgcagggacacacccccatgcccagctactgcagggacacagccccatgcccggctaggagggacacacccccgtgcctggctaggagggaagttcttttacgttctatgatgtgggcggacctggacagaatgctgagtgagtgaaagaagactgtctcaaaaggcctttaccctgtgataccatttttgtgaaatatccagaaaatgtaagtcagacagaaaatagattgtttgaggctggg

SEQ ID NO: 8504 - protein, 90 aa, Homo sapiens
MGFHHVGQAGLELLTSGDPSSSASQSAGITGVSRHVRLTSTFLFLFYFLDGVSLCRPGGGGCSELTSCHCTLVWVTEQDSISKKKKKKIL

SEQ ID NO: 8505 - DNA, 1807 bp, Homo sapiens
gcagcctggtctggccctgatgggattgttggaggcctcctggaatcagctctgagggggtgtcggctctcctggagggtccaaacccccatcctcctgcatgttctctggtaggaggcagagaaaagaccccacgtgcctggagagctgtgctagctgctaggtggtcctcgggaattccaggctgggttttctagggaggactggttgtcacgtgtggtcactgttgactagacagagtcggctcgggggtcctctgtgtgggtttgccctgctgtggcctgtctgccacccaccacctctttcactgttggtgggggccttgaggggagggcccagccggcgggagctggctcagaactttggccaaaggtgaacggaattttttaggagcagcagcctcctgccccaaggccgaccggcactggcagcactttcctgttgaagaaatcttcctggcgtgtggtttcaaagtgtaagcacctcagtgatgcaccctgtcctaagcattgagaggcacgtttacttgtgaatatgagaccatgagattctcaatgataggaaagtgctgtcccccacggccttgcacagtggcctcgggtagagcggctatcaagagcagacagtggtccagcctgctgggcacctggcctgggctgtggccctccagcgggctgccccctggccccaggttagggcgtccaggagaggcttaggccctctacttcctcacagttccccagtttgagccatcgaaggccttcttcctgcccacctccccgtctcagccacagccgttcccaagcaccagcgtggctcctggtgccagtgacctgccaggaggccccttgtgattataaaaccgttcagttgggccgggcgcagtggctcacacctgtaaccccagcactttgggaggccgaggcgggcggatcacgaggtcaggagatcgagaccatcctggctaacatggtgaaaccccatctctactaaaaaacaaaaaaaaaaaaaaaaagaaaatattgtaaacctagtggcttataaacaacagaaatcagtttcagttttggaggctggaagcccaagatgaaagcaccagtagatgcaacctcttttgtgagggtgatggtcccatgatgaggctgtgcccctgccctgtgaccggatgacctcccaaatgccccacctaataccatccccttgcaggtgaggacttaagcaggtgggttttggggggacgtgctcaggccacagcagggtgcatgaagagccagtgagcctcattgagcccctctggtcagccagatctgacattgagcccagcattgaagatcaaagcaggtggggctttgggatgtgaagtgggttctgacgcggggccccacagacctgtctccgcgtgagctgcctgcaggcccctgcgtcattcctcagctgcgtgcgaggcctctggcttggagagcctccccgctgtgcacagttctctctttgccagggcagggcttggggcagcaccaggctggggcagaggaggaaagcaagaggacagacctccagaagagcagcggagggcgggtgaggatttccccatataccagtgtgtgttcatctacccatgaggaataaaaccatgcagcagcatgcaaatggtgtcctggtgttcgcagcagaactgctcatggtaatggataagttgttttcatacagtgggttgtcaatatgtttaataattgttggtatctattaataagggcaatatattcatatggtggattatttggctattaaaatggaatgaagttatttt

SEQ ID NO: 8506 - protein, 57 aa, Homo sapiens
MRFSMIGKCCPPRPCTVASGRAAIKSRQWSSLLGTWPGLWPSSGLPPGPRLGRPGEA

SEQ ID NO: 8507 - DNA, 2857 bp, Homo sapiens
gcagcctggtctggccctgatgggattgttggaggcctcctggaatcagctctgagggggtgtcggctctcctggagggtccaaacccccatcctcctgcatgttctctggtaggaggcagagaaaagaccccacgtgcctggagagctgtgctagctgctaggtggtcctcgggaattccaggctgggttttctagggaggactggttgtcacgtgtggtcactgttgactagacagagtcggctcgggggtcctctgtgtgggtttgccctgctgtggcctgtctgccacccaccacctctttcactgttggtgggggccttgaggggagggcccagccggcgggagctggctcagaactttggccaaaggtgaacggaattttttaggagcagcagcctcctgccccaaggccgaccggcactggcagcactttcctgttgaagaaatcttcctggcgtgtggtttcaaagtgtaagcacctcagtgatgcaccctgtcctaagcattgagaggcacgtttacttgtgaatatgagaccatgagattctcaatgataggaaagtgctgtcccccacggccttgcacagtggcctcgggtagagcggctatcaagagcagacagtggtccagcctgctgggcacctggcctgggctgtggccctccagcgggctgccccctggccccaggttagggcgtccaggagaggcttaggccctctacttcctcacagttccccagtttgagccatcgaaggccttcttcctgcccacctccccgtctcagccacagccgttcccaagcaccagcgtggctcctggtgccagtgacctgccaggaggccccttgtgattataaaaccgttcagttgggccgggcgcagtggctcacacctgtaaccccagcactttgggaggccgaggcgggcggatcacgaggtcaggagatcgagaccatcctggctaacatggtgaaaccccatctctactaaaaaacaaaaatacaaaaagttagcctggcatggtggtgggtgtgtgtagtcccagctacttgggaggctgaggcaggagaatggcgcgtgagccactgcgcccggcgtaatttttgtttttagtagagatggggtttcatcatgttggccaggctggtcttgaactcctgacctcaggtgatccatcttcctcagcctcccaaagtgctgggattacaggcgtgagccgccacgtccggctaacaagtacttttttatttttattttattttttggatggagtctcactctgtcgcccaggctggaacacagtggcacgatctcggctcactgcagcctccgcctcccgggttcaagtgattctcctgcctcagcctcccaagtagctaggactacaggtgcacaccaccacacccagctaatttttgtatttttcctttttttttttttttgagatggagtcttgctctgttggcaggctggagtgcagtggcgcgatctcagctcactgcaacctctgcctctgcctcccagattcaagcagttctcctgcctcagcctcccgagtaactgggactacaggtgcatgccactacgcccagctagtttttgtattttcagtagagacggggtttcaccatgttggccaggatggtctcgatctcttgacctcatgatctgcccgcctcggcttcccaaagtgctgggactacaggcaagctcatgtcttaatgtcctagtccatttgggctcctataagaaaatactgtaaactggccgggcacggtggctcacgcctgtaatcccagcactttgggaggctgaggcaggtggatcacctgaggtcaggagttcgagaccagcctggccaagatggtgaaaccccgtctctactaaaaatacagaaattagccgggcgcggtggtgggcgcctgtaatcccatttacttgggaggctgaggcaggagaatcgcttgaacccaggaggcggaggttgcagtgagctgacatcgtgccactgcactctagtctgggtgacagagcaagactccatctcaaaaaaaaaaaaaaagaaaatattgtaaacctagtggcttataaacaacagaaatcagtttcagttttggaggctggaagcccaagatgaaagcaccagtagatgcaacctcttttgtgagggtgatggtcccatgatgaggctgtgcccctgccctgtgaccggatgacctcccaaatgccccacctaataccatccccttgcaggtgaggacttaagcaggtgggttttggggggacgtgctcaggccacagcagggtgcatgaagagccagtgagcctcattgagcccctctggtcagccagatctgacattgagcccagcattgaagatcaaagcaggtggggctttgggatgtgaagtgggttctgacgcggggccccacagacctgtctccgcgtgagctgcctgcaggcccctgcgtcattcctcagctgcgtgcgaggcctctggcttggagagcctccccgctgtgcacagttctctctttgccagggcagggcttggggcagcaccaggctggggcagaggaggaaagcaagaggacagacctccagaagagcagcggagggcgggtgaggatttccccatataccagtgtgtgttcatctacccatgaggaataaaaccatgcagcagcatgcaaatggtgtcctggtgttcgcagcagaactgctcatggtaatggataagttgttttcatacagtgggttgtcaatatgtttaataattgttggtatctattaataagggcaatatattcatatggtggattatttggctattaaaatggaatgaagttatttt

SEQ ID NO: 8508 - protein, 85 aa, Homo sapiens
MGFHHVGQAGLELLTSGDPSSSASQSAGITGVSRHVRLTSTFLFLFYFLDGVSLCRPGWNTVARSRLTAASASRVQVILLPQPPK

SEQ ID NO: 8509 - DNA, 2764 bp, Homo sapiens
gcagacccagcgccgagcccgagccatggcgtccgagcggctccctaacaggcccgcctgtctgctcgtggccagcggcgccgccgaaggtgtgtcggcccagtccttcctccactgtttcacgatggccagcaccgccttcaacctgcaggtggccacccctggggggaaagccatggaatttgtggatgtgactgagagcaatgcacgctgggtgcaagacttccgcctcaaggcttacgccagccccgccaagctcgagtccatcgatggtgcccggtaccatgccctcctgatccccagctgtcctggggccctgaccgacctggccagcagtggctccctggcccgtatcctgcagcacttccactctgagagcaaacccatctgcgccgtcggccacggtgtcgccgccctgtgctgtgccaccaacgaggacagatcctgggtgttcgacagctacagcctgacagggccctctgtgtgtgagctcgtcagggcccccggcttcgcccgcctgccgctcgtggtggaggacttcgtgaaggattcgggcgcctgcttcagtgcaagcgagcctgacgctgtccacgtcgtgctggaccgccacctggtcacaggccagaatgccagctccactgtcccggccgtgcagaacctgctcttcctctgtggcagccggaaatgaacctgctgggtagatgcaccccctgagacagcccaggtgtctccagaggcagccccgtctcaggcttcagggaccccgcctcttccctcctgacaagggccctggatggcagcctggtctggccctgatgggattgttggaggcctcctggaatcagctctgagggggtgtcggctctcctggagggtccaaacccccatcctcctgcatgttctctggtaggaggcagagaaaagaccccacgtgcctggagagctgtgctagctgctaggtggtcctcgggaattccaggctgggttttctagggaggactggttgtcacgtgtggtcactgttgactagacagagtcggctcgggggtcctctgtgtgggtttgccctgctgtggcctgtctgccacccaccacctctttcactgttggtgggggccttgaggggagggcccagccggcgggagctggctcagaactttggccaaaggtgaacggaattttttaggagcagcagcctcctgccccaaggccgaccggcactggcagcactttcctgttgaagaaatcttcctggcgtgtggtttcaaagtgtaagcacctcagtgatgcaccctgtcctaagcattgagaggcacgtttacttgtgaatatgagaccatgagattctcaatgataggaaagtgctgtcccccacggccttgcacagtggcctcgggtagagcggctatcaagagcagacagtggtccagcctgctgggcacctggcctgggctgtggccctccagcgggctgccccctggccccaggttagggcgtccaggagaggcttaggccctctacttcctcacagttccccagtttgagccatcgaaggccttcttcctgcccacctccccgtctcagccacagccgttcccaagcaccagcgtggctcctggtgccagtgacctgccaggaggccccttgtgattataaaaccgttcagttgggccgggcgcagtggctcacacctgtaaccccagcactttgggaggccgaggcgggcggatcacgaggtcaggagatcgagaccatcctggctaacatggtgaaaccccatctctactaaaaaacaaaaatacaaaaagttagcctggcatggtggtgggtgtgtgtagtcccagctacttgggaggctgaggcaggagaatggcgtgaacctgggaggcagagcttgcagtgagctgagatcgtgccactgcactccagcctgggcaatagagtgagactccatctcaaaaaaaaaacgttcaaaaatattgtaaacctagtggcttataaacaacagaaatcagtttcagttttggaggctggaagcccaagatgaaagcaccagtagatgcaacctcttttgtgagggtgatggtcccatgatgaggctgtgcccctgccctgtgaccggatgacctcccaaatgccccacctaataccatccccttgcaggtgaggacttaagcaggtgggttttggggggacgtgctcaggccacagcagggtgcatgaagagccagtgagcctcattgagcccctctggtcagccagatctgacattgagcccagcattgaagatcaaagcaggtggggctttgggatgtgaagtgggttctgacgcggggccccacagacctgtctccgcgtgagctgcctgcaggcccctgcgtcattcctcagctgcgtgcgaggcctctggcttggagagcctccccgctgtgcacagttctctctttgccagggcagggcttggggcagcaccaggctggggcagaggaggaaagcaagaggacagacctccagaagagcagcggagggcgggtgaggatttccccatataccagtgtgtgttcatctacccatgaggaataaaaccatgcagcagcatgcaaatggtgtcctggtgttcgcagcagaactgctcatggtaatggataagttgttttcatacagtgggttgtcaatatgtttaataattgttggtatctattaataagggcaatatattcatatggtggattatttggctattaaaatggaatgaagttatttt

SEQ ID NO: 8510 - protein, 220 aa, Homo sapiens; identical to SEQ ID NO: 1219

SEQ ID NO: 8511 - DNA, 2384 bp, Homo sapiens
gcgcacgcgcagacccagcgccgagcccgagccatggcgtccgagcggctccctaacaggcccgcctgtctgctcgtggccagcggcgccgccgaaggtgtgtcggcccagtccttcctccactgtttcacgatggccagcaccgccttcaacctgcaggtggccacccctggggggaaagccatggaatttgtggatgtgactgagagcaatgcacgctgggtgcaagacttccgcctcaaggcttacgccagccccgccaagctcgagtccatcgatgaacccatctgcgccgtcggccacggtgtcgccgccctgtgctgtgccaccaacgaggacagatcctgggtgttcgacagctacagcctgacagggccctctgtgtgtgagctcgtcagggcccccggcttcgcccgcctgccgctcgtggtggaggacttcgtgaaggattcgggcgcctgcttcagtgcaagcgagcctgacgctgtccacgtcgtgctggaccgccacctggtcacaggccagaatgccagctccactgtcccggccgtgcagaacctgctcttcctctgtggcagccggaaatgaacctgctgggtagatgcaccccctgagacagcccaggtgtctccagaggcagccccgtctcaggcttcagggaccccgcctcttccctcctgacaagggccctggatggcagcctggtctggccctgatgggattgttggaggcctcctggaatcagctctgagggggtgtcggctctcctggagggtccaaacccccatcctcctgcatgttctctggagcagcagcctcctgccccaaggccgaccggcactggcagcactttcctgttgaagaaatcttcctggcgtgtggtttcaaagtgtaagcacctcagtgatgcaccctgtcctaagcattgagaggcacgtttacttgtgaatatgagaccatgagattctcaatgataggaaagtgctgtcccccacggccttgcacagtggcctcgggtagagcggctatcaagagcagacagtggtccagcctgctgggcacctggcctgggctgtggccctccagcgggctgccccctggccccaggttagggcgtccaggagaggcttaggccctctacttcctcacagttccccagtttgagccatcgaaggccttcttcctgcccacctccccgtctcagccacagccgttcccaagcaccagcgtggctcctggtgccagtgacctgccaggaggccccttgtgattataaaaccgttcagttgggccgggcgcagtggctcacacctgtaaccccagcactttgggaggccgaggcgggcggatcacgaggtcaggagatcgagaccatcctggctaacatggtgaaaccccatctctactaaaaaacaaaaatacaaaaagttagcctggcatggtggtgggtgtgtgtagtcccagctacttgggaggctgaggcaggagaatggcgtgaacctgggaggcagagcttgcagtgagctgagatcgtgccactgcactccagcctgggcaatagagtgagactccatctcaaaaaaaaaacgttcaaaaatattgtaaacctagtggcttataaacaacagaaatcagtttcagttttggaggctggaagcccaagatgaaagcaccagtagatgcaacctcttttgtgagggtgatggtcccatgatgaggctgtgcccctgccctgtgaccggatgacctcccaaatgccccacctaataccatccccttgcaggtgaggacttaagcaggtgggttttggggggacgtgctcaggccacagcagggtgcatgaagagccagtgagcctcattgagcccctctggtcagccagatctgacattgagcccagcattgaagatcaaagcaggtggggctttgggatgtgaagtgggttctgacgcggggccccacagacctgtctccgcgtgagctgcctgcaggcccctgcgtcattcctcagctgcgtgcgaggcctctggcttggagagcctccccgctgtgcacagttctctctttgccagggcagggcttggggcagcaccaggctggggcagaggaggaaagcaagaggacagacctccagaagagcagcggagggcgggtgaggatttccccatataccagtgtgtgttcatctacccatgaggaataaaaccatgcagcagcatgcaaatggtgtcctggtgttcgcagcagaactgctcatggtaatggataagttgttttcatacagtgggttgtcaatatgtttaataattgttggtatctattaataagggcaatatattcatatggtggattatttggctattaaaatggaatgaagttatttt

SEQ ID NO: 8512 - protein, 184 aa, Homo sapiens
MASERLPNRPACLLVASGAAEGVSAQSFLHCFTMASTAFNLQVATPGGKAMEFVDVTESNARWVQDFRLKAYASPAKLESIDEPICAVGHGVAALCCATNEDRSWVFDSYSLTGPSVCELVRAPGFARLPLVVEDFVKDSGACFSASEPDAVHVVLDRHLVTGQNASSTVPAVQNLLFLCGSRK

SEQ ID NO: 8513 - DNA, 4510 bp, Homo sapiens
gacgccgcgcacgcgcagacccagcgccgagcccgagccatggcgtccgagcggctccctaacaggcccgcctgtctgctcgtggccagcggcgccgccgaaggtgtgtcggcccagtccttcctccactgtttcacgatggccagcaccgccttcaacctgcaggtggccacccctggggggaaagccatggaatttgtggatgtgactgagagcaatgcacgctgggtgcaagacttccgcctcaaggcttacgccagccccgccaagctcgagtccatcgatgaacccatctgcgccgtcggccacggtgtcgccgccctgtgctgtgccaccaacgaggacagatcctgggtgttcgacagctacagcctgacagggggcctgggcctgtctcaggagcccccaccccgctcccgcagccctctgtgtgtgagctcgtcagggcccccggcttcgcccgcctgccgctcgtggtggaggacttcgtgaaggattcgggcgcctgcttcagtggtgagcctcgagggtgccccctgcacttacagaagatggggtggggggcttccctgctgcagcctgggggagaagcctcctgggccctgggttctatagacccccatggcactgactcagacccagacaggctgacctactgctgaccctgggagcccgcctggagttcgaggctctcagtgggtgaggtggacattgcctgaggttggtgccctcggtcctccccagcaagcgagcctgacgctgtccacgtcgtgctggaccgccacctggtcacaggccagaatgccagctccactgtcccggccgtgcagaacctgctcttcctctgtggcagccggtgagggcaccagggtgggcacattcctgccacatcagagctgcacccggtgcttttgcccaagctttgaccacacgtctgtcctgcaggaaatgaacctgctgggtagatgcaccccctgagacagcccaggtgtctccagaggcagccccgtctcaggcttcagggaccccgcctcttccctcctgacaagggccctggatggcagcctggtctggccctgatgggattgttggaggcctcctggaatcagctctgagggggtgtcggctctcctggagggtccaaacccccatcctcctgcatgttctctggtaggaggcagagaaaagaccccacgtgcctggagagctgtgctagctgctaggtggtcctcgggaattccaggctgggttttctagggaggactggttgtcacgtgtggtcactgttgactagacagagtcggctcgggggtcctctgtgtgggtttgccctgctgtggcctgtctgccacccaccacctctttcactgttggtgggggccttgaggggagggcccagccggcgggagctggctcagaactttggccaaaggtgaacggaattttttaggagcagcagcctcctgccccaaggccgaccggcactggcagcactttcctgttgaagaaatcttcctggcgtgtggtttcaaagtgtaagcacctcagtgatgcaccctgtcctaagcattgagaggcacgtttacttgtgaatatgagaccatgagattctcaatgataggaaagtgctgtcccccacggccttgcacagtggcctcgggtagagcggctatcaagagcagacagtggtccagcctgctgggcacctggcctgggctgtggccctccagcgggctgccccctggccccaggttagggcgtccaggagaggcttaggccctctacttcctcacagttccccagtttgagccatcgaaggccttcttcctgcccacctccccgtctcagccacagccgttcccaagcaccagcgtggctcctggtgccagtgacctgccaggaggccccttgtgattataaaaccgttcagttgggccgggcgcagtggctcacacctgtaaccccagcactttgggaggccgaggcgggcggatcacgaggtcaggagatcgagaccatcctggctaacatggtgaaaccccatctctactaaaaaacaaaaatacaaaaagttagcctggcatggtggtgggtgtgtgtagtcccagctacttgggaggctgaggcaggagaatggcgtgaacctgggaggcagagcttgcagtgagctgagatcgtgccactgcactccagcctgggcaatagagtgagactccatctcaaaaaaaaaacgttcagttggctgggcgcggtggctcacgcctgtaatcccagcactttgggaggccaaggtgggtggatcatctgaagtcaggagtttgggaaaagcctggccaacatggtgaaactaaaatacaaaaatgagccgggtgtggtgtcaggcgcctgtattcccagctacttgggaggctgagacgtgagaattgcttgaacctgggaggcggaagttgcagtgagccaagattgcgccattgcactccaacctgggcaatgagtgaaactccgtctcaaaaataaaaaataataaaataaagccgttcaataaggagaatttggaaaaaagtggaagaaggaagcgctgcagccacatccccgccctgaaggctgcgtccctccagtgcctcgcagattagtcaggatgcccacttagcactggccacggggccttgctctgtcccgggtccactctcatccccgtgtggtgatggacctctgtggacaaatgctttttattttatttattttttgagatggagtttgtctctcgtcacccaggctggagtgcagtggcacaatcttggctcactgcaacctctgtctcccgggttcaagcgattctcctgcctcagcctccggagtagctgggattacaggtgtgcgccaccacgcctggctaatttttgtatttttcgtagagaccgagtttcaccatgttggccaggctggtctcgaactcctgacctcaagtgatcctcccgcctcggcctcccaaagtgttaggattacaggcgtgagccactgcgcccggcgtaatttttgtttttagtagagatggggtttcatcatgttggccaggctggtcttgaactcctgacctcaggtgatccatcttcctcagcctcccaaagtgctgggattacaggcgtgagccgccacgtccggctaacaagtacttttttatttttattttattttttggatggagtctcactctgtcgcccaggctggaacacagtggcacgatctcggctcactgcagcctccgcctcccgggttcaagtgattctcctgcctcagcctcccaagtagctaggactacaggtgcacaccaccacacccagctaatttttgtatttttcctttttttttttttttgagatggagtcttgctctgttggcaggctggagtgcagtggcgcgatctcagctcactgcaacctctgcctctgcctcccagattcaagcagctgaggcaggtggatcacctgaggtcaggagttcgagaccagcctggccaagatggtgaaaccccgtctctactaaaaatacagaaattagccgggcgcggtggtgggcgcctgtaatcccatttacttgggaggctgaggcaggagaatcgcttgaacccaggaggcggaggttgcagtgagctgacatcgtgccactgcactctagtctgggtgacagagcaagactccatctcaaaaaaaaaaaaaaagaaaatattgtaaacctagtggcttataaacaacagaaatcagtttcagttttggaggctggaagcccaagatgaaagcaccagtagatgcaacctcttttgtgagggtgatggtcccatgatgaggctgtgcccctgccctgtgaccggatgacctcccaaatgccccacctaataccatccccttgcaggtgaggacttaagcaggtgggttttggggggacgtgctcaggccacagcagggtgcatgaagagccagtgagcctcattgagcccctctggtcagccagatctgacattgagcccagcattgaagatcaaagcaggtggggctttgggatgtgaagtgggttctgacgcggggccccacagacctgtctccgcgtgagctgcctgcaggcccctgcgtcattcctcagctgcgtgcgaggcctctggcttggagagcctccccgctgtgcacagttctctctttgccagggcagggcttggggcagcaccaggctggggcagaggaggaaagcaagaggacagacctccagaagagcagcggagggcgggtgaggatttccccatataccagtgtgtgttcatctacccatgaggaataaaaccatgcagcagcatgcaaatggtgtcctggtgttcgcagcagaactgctcatggtaatggataagttgttttcatacagtgggttgtcaatatgtttaataattgttggtatctattaataagggcaatatattcatatggtggattatttggctattaaaatggaatgaagttatttt

SEQ ID NO: 8514 - protein, 150 aa, Homo sapiens
MASERLPNRPACLLVASGAAEGVSAQSFLHCFTMASTAFNLQVATPGGKAMEFVDVTESNARWVQDFRLKAYASPAKLESIDEPICAVGHGVAALCCATNEDRSWVFDSYSLTGGLGLSQEPPPRSRSPLCVSSSGPPASPACRSWWRTS

SEQ ID NO: 8515 - DNA, 380 bp, Homo sapiens
cacctaataccatccccttgcaggtgaggacttaagcaggtgggttttggggggacgtgctcaggccacagcagggtgcatgaagagccagtgagcctcattgagcccctctggtcagccaggctggggcagaggaggaaagcaagaggacagacctccagaagagcagcggagggcgggtgaggatttccccatataccagtgtgtgttcatctacccatgaggaataaaaccatgcagcagcatgcaaatggtgtcctggtgttcgcagcagaactgctcatggtaatggataagttgttttcatacagtgggttgtcaatatgtttaataattgttggtatctattaataagggcaatatattcatatggtggatta

SEQ ID NO: 8516 - protein, 43 aa, Homo sapiens
MRNKTMQQHANGVLVFAAELLMVMDKLFSYSGLSICLIIVGIY

SEQ ID NO: 8517 - DNA, 396 bp, Homo sapiens
tggtaggaggcagagaaaagaccccacgtgcctggagagctgtgctagctgctaggtggtcctcgggaattccaggctgggttttctagggaggactggttgtcacgtgtggtcactgttgactagacagaacctgtctccgcgtgagctgcctgcaggcccctgcgtcattcctcagctgcgtgcgaggcctctggcttggagagcctccccgctgtgcacagttctctctttgccagggcagggcttggggcagcaccaggctggggcagaggaggaaagcaagaggacagacctccagaagagcagcggagggcgggtgaggatttccccatataccagtgtgtgttcatctacccatgaggaataaaaccatgcagcagcatgcaaatggtg

SEQ ID NO: 8518 - protein, 104 aa, Homo sapiens [sequence omitted]

SEQ ID NO: 8519 - DNA, 2702 bp, Homo sapiens
gcagcctggtctggccctgatgggattgttggaggcctcctggaatcagctctgagggggtgtcggctctcctggagggtccaaacccccatcctcctgcatgttctctggtaggaggcagagaaaagaccccacgtgcctggagagctgtgctagctgctaggtggtcctcgggaattccaggctgggttttctagggaggactggttgtcacgtgtggtcactgttgactagacagagtcggctcgggggtcctctgtgtgggtttgccctgctgtggcctgtctgccacccaccacctctttcactgttggtgggggccttgaggggagggcccagccggcgggagctggctcagaactttggccaaaggtgaacggaattttttaggagcagcagcctcctgccccaaggccgaccggcactggcagcactttcctgttgaagaaatcttcctggcgtgtggtttcaaagtgtaagcacctcagtgatgcaccctgtcctaagcattgagaggcacgtttacttgtgaatatgagaccatgagattctcaatgataggaaagtgctgtcccccacggccttgcacagtggcctcgggtagagcggctatcaagagcagacagtggtccagcctgctgggcacctggcctgggctgtggccctccagcgggctgccccctggccccaggttagggcgtccaggagaggcttaggccctctacttcctcacagttccccagtttgagccatcgaaggccttcttcctgcccacctccccgtctcagccacagccgttcccaagcaccagcgtggctcctggtgccagtgacctgccaggaggccccttgtgattataaaaccgttcagttgggccgggcgcagtggctcacacctgtaaccccagcactttgggaggccgaggcgggcggatcacgaggtcaggagatcgagaccatcctggctaacatggtgaaaccccatctctactaaaaaacaaaaatacaaaaagttagcctggcatggtggtgggtgtgtgtagtcccagctacttgggaggctgaggcaggagaatggcgcgtgagccactgcgcccggcgtaatttttgtttttagtagagatggggtttcatcatgttggccaggctggtcttgaactcctgacctcaggtgatccatcttcctcagcctcccaaagtgctgggattacaggcgtgagccgccacgtccggctaacaagtacttttttatttttattttattttttggatggagtctcactctgtcgcccaggctggaacacagtggcacgatctcggctcactgcagcctccgcctcccgggttcaagtgattctcctgcctcagcctcccaagtagctaggactacaggtgcacaccaccacacccagctaatttttgtatttttcctttttttttttttttgagatggagtcttgctctgttggcaggctggagtgcagtggcgcgatctcagctcactgcaacctctgcctctgcctcccagattcaagcagttctcctgcctcagcctcccgagtaactgggactacaggtgcatgccactacgcccagctagtttttgtattttcagtagagacggggtttcaccatgttggccaggatggtctcgatctcttgacctcatgatctgcccgcctcggcttcccaaagtgctgggactacaggcaagctcatgtcttaatgtcctagtccatttgggctcctataagaaaatactgtaaactggccgggcacggtggctcacgcctgtaatcccagcactttgggaggctgaggcaggtggatcacctgaggtcaggagttcgagaccagcctggccaagatggtgaaaccccgtctctactaaaaatacagaaattagccgggcgcggtggtgggcgcctgtaatcccatttacttgggaggctgaggcaggagaatcgcttgaacccaggaggcggaggttgcagtgagctgacatcgtgccactgcactctagtctgggtgacagagcaagactccatctcaaaaaaaaaaaaaaagaaaatattgtaaacctagtggcttataaacaacagaaatcagtttcagttttggaggctggaagcccaagatgaaagcaccagtagatgcaacctcttttgtgagggtgatggtcccatgatgaggctgtgcccctgccctgtgaccggatgacctcccaaatgccccacctaataccatccccttgcaggtgaggacttaagcaggtgggttttggggggacgtgctcaggccacagcagggtgcatgaagagccagtgagcctcattgagcccctctggtcagccagatctgacattgagcccagcattgaagatcaaagcaggtggggctttgggatgtgaagtgggttctgacgcggggccccacagacctgtctccgcgtgagctgcctgcaggcccctgcgtcattcctcagctgcgtgcgaggcctctggcttggagagcctccccgctgtgcacagttctctctttgccagggcagggcttggggcagcaccaggctggggcagaggaggaaagcaagaggacagacctccagaagagcagcggagggcgggtgaggatttccccatataccagtgtgtgttcatctacccatgaggaataaaaccatgcagcagcatgcaaatggtg

SEQ ID NO: 8520 - protein, 85 aa, Homo sapiens; identical to SEQ ID NO: 8508

SEQ ID NO: 8521 - DNA, 1652 bp, Homo sapiens
gcagcctggtctggccctgatgggattgttggaggcctcctggaatcagctctgagggggtgtcggctctcctggagggtccaaacccccatcctcctgcatgttctctggtaggaggcagagaaaagaccccacgtgcctggagagctgtgctagctgctaggtggtcctcgggaattccaggctgggttttctagggaggactggttgtcacgtgtggtcactgttgactagacagagtcggctcgggggtcctctgtgtgggtttgccctgctgtggcctgtctgccacccaccacctctttcactgttggtgggggccttgaggggagggcccagccggcgggagctggctcagaactttggccaaaggtgaacggaattttttaggagcagcagcctcctgccccaaggccgaccggcactggcagcactttcctgttgaagaaatcttcctggcgtgtggtttcaaagtgtaagcacctcagtgatgcaccctgtcctaagcattgagaggcacgtttacttgtgaatatgagaccatgagattctcaatgataggaaagtgctgtcccccacggccttgcacagtggcctcgggtagagcggctatcaagagcagacagtggtccagcctgctgggcacctggcctgggctgtggccctccagcgggctgccccctggccccaggttagggcgtccaggagaggcttaggccctctacttcctcacagttccccagtttgagccatcgaaggccttcttcctgcccacctccccgtctcagccacagccgttcccaagcaccagcgtggctcctggtgccagtgacctgccaggaggccccttgtgattataaaaccgttcagttgggccgggcgcagtggctcacacctgtaaccccagcactttgggaggccgaggcgggcggatcacgaggtcaggagatcgagaccatcctggctaacatggtgaaaccccatctctactaaaaaacaaaaaaaaaaaaaaaaagaaaatattgtaaacctagtggcttataaacaacagaaatcagtttcagttttggaggctggaagcccaagatgaaagcaccagtagatgcaacctcttttgtgagggtgatggtcccatgatgaggctgtgcccctgccctgtgaccggatgacctcccaaatgccccacctaataccatccccttgcaggtgaggacttaagcaggtgggttttggggggacgtgctcaggccacagcagggtgcatgaagagccagtgagcctcattgagcccctctggtcagccagatctgacattgagcccagcattgaagatcaaagcaggtggggctttgggatgtgaagtgggttctgacgcggggccccacagacctgtctccgcgtgagctgcctgcaggcccctgcgtcattcctcagctgcgtgcgaggcctctggcttggagagcctccccgctgtgcacagttctctctttgccagggcagggcttggggcagcaccaggctggggcagaggaggaaagcaagaggacagacctccagaagagcagcggagggcgggtgaggatttccccatataccagtgtgtgttcatctacccatgaggaataaaaccatgcagcagcatgcaaatggtg

SEQ ID NO: 8522 - protein, 57 aa, Homo sapiens; identical to SEQ ID NO: 8506

SEQ ID NO: 8523 - DNA, 2609 bp, Homo sapiens
gcagacccagcgccgagcccgagccatggcgtccgagcggctccctaacaggcccgcctgtctgctcgtggccagcggcgccgccgaaggtgtgtcggcccagtccttcctccactgtttcacgatggccagcaccgccttcaacctgcaggtggccacccctggggggaaagccatggaatttgtggatgtgactgagagcaatgcacgctgggtgcaagacttccgcctcaaggcttacgccagccccgccaagctcgagtccatcgatggtgcccggtaccatgccctcctgatccccagctgtcctggggccctgaccgacctggccagcagtggctccctggcccgtatcctgcagcacttccactctgagagcaaacccatctgcgccgtcggccacggtgtcgccgccctgtgctgtgccaccaacgaggacagatcctgggtgttcgacagctacagcctgacagggccctctgtgtgtgagctcgtcagggcccccggcttcgcccgcctgccgctcgtggtggaggacttcgtgaaggattcgggcgcctgcttcagtgcaagcgagcctgacgctgtccacgtcgtgctggaccgccacctggtcacaggccagaatgccagctccactgtcccggccgtgcagaacctgctcttcctctgtggcagccggaaatgaacctgctgggtagatgcaccccctgagacagcccaggtgtctccagaggcagccccgtctcaggcttcagggaccccgcctcttccctcctgacaagggccctggatggcagcctggtctggccctgatgggattgttggaggcctcctggaatcagctctgagggggtgtcggctctcctggagggtccaaacccccatcctcctgcatgttctctggtaggaggcagagaaaagaccccacgtgcctggagagctgtgctagctgctaggtggtcctcgggaattccaggctgggttttctagggaggactggttgtcacgtgtggtcactgttgactagacagagtcggctcgggggtcctctgtgtgggtttgccctgctgtggcctgtctgccacccaccacctctttcactgttggtgggggccttgaggggagggcccagccggcgggagctggctcagaactttggccaaaggtgaacggaattttttaggagcagcagcctcctgccccaaggccgaccggcactggcagcactttcctgttgaagaaatcttcctggcgtgtggtttcaaagtgtaagcacctcagtgatgcaccctgtcctaagcattgagaggcacgtttacttgtgaatatgagaccatgagattctcaatgataggaaagtgctgtcccccacggccttgcacagtggcctcgggtagagcggctatcaagagcagacagtggtccagcctgctgggcacctggcctgggctgtggccctccagcgggctgccccctggccccaggttagggcgtccaggagaggcttaggccctctacttcctcacagttccccagtttgagccatcgaaggccttcttcctgcccacctccccgtctcagccacagccgttcccaagcaccagcgtggctcctggtgccagtgacctgccaggaggccccttgtgattataaaaccgttcagttgggccgggcgcagtggctcacacctgtaaccccagcactttgggaggccgaggcgggcggatcacgaggtcaggagatcgagaccatcctggctaacatggtgaaaccccatctctactaaaaaacaaaaatacaaaaagttagcctggcatggtggtgggtgtgtgtagtcccagctacttgggaggctgaggcaggagaatggcgtgaacctgggaggcagagcttgcagtgagctgagatcgtgccactgcactccagcctgggcaatagagtgagactccatctcaaaaaaaaaacgttcaaaaatattgtaaacctagtggcttataaacaacagaaatcagtttcagttttggaggctggaagcccaagatgaaagcaccagtagatgcaacctcttttgtgagggtgatggtcccatgatgaggctgtgcccctgccctgtgaccggatgacctcccaaatgccccacctaataccatccccttgcaggtgaggacttaagcaggtgggttttggggggacgtgctcaggccacagcagggtgcatgaagagccagtgagcctcattgagcccctctggtcagccagatctgacattgagcccagcattgaagatcaaagcaggtggggctttgggatgtgaagtgggttctgacgcggggccccacagacctgtctccgcgtgagctgcctgcaggcccctgcgtcattcctcagctgcgtgcgaggcctctggcttggagagcctccccgctgtgcacagttctctctttgccagggcagggcttggggcagcaccaggctggggcagaggaggaaagcaagaggacagacctccagaagagcagcggagggcgggtgaggatttccccatataccagtgtgtgttcatctacccatgaggaataaaaccatgcagcagcatgcaaatggtg

SEQ ID NO: 8524 - protein, 220 aa, Homo sapiens; identical to SEQ ID NO: 1219

SEQ ID NO: 8525 - DNA, 2229 bp, Homo sapiens
gcgcacgcgcagacccagcgccgagcccgagccatggcgtccgagcggctccctaacaggcccgcctgtctgctcgtggccagcggcgccgccgaaggtgtgtcggcccagtccttcctccactgtttcacgatggccagcaccgccttcaacctgcaggtggccacccctggggggaaagccatggaatttgtggatgtgactgagagcaatgcacgctgggtgcaagacttccgcctcaaggcttacgccagccccgccaagctcgagtccatcgatgaacccatctgcgccgtcggccacggtgtcgccgccctgtgctgtgccaccaacgaggacagatcctgggtgttcgacagctacagcctgacagggccctctgtgtgtgagctcgtcagggcccccggcttcgcccgcctgccgctcgtggtggaggacttcgtgaaggattcgggcgcctgcttcagtgcaagcgagcctgacgctgtccacgtcgtgctggaccgccacctggtcacaggccagaatgccagctccactgtcccggccgtgcagaacctgctcttcctctgtggcagccggaaatgaacctgctgggtagatgcaccccctgagacagcccaggtgtctccagaggcagccccgtctcaggcttcagggaccccgcctcttccctcctgacaagggccctggatggcagcctggtctggccctgatgggattgttggaggcctcctggaatcagctctgagggggtgtcggctctcctggagggtccaaacccccatcctcctgcatgttctctggagcagcagcctcctgccccaaggccgaccggcactggcagcactttcctgttgaagaaatcttcctggcgtgtggtttcaaagtgtaagcacctcagtgatgcaccctgtcctaagcattgagaggcacgtttacttgtgaatatgagaccatgagattctcaatgataggaaagtgctgtcccccacggccttgcacagtggcctcgggtagagcggctatcaagagcagacagtggtccagcctgctgggcacctggcctgggctgtggccctccagcgggctgccccctggccccaggttagggcgtccaggagaggcttaggccctctacttcctcacagttccccagtttgagccatcgaaggccttcttcctgcccacctccccgtctcagccacagccgttcccaagcaccagcgtggctcctggtgccagtgacctgccaggaggccccttgtgattataaaaccgttcagttgggccgggcgcagtggctcacacctgtaaccccagcactttgggaggccgaggcgggcggatcacgaggtcaggagatcgagaccatcctggctaacatggtgaaaccccatctctactaaaaaacaaaaatacaaaaagttagcctggcatggtggtgggtgtgtgtagtcccagctacttgggaggctgaggcaggagaatggcgtgaacctgggaggcagagcttgcagtgagctgagatcgtgccactgcactccagcctgggcaatagagtgagactccatctcaaaaaaaaaacgttcaaaaatattgtaaacctagtggcttataaacaacagaaatcagtttcagttttggaggctggaagcccaagatgaaagcaccagtagatgcaacctcttttgtgagggtgatggtcccatgatgaggctgtgcccctgccctgtgaccggatgacctcccaaatgccccacctaataccatccccttgcaggtgaggacttaagcaggtgggttttggggggacgtgctcaggccacagcagggtgcatgaagagccagtgagcctcattgagcccctctggtcagccagatctgacattgagcccagcattgaagatcaaagcaggtggggctttgggatgtgaagtgggttctgacgcggggccccacagacctgtctccgcgtgagctgcctgcaggcccctgcgtcattcctcagctgcgtgcgaggcctctggcttggagagcctccccgctgtgcacagttctctctttgccagggcagggcttggggcagcaccaggctggggcagaggaggaaagcaagaggacagacctccagaagagcagcggagggcgggtgaggatttccccatataccagtgtgtgttcatctacccatgaggaataaaaccatgcagcagcatgcaaatggtg

SEQ ID NO: 8526 - protein, 184 aa, Homo sapiens; identical to SEQ ID NO: 8512

SEQ ID NO: 8527 - DNA, 4355 bp, Homo sapiens
gacgccgcgcacgcgcagacccagcgccgagcccgagccatggcgtccgagcggctccctaacaggcccgcctgtctgctcgtggccagcggcgccgccgaaggtgtgtcggcccagtccttcctccactgtttcacgatggccagcaccgccttcaacctgcaggtggccacccctggggggaaagccatggaatttgtggatgtgactgagagcaatgcacgctgggtgcaagacttccgcctcaaggcttacgccagccccgccaagctcgagtccatcgatgaacccatctgcgccgtcggccacggtgtcgccgccctgtgctgtgccaccaacgaggacagatcctgggtgttcgacagctacagcctgacagggggcctgggcctgtctcaggagcccccaccccgctcccgcagccctctgtgtgtgagctcgtcagggcccccggcttcgcccgcctgccgctcgtggtggaggacttcgtgaaggattcgggcgcctgcttcagtggtgagcctcgagggtgccccctgcacttacagaagatggggtggggggcttccctgctgcagcctgggggagaagcctcctgggccctgggttctatagacccccatggcactgactcagacccagacaggctgacctactgctgaccctgggagcccgcctggagttcgaggctctcagtgggtgaggtggacattgcctgaggttggtgccctcggtcctccccagcaagcgagcctgacgctgtccacgtcgtgctggaccgccacctggtcacaggccagaatgccagctccactgtcccggccgtgcagaacctgctcttcctctgtggcagccggtgagggcaccagggtgggcacattcctgccacatcagagctgcacccggtgcttttgcccaagctttgaccacacgtctgtcctgcaggaaatgaacctgctgggtagatgcaccccctgagacagcccaggtgtctccagaggcagccccgtctcaggcttcagggaccccgcctcttccctcctgacaagggccctggatggcagcctggtctggccctgatgggattgttggaggcctcctggaatcagctctgagggggtgtcggctctcctggagggtccaaacccccatcctcctgcatgttctctggtaggaggcagagaaaagaccccacgtgcctggagagctgtgctagctgctaggtggtcctcgggaattccaggctgggttttctagggaggactggttgtcacgtgtggtcactgttgactagacagagtcggctcgggggtcctctgtgtgggtttgccctgctgtggcctgtctgccacccaccacctctttcactgttggtgggggccttgaggggagggcccagccggcgggagctggctcagaactttggccaaaggtgaacggaattttttaggagcagcagcctcctgccccaaggccgaccggcactggcagcactttcctgttgaagaaatcttcctggcgtgtggtttcaaagtgtaagcacctcagtgatgcaccctgtcctaagcattgagaggcacgtttacttgtgaatatgagaccatgagattctcaatgataggaaagtgctgtcccccacggccttgcacagtggcctcgggtagagcggctatcaagagcagacagtggtccagcctgctgggcacctggcctgggctgtggccctccagcgggctgccccctggccccaggttagggcgtccaggagaggcttaggccctctacttcctcacagttccccagtttgagccatcgaaggccttcttcctgcccacctccccgtctcagccacagccgttcccaagcaccagcgtggctcctggtgccagtgacctgccaggaggccccttgtgattataaaaccgttcagttgggccgggcgcagtggctcacacctgtaaccccagcactttgggaggccgaggcgggcggatcacgaggtcaggagatcgagaccatcctggctaacatggtgaaaccccatctctactaaaaaacaaaaatacaaaaagttagcctggcatggtggtgggtgtgtgtagtcccagctacttgggaggctgaggcaggagaatggcgtgaacctgggaggcagagcttgcagtgagctgagatcgtgccactgcactccagcctgggcaatagagtgagactccatctcaaaaaaaaaacgttcagttggctgggcgcggtggctcacgcctgtaatcccagcactttgggaggccaaggtgggtggatcatctgaagtcaggagtttgggaaaagcctggccaacatggtgaaactaaaatacaaaaatgagccgggtgtggtgtcaggcgcctgtattcccagctacttgggaggctgagacgtgagaattgcttgaacctgggaggcggaagttgcagtgagccaagattgcgccattgcactccaacctgggcaatgagtgaaactccgtctcaaaaataaaaaataataaaataaagccgttcaataaggagaatttggaaaaaagtggaagaaggaagcgctgcagccacatccccgccctgaaggctgcgtccctccagtgcctcgcagattagtcaggatgcccacttagcactggccacggggccttgctctgtcccgggtccactctcatccccgtgtggtgatggacctctgtggacaaatgctttttattttatttattttttgagatggagtttgtctctcgtcacccaggctggagtgcagtggcacaatcttggctcactgcaacctctgtctcccgggttcaagcgattctcctgcctcagcctccggagtagctgggattacaggtgtgcgccaccacgcctggctaatttttgtatttttcgtagagaccgagtttcaccatgttggccaggctggtctcgaactcctgacctcaagtgatcctcccgcctcggcctcccaaagtgttaggattacaggcgtgagccactgcgcccggcgtaatttttgtttttagtagagatggggtttcatcatgttggccaggctggtcttgaactcctgacctcaggtgatccatcttcctcagcctcccaaagtgctgggattacaggcgtgagccgccacgtccggctaacaagtacttttttatttttattttattttttggatggagtctcactctgtcgcccaggctggaacacagtggcacgatctcggctcactgcagcctccgcctcccgggttcaagtgattctcctgcctcagcctcccaagtagctaggactacaggtgcacaccaccacacccagctaatttttgtatttttcctttttttttttttttgagatggagtcttgctctgttggcaggctggagtgcagtggcgcgatctcagctcactgcaacctctgcctctgcctcccagattcaagcagctgaggcaggtggatcacctgaggtcaggagttcgagaccagcctggccaagatggtgaaaccccgtctctactaaaaatacagaaattagccgggcgcggtggtgggcgcctgtaatcccatttacttgggaggctgaggcaggagaatcgcttgaacccaggaggcggaggttgcagtgagctgacatcgtgccactgcactctagtctgggtgacagagcaagactccatctcaaaaaaaaaaaaaaagaaaatattgtaaacctagtggcttataaacaacagaaatcagtttcagttttggaggctggaagcccaagatgaaagcaccagtagatgcaacctcttttgtgagggtgatggtcccatgatgaggctgtgcccctgccctgtgaccggatgacctcccaaatgccccacctaataccatccccttgcaggtgaggacttaagcaggtgggttttggggggacgtgctcaggccacagcagggtgcatgaagagccagtgagcctcattgagcccctctggtcagccagatctgacattgagcccagcattgaagatcaaagcaggtggggctttgggatgtgaagtgggttctgacgcggggccccacagacctgtctccgcgtgagctgcctgcaggcccctgcgtcattcctcagctgcgtgcgaggcctctggcttggagagcctccccgctgtgcacagttctctctttgccagggcagggcttggggcagcaccaggctggggcagaggaggaaagcaagaggacagacctccagaagagcagcggagggcgggtgaggatttccccatataccagtgtgtgttcatctacccatgaggaataaaaccatgcagcagcatgcaaatggtg

SEQ ID NO: 8528 - protein, 150 aa, Homo sapiens; identical to SEQ ID NO: 8514

SEQ ID NO: 8529 - DNA, 803 bp, Homo sapiens
gcagacccagcgccgagcccgagccatggcgtccgagcggctccctaacaggcccgcctgtctgctcgtggccagcggcgccgccgaaggtgtgtcggcccagtccttcctccactgtttcacgatggccagcaccgccttcaacctgcaggtggccacccctggggggaaagccatggaatttgtggatgtgactgagagcaatgcacgctgggtgcaagacttccgcctcaaggcttacgccagccccgccaagctcgagtccatcgatggtgcccggtaccatgccctcctgatccccagctgtcctggggccctgaccgacctggccagcagtggctccctggcccgtatcctgcagcacttccactctgagagcaaacccatctgcgccgtcggccacggtgtcgccgccctgtgctgtgccaccaacgaggacagatcctgggtgttcgacagctacagcctgacagggccctctgtgtgtgagctcgtcagggcccccggcttcgcccgcctgccgctcgtggtggaggacttcgtgaaggattcgggcgcctgcttcagtggagcagcagcctcctgccccaaggccgaccggcactggcagcactttcctgttgaagaaatcttcctggcgtgtggtttcaaagtggcagggcttggggcagcaccaggctggggcagaggaggaaagcaagaggacagacctccagaagagcagcggagggcgggtgaggatttccccatataccagtgtgtgttcatctacccatgaggaataaaaccatgcagcagcatgc

SEQ ID NO: 8530 - protein, 250 aa, Homo sapiens
MASERLPNRPACLLVASGAAEGVSAQSFLHCFTMASTAFNLQVATPGGKAMEFVDVTESNARWVQDFRLKAYASPAKLESIDGARYHALLIPSCPGALTDLASSGSLARILQHFHSESKPICAVGHGVAALCCATNEDRSWVFDSYSLTGPSVCELVRAPGFARLPLVVEDFVKDSGACFSGAAASCPKADRHWQHFPVEEIFLACGFKVAGLGAAPGWGRGGKQEDRPPEEQRRAGEDFPIYQCVFIYP

SEQ ID NO: 8531 - DNA, 1493 bp, Homo sapiens
aagcctgggggagccacaagcaggggcatctgggaggggcttcagggtgcgggtggcggggtccagggcctcaacgccatgtacggctttcagaacccatctgcgccgtcggccacggtgtcgccgccctgtgctgtgccaccaacgaggacagatcctgggtgttcgacagctacagcctgacagggccctctgtgtgtgagctcgtcagggcccccggcttcgcccgcctgccgctcgtggtggaggacttcgtgaaggattcgggcgcctgcttcagtgcaagcgagcctgacgctgtccacgtcgtgctggaccgccacctggtcacaggccagaatgccagctccactgtcccggccgtgcagaacctgctcttcctctgtggcagccggaaatgaacctgctgggtagatgcaccccctgagacagcccaggtgtctccagaggcagccccgtctcaggcttcagggaccccgcctcttccctcctgacaagggccctggatggcagcctggtctggccctgatgggattgttggaggcctcctggaatcagctctgagggggtgtcggctctcctggagggtccaaacccccatcctcctgcatgttctctggtaggaggcagagaaaagaccccacgtgcctggagagctgtgctagctgctaggtggtcctcgggaattccaggctgggttttctagggaggactggttgtcacgtgtggtcactgttgactagacagagtcggctcgggggtcctctgtgtgggtttgccctgctgtggcctgtctgccacccaccacctctttcactgttggtgggggccttgaggggagggcccagccggcgggagctggctcagaactttggccaaaggtgaacggaattttttaggagcagcagcctcctgccccaaggccgaccggcactggcagcactttcctgttgaagaaatcttcctggcgtgtggtttcaaagtgtaagcacctcagtgatgcaccctgtcctaagcattgagaggcacgtttacttgtgaatatgagaccatgagattctcaatgataggaaagtgctgtcccccacggccttgcacagtggcctcgggtagagcggctatcaagagcagacagtggtccagcctgctgggcacctggcctgggctgtggccctccagcgggctgccccctggccccaggttagggcgtccaggagaggcttaggccctctacttcctcacagttccccagtttgagccatcgaaggccttcttcctgcccacctccccgtctcagccacagccgttcccaagcaccagcgtggctcctggtgccagtgacctgccaggaggccccttgtgattataaaaccgttcagttgggccgggcgcagtggctcacacctgtaaccccagcactttgggaggccgaggcgggcggatcacgaggtcaggagatcgagaccatcctggctaacatggtgaaaccccat

SEQ ID NO: 8532 - protein, 57 aa, Homo sapiens; identical to SEQ ID NO: 8506

SEQ ID NO: 8533 - DNA, 1680 bp, Homo sapiens
gcgcacgcgcagacccagcgccgagcccgagccatggcgtccgagcggctccctaacaggcccgcctgtctgctcgtggccagcggcgccgccgaaggtgtgtcggcccagtccttcctccactgtttcacgatggccagcaccgccttcaacctgcaggtggccacccctggggggaaagccatggaatttgtggatgtgactgagagcaatgcacgctgggtgcaagacttccgcctcaaggcttacgccagccccgccaagctcgagtccatcgatgaacccatctgcgccgtcggccacggtgtcgccgccctgtgctgtgccaccaacgaggacagatcctgggtgttcgacagctacagcctgacagggccctctgtgtgtgagctcgtcagggcccccggcttcgcccgcctgccgctcgtggtggaggacttcgtgaaggattcgggcgcctgcttcagtgcaagcgagcctgacgctgtccacgtcgtgctggaccgccacctggtcacaggccagaatgccagctccactgtcccggccgtgcagaacctgctcttcctctgtggcagccggaaatgaacctgctgggtagatgcaccccctgagacagcccaggtgtctccagaggcagccccgtctcaggcttcagggaccccgcctcttccctcctgacaagggccctggatggcagcctggtctggccctgatgggattgttggaggcctcctggaatcagctctgagggggtgtcggctctcctggagggtccaaacccccatcctcctgcatgttctctggtaggaggcagagaaaagaccccacgtgcctggagagctgtgctagctgctaggtggtcctcgggaattccaggctgggttttctagggaggactggttgtcacgtgtggtcactgttgactagacagagtcggctcgggggtcctctgtgtgggtttgccctgctgtggcctgtctgccacccaccacctctttcactgttggtgggggccttgaggggagggcccagccggcgggagctggctcagaactttggccaaaggtgaacggaattttttaggagcagcagcctcctgccccaaggccgaccggcactggcagcactttcctgttgaagaaatcttcctggcgtgtggtttcaaagtgtaagcacctcagtgatgcaccctgtcctaagcattgagaggcacgtttacttgtgaatatgagaccatgagattctcaatgataggaaagtgctgtcccccacggccttgcacagtggcctcgggtagagcggctatcaagagcagacagtggtccagcctgctgggcacctggcctgggctgtggccctccagcgggctgccccctggccccaggttagggcgtccaggagaggcttaggccctctacttcctcacagttccccagtttgagccatcgaaggccttcttcctgcccacctccccgtctcagccacagccgttcccaagcaccagcgtggctcctggtgccagtgacctgccaggaggccccttgtgattataaaaccgttcagttgggccgggcgcagtggctcacacctgtaaccccagcactttgggaggccgaggcgggcggatcacgaggtcaggagatcgagaccatcctggctaacatggtgaaaccccat

SEQ ID NO: 8534 - protein, 184 aa, Homo sapiens; identical to SEQ ID NO: 8512

SEQ ID NO: 8535 - DNA, 237 bp, Homo sapiens
agacccagcgccgagcccgagccatggcgtccgacgggctgccccctggccccaggttagggcgtccaggagaggcttaggccctctacttcctcacagttccccagtttgagccatcgaaggccttcttcctgcccacctccccgtctcagccacagccgttcccaagcaccagcgtggctcctggtgccagtgacctgccaggaggccccttgtgattataaaaccgttcagttg

SEQ ID NO: 8536 - protein, 36 aa, Homo sapiens
DPAPSPSHGVRRAAPWPQVRASRRGLGPLLPHSSPV

SEQ ID NO: 8537 - DNA, 777 bp, Homo sapiens
gcagacccagcgccgagcccgagccatggcgtccgagcggctccctaacaggcccgcctgtctgctcgtggccagcggcgccgccgaaggtgtgtcggcccagtccttcctccactgtttcacgatggccagcaccgccttcaacctgcaggtggccacccctggggggaaagccatggaatttgtggatgtgactgagagcaatgcacgctgggtgcaagacttccgcctcaaggcttacgccagccccgccaagctcgagtccatcgatggtgcccggtaccatgccctcctgatccccagctgtcctggggccctgaccgacctggccagcagtggctccctggcccgtatcctgcagcacttccactctgagagcaaacccatctgcgccgtcggccacggtgtcgccgccctgtgctgtgccaccaacgaggacagatcctgggtgttcgacagctacagcctgacagggccctctgtgtgtgagctcgtcagggcccccggcttcgcccgcctgccgctcgtggtggaggacttcgtgaaggattcgggcgcctgcttcagtgcaagcgagcctgacgctgtccacgtcgtgctggaccgccacctggtcacaggccagaatgccagctccactgtcccggccgtgcagaacctgctcttcctctgtggcagccggaaatgaacctgctgggtagatgcaccccctgagacagcccaggtgtctccagaggcagccccgtctcaggcttcagggaccccgcctcttccctc

SEQ ID NO: 8538 - protein, 220 aa, Homo sapiens; identical to SEQ ID NO: 1219

SEQ ID NO: 8539 - DNA, 299 bp, Homo sapiens
ggaggacttcgtgaaggattcgggcgcctgcttcagtgcaagcgagcctgacgctgtccacgtcgtgctggaccgccacctggtcacaggccagaatgccagctccactgtcccggccgtgcagaacctgctcttcctctgtggcagccggtgagggcaccagggtgggcacattcctgccacatcagagctgcacccggtgcttttgcccaagctttgaccacacgtctgtcctgcaggaaatgaacctgctgggtagatgcaccccctgagacagcccaggtgtctccagaggcagc

SEQ ID NO: 8540 - protein, 58 aa, Homo sapiens
MPAPLSRPCRTCSSSVAAGEGTRVGTFLPHQSCTRCFCPSFDHTSVLQEMNLLGRCTP

SEQ ID NO: 8541 - DNA, 953 bp, Homo sapiens
cgcagacccagcgccgagcccgagccatggcgtccgagcggctccctaacaggcccgcctgtctgctcgtggccagcggcgccgccgaaggggaaagccatggaatttgtggatgtgactgagagcaatgcacgctgggtgcaagacttccgcctcaaggcttacgccagccccgccaagctcgagtccatcgatggtgcccggtaccatgccctcctgatccccagctgtcctggggccctgaccgacctggccagcagtggctccctggcccgtatcctgcagcacttccactctgagagcaaacccatctgcgccgtcggccacggtgtcgccgccctgtgctgtgccaccaacgaggacagatcctgggtgttcgacagctacagcctgacagggccctctgtgtgtgagctcgtcagggcccccggcttcgcccgcctgccgctcgtggtggaggacttcgtgaaggattcgggcgcctgcttcagtggtgagcctcgagggtgccccctgcacttacagaagatggggtggggggcttccctgctgcagcctgggggagaagcctcctgggccctgggttctatagacccccatggcactgactcagacccagacaggctgacctactgctgaccctgggagcccgcctggagttcgaggctctcagtgggtgaggtggacattgcctgaggttggtgccctcggtcctccccagcaagcgagcctgacgctgtccacgtcgtgctggaccgccacctggtcacaggccagaatgccagctccactgtcccggccgtgcagaacctgctcttcctctgtggcagccggtgagggcaccagggtgggcacattcctgccacatcagagctgcacccggtgcttttgcccaagctttgaccacacgtctgtcctgcaggaaatgaacctgctgggtagatgcaccccct

SEQ ID NO: 8542 - protein, 179 aa, Homo sapiens
MEFVDVTESNARWVQDFRLKAYASPAKLESIDGARYHALLIPSCPGALTDLASSGSLARILQHFHSESKPICAVGHGVAALCCATNEDRSWVFDSYSLTGPSVCELVRAPGFARLPLVVEDFVKDSGACFSGEPRGCPLHLQKMGWGASLLQPGGEASWALGSIDPHGTDSDPDRLTYC

SEQ ID NO: 8543 - DNA, 539 bp, Homo sapiens
gcagacccagcgccgagcccgagccatggcgtccgagcggctccctaacaggcccgcctgtctgctcgtggccagcggcgccgccgaaggtgtgtcggcccagtccttcctccactgtttcacgatggccagcaccgccttcaacctgcaggtggccacccctggggggaaagccatggaatttgtggatgtgactgagagcaatgcacgctgggtgcaagacttccgcctcaaggcttacgccagccccgccaagctcgagtccatcgatgaacccatctgcgccgtcggccacggtgtcgccgccctgtgctgtgccaccaacgaggacagatcctgggtgttcgacagctacagcctgacagggccctctgtgtgtgagctcgtcagggcccccggcttcgcccgcctgccgctcgtggtggaggacttcgtgaaggattcgggcgcctgcttcagtggtgagcctcgagggtgccccctgcacttacagaagatggggtggggggcttccctgctgcagcctgggggagaagcct

SEQ ID NO: 8544 - protein, 170 aa, Homo sapiens
MASERLPNRPACLLVASGAAEGVSAQSFLHCFTMASTAFNLQVATPGGKAMEFVDVTESNARWVQDFRLKAYASPAKLESIDEPICAVGHGVAALCCATNEDRSWVFDSYSLTGPSVCELVRAPGFARLPLVVEDFVKDSGACFSGEPRGCPLHLQKMGWGASLLQPGGE

SEQ ID NO: 8545 - DNA, 572 bp, Homo sapiens
gcagacccagcgccgagcccgagccatggcgtccgagcggctccctaacaggcccgcctgtctgctcgtggccagcggcgccgccgaaggtgtgtcggcccagtccttcctccactgtttcacgatggccagcaccgccttcaacctgcaggtggccacccctggggggaaagccatggaatttgtggatgtgactgagagcaatgcacgctgggtgcaagacttccgcctcaaggcttacgccagccccgccaagctcgagtccatcgatggtgcccggtaccatgccctcctgatccccagctgtcctggggccctgaccgacctggccagcagtggctccctggcccgtatcctgcagcacttccactctgagagcagtaggtgacccctgggacccaggggaggggttggatgtgcagtgtcacaagaaatgggtctcccaccagcagaagagaggtgggaagactccaggtaggcgtttctggatctctggtcagtggccactgcagtggttgtgggcaggaggcagggactgccccttcccccgacacacacagactttgtcgtct

SEQ ID NO: 8546 - protein, 120 aa, Homo sapiens
MASERLPNRPACLLVASGAAEGVSAQSFLHCFTMASTAFNLQVATPGGKAMEFVDVTESNARWVQDFRLKAYASPAKLESIDGARYHALLIPSCPGALTDLASSGSLARILQHFHSESSR

SEQ ID NO: 8547 - DNA, 300 bp, Homo sapiens
gttcgtacccggtccgggtcggctgggctgcccgccgctccgcgcgcccgggcggtcgcaggtcgcgcctgctttggccccggcgggttcggcatccgagcctggcaggggccaatagacagggcctctggagtgcagtggcgtgatctcggctcactacagcgtctgcctaccgtgttcaagcgatcctcccacctcagcctgttgagcaaccgggaccccaggtgcacactccaccacgcccagctaatttttttgtgttttgggtagagagggggtctcactgtgttgtccaagctg

SEQ ID NO: 8548 - protein, 89 aa, Homo sapiens
VRTRSGSAGLPAAPRARAVAGRACFGPGGFGIRAWQGPIDRASGVQWRDLGSLQRLPTVFKRSSHLSLLSNRDPRCTLHHAQLIFLCFG

SEQ ID NO: 8549 - DNA, 859 bp, Homo sapiens
gtacccggtccgggtcggctgggctgcccgccgctccgcgcgcccgggcggtcgcaggtcgcgcctgctttggccccggcgggttcggcatccgagcctggcaggggccaatagaaagtttcctacactactgaggtttaggggcactgtgaagcaaaagccacgcctcagaatcccaggcggagactccgacctcgtcccgggagggaagccagtagctgagcacctgcgggagattaaagagaggaataaggaggtgagtacatgacaaagagccacagtcgcaggcggtggggcctggctcagaacaggctgtgctgggaagcgggagcaggagctggcgccgccttgcgggctggcagaggaccatccactccctggcgctggggccgtcccatctcatgggcaagaaacgtgagacccctggctcgctccacacacaacctaagtgccagatggatgagacgcctacgcgtgagtaaatgccaggaacatgagactcgaacgtggcaggatatccttctgcccacgaatctaaaagcttactcggtaatgggagaatggttccaatttgataaactcgggtttttggaacgtctgtgctccagaaacactggaaggcaagtggctgctgactggaggagataattggatgctgcaagcggcaaagggctcgggatgcaaaacaccgcaagaaatgcaacaagtgaggagcattcccgcaaagaaaaaacgcacaggccgagagcagtggctcacgcctgtaatcccagcagtttgggaggccgaggcaggtgcatcgcttgaggacaggagttcgagactaggctggccaacatggtgaaaccccatctctact

SEQ ID NO: 8550 - protein, 127 aa, Homo sapiens [sequence omitted]

SEQ ID NO: 8551 - DNA, 587 bp, Homo sapiens
cccgccgctccgcgcgcccgggcggtcgcaggtcgcgcctgctttggccccggcgggttcggcatccgagcctggcaggggccaatagacagggcctctggagtgcagtggcgtgatctcggctcactacagcgtctgcctaccgtgttcaagcgatcctcccacctcagcctgttgagcaaccgggaccccagaaagtttcctacactactgaggtttaggggcactgtgaagcaaaagccacgcctcagaatcccaggcggagactccgacctcgtcccgggagggaagccagtagctgagcacctgcgggagattaaagagaggaataaggagaaacactggaaggcaagtggctgctgactggaggagataattggatgctgcaagcggcaaagggctcgggatgcaaaacaccgcaagaaatgcaacaagtgaggagcattcccgcaaagaaaaaacgcacaggccgagagcagtggctcacgcctgtaatcccagcagtttgggaggccgaggcaggtgcatcgcttgaggacaggagttcgagactaggctggccaacatggtgaaaccccatctctact

SEQ ID NO: 8552 - protein, 63 aa, Homo sapiens
MLQAAKGSGCKTPQEMQQVRSIPAKKKRTGREQWLTPVIPAVWEAEAGASLEDRSSRLGWPTW

SEQ ID NO: 8553 - DNA, 277 bp, Homo sapiens
cagcagcccctgtcctctcaagtgcttctgacgcccaggtgaaggtaccctcgtgccccagccctggcccagcctccctgcgtcttagcggctgtcacttactgtctgcttcctgcttctgggtctgcgtgactcacaggtgctggggtctaactatccagactccacccagcccagccatctgtgggggatgttctcagaagggggtagagtcggccctcaggatctatgggttccgcatccgtggattcaaccaagcaaggatgttaaatatttg

SEQ ID NO: 8554 - DNA, 672 bp, Homo sapiens
tcgagatcgcgccactgcactccagcctgggcaacagagcaagagtccgtctcaaaaaaaaaaaaaaaaagtgttctgtaataaaagtgaactgataagttctgggcatccctgagaatttgttttcctttcagaaagtttcctacactactgaggtttaggggcactgtgaagcaaaagccacgcctcagaatcccaggcggagactccgacctcgtcccgggagggaagccagtagctgagcacctgcgggagattaaagagaggaataaggaggtgagtacatgacaaagagccacagtcgcaggcggtggggcctggctcagaacaggctgtgctgggaagcgggagcaggagctggcgccgccttgcgggctggcagaggaccatccactccctggcgctggggccgtcccatctcatgggcaagaaacgtgagacccctggctcgctccacacacaacctaagtgccagatggatgagacgcctacgcgtgagtaaatgccaggaacatgagactcgaacgtggcaggatatccttctgcccacgaatctaaaagcttatcgggaggctgaggcaggagaatcgcttgaacctgggagacagaggttgcagtgagccaagatcgtgtcactgcactccagcctgggcaacagagtgagactctgtc

SEQ ID NO: 8555 - protein, 111 aa, Homo sapiens
MTKSHSRRRWGLAQNRLCWEAGAGAGAALRAGRGPSTPWRWGRPISWARNVRPLARSTHNLSARWMRRLRVSKCQEHETRTWQDILLPTNLKAYREAEAGESLEPGRQRLQ

SEQ ID NO: 8556 - DNA, 1504 bp, Homo sapiens
atcccgcggaggagcgcgcagccccggggaggccggaggacgcgcccatagaatgcccaggggcgacaaactgtcctgagcccctctggtgcagccacctgcctgtcccatacgccccgcccaccatggagtccagagggaagtcagccagcagccccaagcccgacaccaaggtgccccaggtcaccaccgaggccaaggtacccccggcagccgatgggaaagcccccttgaccaagcccttctcaacaaccacagcaacctgaagccagcccccacggtccccagcagtcccgatgcaaccccggagcccaagggtcctggggacggggcggaggaagatgaggctgccagtggggggcctgggggccgaggtccctggtcctgtgagaacttcaaccccctgctggtggctgggggtgtggccgtggcagccatagccctgattctcggtgtggccttcctggtccggaaaaaataatacctgggggccaggcggggggcacggagccacttcctgtacagacccgaggaagccagtgcatgcagagttcacccttacctattcgtacacacgcacattcattacacacctacatacgcccccaacacacgcgcacggtgaagaggacgcccgagcccacccctgctgacccaggacttccccaacctccagggcagaaagagcccaggctccggggtccacagcacaggatgtggggcgagggcacagctggggaacggcaagaaaggaatggaccctgtgtgtggccccccccacccctggcggctgggtgatcctgggcccccagggctggtctgagtgcaggtgggggtgccgggatgggttgggcctgggcccggccctcgtggggacattaaagggcgcggtggctccactcgccccatttctgctctttgcgtaccccccgggggtctgcctgggcgaatgcagtgggacggacctggggtgggcactcacctcagcagagcctcaatgccacctccccacaccacccaagcctagctgggtgggaagacggagccctgaagcctgcgtgtggagggggtgctgcccaagggtcgccttccccagcttgtgctccaggggagccccgacgccggcggggaggcagggatgtcgagggcccctcacagctgtgcccgccctgccccgctagactgcccctccagcttgcacccagcaccacctgagtctaaccagcgtataatgcaataacaggtagagtagaactgcttttggcggcgaccgtcacacactgtcctcagcccactgcacctggggaagcccctcgtgcagcccctccttagcacatccagtcccagcgtggcccttggcgcgcagcagcaggcgaactcccagaaggtggtggtgggcactgtgagaacgtggcctgccctcactggccagtggccacaggaaccccgggcctgagtggaggctgagtctgaaataaactctgtcgtctgaaggctgctcttg

SEQ ID NO: 8557 - protein, 46 aa, Homo sapiens
MESRGKSASSPKPDTKVPQVTTEAKVPPAADGKAPLTKPFSTTTAT

SEQ ID NO: 8558 - DNA, 1466 bp, Homo sapiens
agtgcattgtgggaaactcccgagctctcctccgcgttcgcagccgccgtcatcccgcggaggagcgcgcagccccggggaggccggaggacgcgcccatagaatgcccaggggcgacaaactgtcctgagcccctctggtgcagccacctgcctgtcccatacgccccgcccaccatggagtccagagggaagtcagccagcagccccaagcccgacaccaaggtgccccaggtcaccaccgaggccaaggtacccccggcagccgatgggaaagcccccttgaccaagccctcgaagaaggaggccccggccgagaagcagcagccgccagcagcccccaccacggcacctgccaagaagacctcggccaaggccgaccctgcccttctcaacaaccacaccctgattctcggtgtggccttcctggtccggaaaaaataatacctgggggccaggcggggggcacggagccacttcctgtacagacccgaggaagccagtgcatgcagagttcacccttacctattcgtacacacgcacattcattacacacctacatacgcccccaacacacgcgcacggtgaagaggacgcccgagcccacccctgctgacccaggacttccccaacctccagggcagaaagagcccaggctccggggtccacagcacaggatgtggggcgagggcacagctggggaacggcaagaaaggaatggaccctgtgtgtggccccccccacccctggcggctgggtgatcctgggcccccagggctggtctgagtgcaggtgggggtgccgggatgggttgggcctgggcccggccctcgtggggacattaaagggcgcggtggctccactcgccccatttctgctctttgcgtaccccccgggggtctgcctgggcgaatgcagtgggacggacctggggtgggcactcacctcagcagagcctcaatgccacctccccacaccacccaagcctagctgggtgggaagacggagccctgaagcctgcgtgtggagggggtgctgcccaagggtcgccttccccagcttgtgctccaggggagccccgacgccggcggggaggcagggatgtcgagggcccctcacagctgtgcccgccctgccccgctagactgcccctccagcttgcacccagcaccacctgagtctaaccagcgtataatgcaataacaggtagagtagaactgcttttggcggcgaccgtcacacactgtcctcagcccactgcacctggggaagcccctcgtgcagcccctccttagcacatccagtcccagcgtggcccttggcgcgcagcagcaggcgaactcccagaaggtggtggtgggcactgtgagaacgtggcctgccctcactggccagtggccacaggaaccccgggcctgagtggaggctgagtctgaaataaactctgtcgtctgaaggctgctcttg

SEQ ID NO: 8559 - protein, 88 aa, Homo sapiens
MESRGKSASSPKPDTKVPQVTTEAKVPPAADGKAPLTKPSKKEAPAEKQQPPAAPTTAPAKKTSAKADPALLNNHTLILGVAFLVRKK

SEQ ID NO: 8560 - DNA, 897 bp, Homo sapiens
agtgcattgtgggaaactcccgagctctcctccgcgttcgcagccgccgtcatcccgcggaggagcgcgcagccccggggaggccggaggacgcgcccatagaatgcccaggggcgacaaactgtcctgagcccctctggtgcagccacctgccctgtgtgtggccccccccacccctggcggctgggtgatcctgggcccccagggctggtctgagtgcaggtgggggtgccgggatgggttgggcctgggcccggccctcgtggggacattaaagggcgcggtggctccactcgccccatttctgctctttgcgtaccccccgggggtctgcctgggcgaatgcagtgggacggacctggggtgggcactcacctcagcagagcctcaatgccacctccccacaccacccaagcctagctgggtgggaagacggagccctgaagcctgcgtgtggagggggtgctgcccaagggtcgccttccccagcttgtgctccaggggagccccgacgccggcggggaggcagggatgtcgagggcccctcacagctgtgcccgccctgccccgctagactgcccctccagcttgcacccagcaccacctgagtctaaccagcgtataatgcaataacaggtagagtagaactgcttttggcggcgaccgtcacacactgtcctcagcccactgcacctggggaagcccctcgtgcagcccctccttagcacatccagtcccagcgtggcccttggcgcgcagcagcaggcgaactcccagaaggtggtggtgggcactgtgagaacgtggcctgccctcactggccagtggccacaggaaccccgggcctgagtggaggctgagtctgaaataaactctgtcgtctgaaggctgctcttg

SEQ ID NO: 8561 - protein, 33 aa, Homo sapiens
MSRAPHSCARPAPLDCPSSLHPAPPESNQRIMQ

SEQ ID NO: 8562 - DNA, 1652 bp, Homo sapiens
agcagtgcattgtgggaaactcccgagctctcctccgcgttcgcagccgccgtcatcccgcggaggagcgcgcagccccggggaggccggaggacgcgcccatagaatgcccaggggcgacaaactgtcctgagcccctctggtgcagccacctgcctgtcccatacgccccgcccaccatggagtccagagggaagtcagccagcagccccaagcccgacaccaaggtgccccaggtcaccaccgaggccaaggtacccccggcagccgatgggaaagcccccttgaccaagccctcgaagaaggaggccccggccgagaagcagcagccgccagcagcccccaccacggcacctgccaagaagacctcggccaaggccgaccctgcccttctcaacaaccacagcaacctgaagccagcccccacggtccccagcagtcccgatgcaaccccggagcccaagggtcctggggacggggcggaggaagatgaggctgccagtggggggcctgggggccgaggtccctggtcctgtgagaacttcaaccccctgctggtggctgggggtgtggccgtggcagccatagccctgattctcggtgtggccttcctggtccggaaaaaataatacctgggggccaggcggggggcacggagccacttcctgtacagacccgaggaagccagtgcatgcagagttcacccttacctattcgtacacacgcacattcattacacacctacatacgcccccaacacacgcgcacggtgaagaggacgcccgagcccacccctgctgacccaggacttccccaacctccagggcagaaagagcccaggctccggggtccacagcacaggatgtggggcgagggcacagctggggaacggcaagaaaggaatggaccctgtgtgtggccccccccacccctggcggctgggtgatcctgggcccccagggctggtctgagtgcaggtgggggtgccgggatgggttgggcctgggcccggccctcgtggggacattaaagggcgcggtggctccactcgccccatttctgctctttgcgtaccccccgggggtctgcctgggcgaatgcagtgggacggacctggggtgggcactcacctcagcagagcctcaatgccacctccccacaccacccaagcctagctgggtgggaagacggagccctgaagcctgcgtgtggagggggtgctgcccaagggtcgccttccccagcttgtgctccaggggagccccgacgccggcggggaggcagggatgtcgagggcccctcacagctgtgcccgccctgccccgctagactgcccctccagcttgcacccagcaccacctgagtctaaccagcgtataatgcaataacaggtagagtagaactgcttttggcggcgaccgtcacacactgtcctcagcccactgcacctggggaagcccctcgtgcagcccctccttagcacatccagtcccagcgtggcccttggcgcgcagcagcaggcgaactcccagaaggtggtggtgggcactgtgagaacgtggcctgccctcactggccagtggccacaggaaccccgggcctgagtggaggctgagtctgaaataaactctgtcgtctgaaggctgctcttg

SEQ ID NO: 8563 - protein, 149 aa, Homo sapiens [sequence omitted]

SEQ ID NO: 8564 - DNA, 928 bp, Homo sapiens
cgaagaaggaggccccggccgagaagcagcagccgccagcagcccccaccacggcacctgccaagaagacctcggccaaggccgaccctgcccttctcaacaaccacagcaacctgaagccagcccccacggtccccagcagtcccgatgcaaccccggagcccaagggtcctggggacggggcggaggaagatgaggctgccagtggggggcctgggggccgaggtccctggtcctgtgagaacttcaaccccctgctggtggctgggggtgtggccgtggcagccatagccctgattctcggtgtggccttcctggtccggaaaaaataatacctgggggccaggcggggggcacggagccacttcctgtacagacccgaggaagccagtgcatgcagagttcacccttacctattcgtacacacgcacattcattacacacctacatacgcccccaacacacgcgcacggtgaagaggacgcccgagcccacccctgctgacccaggacttccccaacctccagggcagaaagagcccaggctccggggtccacagcacaggatgtggggcgagggcccctcacagctgtgcccgccctgccccgctagactgcccctccagcttgcacccagcaccacctgagtctaaccagcgtataatgcaataacaggtagagtagaactgcttttggcggcgaccgtcacacactgtcctcagcccactgcacctggggaagcccctcgtgcagcccctccttagcacatccagtcccagcgtggcccttggcgcgcagcagcaggcgaactcccagaaggtggtggtgggcactgtgagaacgtggcctgccctcactggccagtggccacaggaaccccgggcctgagtggaggctgagtctgaaataaactctgtcgtctgaaggct

SEQ ID NO: 8565 - protein, 83 aa, Homo sapiens
MQSSPLPIRTHAHSLHTYIRPQHTRTVKRTPEPTPADPGLPQPPGQKEPRLRGPQHRMWGEGPSQLCPPCPARLPLQLAPSTT

SEQ ID NO: 8566 - DNA, 868 bp, Homo sapiens
gcccatagaatgcccaggggcgacaaactgtcctgagcccctctggtgcagccacctgcctgtcccatacgccccgcccaccatggagtccagagggaagtcagccagcagccccaagcccgacaccaaggtgccccaggtcaccaccgaggccaaggtacccccggcagccgatgggaaagcccccttgaccaagccctcgaagaaggaggccccggccgagaagcagcagccgccagcagcccccaccacggcacctgccaagaagacctcggccaaggccgaccctgcccttctcaacaaccacagcaacctgaagccagcccccacggtccccagcagtcccgatgcaaccccggagcccaagggtcctggggacggggcggaggaagatgaggctgccagtggggggcctgggggccgaggtccctggtcctgtgagaacttcaaccccctgctggtggctgggggtgtggccgtggcagccatagccctgattctcggtgtggccttcctggtccggaaaaaataatacctgggggccaggcggggggcacggagccacttcctgtacagacccagcaccacctgagtctaaccagcgtataatgcaataacaggtagagtagaactgcttttggcggcgaccgtcacacactgtcctcagcccactgcacctggggaagcccctcgtgcagcccctccttagcacatccagtcccagcgtggcccttggcgcgcagcagcaggcgaactcccagaaggtggtggtgggcactgtgagaacgtggcctgccctcactggccagtggccacaggaaccccgggcctgagtggaggctgagtctgaaataaactctgtcgtctg

SEQ ID NO: 8567 - protein, 149 aa, Homo sapiens [sequence omitted]

SEQ ID NO: 8568 - DNA, 1517 bp, Homo sapiens
agagtgagtgcctggggcagagtgagagcaggaccagcgggcaggtggcggagcgggggtcggtggtggatggcccagccctggaaagccgaggtgaaggttacgagtccctgaggatctgtgggtgtgagccagccgcctagcccaggacggagcaagggaagacccctccccagccctcccgtcggcaggggcagcagggggcagggtgcagggtccacataggtggtgcacacgcaagccccccggggtgctgcctgcaccgttgggatcaatgtctcatttatgtagaaaatgcagaaatctttacattcctcaagctagcccctgccccaatcctgccctggcctgaacacccccagggacagagctggtctctgggctgggggcccccgggcctgggccgggcaggctggaccatacccccagtccaccagctccagtctccacagccatcctggcccacacaggcaccccacacaaacctatttattgaatctgctggacccaagcggctctccagcccttccgtccttccccagccgctcttgtcgccttggcaggacttgactctgcctccctggccagccttgcaagaggactggggtctcctgccctctctgttgagccaggaatcccaagtgaggggttgccctgaggtctgactcttggggcaagcccgccacccactgtgggactttctggtgggctcctcagctcccaccccaggctggggcccagattgtgaggtctgtgtgcatgtgtgtgtgtatgtgtgtgtgcatgcgtgtgtgtgttgtggggatctggcctggcccttggggatggggctgctggggactgccccccttcccgccgtggccaggcgctctgtgtgctgtgtgtgccccaggctctgttgaccccgtccaggaactaacttacccagcttggtctctcctgagtcctccaccctggcctgggattggccagggagcagggcgggcattgggaccagtgtggagcctgagggtgcctgccctgctctggagggagggccaggagctgccacacccccaagtcctctcagggcccaccctcctttttcagcctctgcataaggcccctgggtacactgcagaagccccatccttcccgcctccgggcataaggcccctgaccacacttcagaagccccatcccccctgccaccgggcgatccctgctgtgagccgaagctctccctgccccgccctggccatgtgatcgtgttggtgacagaccctgatgtgctggtgctgtgtccccaaaaccggggccctccacagaggccccttcccagcgacactacctggggctcaggcctggacccccccagttcacggttgctcctgggagctgcccctcccgtcacatcagaaccttggaagctgctgctgctgcttacagaattatatttttttcttttgaagagttttaagaagttgtaactttttgtgtcttgtcatgtcagagaataaataaatattctaagtaga

SEQ ID NO: 8569 - protein, 161 aa, Homo sapiens [sequence omitted]

SEQ ID NO: 8570 - DNA, 2093 bp, Homo sapiens
aagagccatccagagtgagtgcctggggcagagtgagagcaggaccagcgggcaggtggcggagcgggggtcggtggtggatggcccagccctggaaagccgaggtgaaggttacgagtccctgaggatctgtgggtgtgagccagccgcgtggccctgggcaacggcgctctgcccctcggcccacggccacccagctgacccgcgacctgctgcggagccgtggcattgccggtctctacaagggactcggggccacgctgctcagggatgtccccttctctgtggtgtacttcccgctctttgccaacctgaaccagctgggccgcccggcgtccgaggagaagtcgcctttctacgtgtccttcctggccggctgtgtggctgggagtgccgccgctgtggccgtcaacccctgtgatgtggtgaagacgcggctccagtcacttcagcgaggcgtcaacgaggacacctactctgggatcctggactgtgccaggaagatcctgcggcacgagggcccctcggccttcctgaagggcgcctactgccgcgcgctggtcatcgcgccccttttcggcatcgcacaggtggtctacttcctgggcatcgcggagtccctgctggggctgctgcaggacccccaggcctgagcccagcacccgctccaccccagccagctgggcagggccggtgtggggctggagccaggcagctagcccaggacggagcaagggaagacccctccccagccctcccgtcggcaggggcagcagggggcagggtgcagggtccacataggtggtgcacacgcaagccccccggggtgctgcctgcaccgttgggatcaatgtctcatttatgtagaaaatgcagaaatctttacattcctcaagctagcccctgccccaatcctgccctggcctgaacacccccagggacagagctggtctctgggctgggggcccccgggcctgggccgggcaggctggaccatacccccagtccaccagctccagtctccacagccatcctggcccacacaggcaccccacacaaacctatttattgaatctgctggacccaagcggctctccagcccttccgtccttccccagccgctcttgtcgccttggcaggacttgactctgcctccctggccagccttgcaagaggactggggtctcctgccctctctgttgagccaggaatcccaagtgaggggttgccctgaggtctgactcttggggcaagcccgccacccactgtgggactttctggtgggctcctcagctcccaccccaggctggggcccagattgtgaggtctgtgtgcatgtgtgtgtgtatgtgtgtgtgcatgcgtgtgtgtgttgtggggatctggcctggcccttggggatggggctgctggggactgccccccttcccgccgtggccaggcgctctgtgtgctgtgtgtgccccaggctctgttgaccccgtccaggaactaacttacccagcttggtctctcctgagtcctccaccctggcctgggattggccagggagcagggcgggcattgggaccagtgtggagcctgagggtgcctgccctgctctggagggagggccaggagctgccacacccccaagtcctctcagggcccaccctcctttttcagcctctgcataaggcccctgggtacactgcagaagccccatccttcccgcctccgggcataaggcccctgaccacacttcagaagccccatcccccctgccaccgggcgatccctgctgtgagccgaagctctccctgccccgccctggccatgtgatcgtgttggtgacagaccctgatgtgctggtgctgtgtccccaaaaccggggccctccacagaggccccttcccagcgacactacctggggctcaggcctggacccccccagttcacggttgctcctgggagctgcccctcccgtcacatcagaaccttggaagctgctgctgctgcttacagaattatatttttttcttttgaagagttttaagaagttgtaactttttgtgtcttgtcatgtcagagaataaataaatattctaagtaga

SEQ ID NO: 8571 - protein, 161 aa, Homo sapiens [sequence omitted]

SEQ ID NO: 8572 - DNA, 2902 bp, Homo sapiens
aggctgccggaagcctctgcttgcccaaagtgaaagagaaagtgcccccccacccaagcccgccccaccccgccccacggccaatccctgcggcccctcgcctcctcccccggcagcttccccttctgtgtgagtgctgggctggagtgtggaagagccatccagagtgagtgcctggggcagagtgagagcaggaccagcgggcaggtggcggagcgggggtcggtggtggatggcccagccctggaaagccgaggtgaaggttacgagtccctgaggatctgtgggtgtgagccagccgcgtggccctgggcaacggcgctgccggacagaagtggcggttgctgacgcctggaaattcccctgaaggtggagcaccacccaacccccctgggtcccaccctccctcaaggcctcctccacctccacctccaccccgcctggcctggcgtccacctctgcggctcctacctgggtgcaatcgagttaaatggctgataagcagatcagcctgccagccaagctcatcaatggcggcatcgccgggctgatcggtgtcacctgcgtgtttcccatcgacctggccaagaccaggctgcagaaccagcagaacggccagcgcgtgtacacgagcatgtccgactgcctcatcaagaccgtccgctccgagggctacttcggcatgtaccggggagctgctgtgaacttgaccctcgtcacccccgagaaggccatcaagctggcagccaacgacttcttccgacatcagctctctaaggacgggcagaagctgaccctgcttaaagagatgctggcgggctgtggggctggcacctgccaggtgatcgtgaccacgcccatggagatgctgaagatccagctgcaggatgcagggcgcattgccgcccagaggaagatcctggctgcccagggccagctctcggcccaggggggtgcccagccctcagtggaggctccagctgcccctcggcccacggccacccagctgacccgcgacctgctgcggagccgtggcattgccggtctctacaagggactcggggccacgctgctcagggatgtccccttctctgtggtgtacttcccgctctttgccaacctgaaccagctgggccgcccggcgtccgaggagaagtcgcctttctacgtgtccttcctggccggctgtgtggctgggagtgccgccgctgtggccgtcaacccctgtgatgtggtgaagacgcggctccagtcacttcagcgaggcgtcaacgaggacacctactctgggatcctggactgtgccaggaagatcctgcggcacgagggcccctcggccttcctgaagggcgcctactgccgcgcgctggtcatcgcgccccttttcggcatcgcacaggtggtctacttcctgggcatcgcggagtccctgctggggctgctgcaggacccccaggcctgagcccagcacccgctccaccccagccagctgggcagggccggtgtggggctggagccaggcagctagcccaggacggagcaagggaagacccctccccagccctcccgtcggcaggggcagcagggggcagggtgcagggtccacataggtggtgcacacgcaagccccccggggtgctgcctgcaccgttgggatcaatgtctcatttatgtagaaaatgcagaaatctttacattcctcaagctagcccctgccccaatcctgccctggcctgaacacccccagggacagagctggtctctgggctgggggcccccgggcctgggccgggcaggctggaccatacccccagtccaccagctccagtctccacagccatcctggcccacacaggcaccccacacaaacctatttattgaatctgctggacccaagcggctctccagcccttccgtccttccccagccgctcttgtcgccttggcaggacttgactctgcctccctggccagccttgcaagaggactggggtctcctgccctctctgttgagccaggaatcccaagtgaggggttgccctgaggtctgactcttggggcaagcccgccacccactgtgggactttctggtgggctcctcagctcccaccccaggctggggcccagattgtgaggtctgtgtgcatgtgtgtgtgtatgtgtgtgtgcatgcgtgtgtgtgttgtggggatctggcctggcccttggggatggggctgctggggactgccccccttcccgccgtggccaggcgctctgtgtgctgtgtgtgccccaggctctgttgaccccgtccaggaactaacttacccagcttggtctctcctgagtcctccaccctggcctgggattggccagggagcagggcgggcattgggaccagtgtggagcctgagggtgcctgccctgctctggagggagggccaggagctgccacacccccaagtcctctcagggcccaccctcctttttcagcctctgcataaggcccctgggtacactgcagaagccccatccttcccgcctccgggcataaggcccctgaccacacttcagaagccccatcccccctgccaccgggcgatccctgctgtgagccgaagctctccctgccccgccctggccatgtgatcgtgttggtgacagaccctgatgtgctggtgctgtgtccccaaaaccggggccctccacagaggccccttcccagcgacactacctggggctcaggcctggacccccccagttcacggttgctcctgggagctgcccctcccgtcacatcagaaccttggaagctgctgctgctgcttacagaattatatttttttcttttgaagagttttaagaagttgtaactttttgtgtcttgtcatgtcagagaataaataaatattctaagtaga

SEQ ID NO: 8573 - protein, 323 aa, Homo sapiens; identical to SEQ ID NO: 1223

SEQ ID NO: 8574 - DNA, 699 bp, Homo sapiens
ctacttagaatatttatttattctctgacatgacaagacacaaaaagttacaacttcttaaaactcttcaaaagaaaaaaatataattctgtaagcagcagcagcagcttccaaggttctgatgtgacgggaggggcagctcccaggagcaaccgtgaactgggggggtccaggcctgagccccaggtagtgtcgctgggaaggggcctctgtggagggccccggttttggggacacagcaccagcacatcagggtctgtcaccaacacgatcacatggccagggcgggaaggatggggcttctgcagtgtacccaggggccttatgcagaggctgaaaaaggagggtgggccctgagaggacttgggggtgtggcagctcctggccctccctccagagcagggcaggcaccctcaggctccacactggtcccaatgcccgccctgctccctggccaatcccaggccagggtggaggactcaggagagaccaagctgggtaagttagttcctggacggggtcaacagagcctggggcacacacagcacacagagcgcctggccacggcgggaaggggggcagtccccagcagccccatccccaagggccaggccagatccccacaacacacacacgcatgcacacacacatacacacacacatgcacacagacctcacaatctgggccccagcctgggg

SEQ ID NO: 8575 - protein, 140 aa, Homo sapiens [sequence omitted]

SEQ ID NO: 8576 - DNA, 1166 bp, Homo sapiens
tcatcgcgccccttttcggcatcgcacaggtggtctacttcctgggcatcgcggagtccctgctggggctgctgcaggacccccaggcctgagcccagcacccgctccaccccagccagctgggcagggccggtgtggggctggagccaggcagctagcccaggacggagcaagggaagacccctccccagccctcccgtcggcaggggcagcagggggcagggtgcagggtccacataggtggtgcacacgcaagccccccggggtgctgcctgcaccgttgggatcaatgtctcatttatgtagaaaatgcagaaatctttacattcctcaagctagcccctgccccaatcctgccctggcctgaacacccccagggacagagctggtctctgggctgggggcccccgggcctgggccgggcaggctggaccatacccccagtccaccagctccagtctccacagccatcctggcccacacaggcaccccacacaaacctatttattgaatctgctggacccaagcggctctccagcccttccgtccttccccagccgctcttgtcgccttggcaggacttgactctgcctccctggccagccttgcaagaggactggggtctcctgccctctctgttgagccaggaatcccaagtgaggggttgccctgaggtctgactcttggggcaagcccgccacccactgtgggactttctggtgggctcctcagctcccaccccaggctggggcccagattgtgaggtctgtgtgcatgtgtgtgtgtatgtgtgtgtgcatgcgtgtgtgtgttgtggggatctggcctggccccctgccaccgggcgatccctgctgtgagccgaagctctccctgccccgccctggccatgtgatcgtgttggtgacagaccctgatgtgctggtgctgtgtccccaaaaccggggccctccacagaggccccttcccagcgacactacctggggctcaggcctggacccccccagttcacggttgctcctgggagctgcccctcccgtcacatcagaaccttggaagctgctgctgctgcttacagaattatatttttttcttttgaagagttttaagaagttgtaactttttgtgtcttgtcatgtcagagaataaataaatattctaagtag

SEQ ID NO: 8577 - protein, 114 aa, Homo sapiens
MCVCMCVCMRVCVVGIWPGPLPPGDPCCEPKLSLPRPGHVIVLVTDPDVLVLCPQNRGPPQRPLPSDTTWGSGLDPPSSRLLLGAAPPVTSEPWKLLLLLTELYFFLLKSFKKL

SEQ ID NO: 8578 - DNA, 872 bp, Homo sapiens
gtgagcggcgtgtgaggctggctgggaagacgctggcggtggggagggggggactgaaaggaagccaggtggtcccaggggacagaagtggcggttgctgacgcctggaaattcccctgaaggtggagcaccacccaacccccctgggtcccaccctccctcaaggcctcctccacctccacctccaccccgcctggcctggcgtccacctctgcggctcctacctgggtgcaatcgagttaaatggctgataagcagatcagcctgccagccaagctcatcaatggcggcatcgccgggctgatcggtgtcacctgcgtgtttcccatcgacctggccaagaccaggctgcagaaccagcagaacggccagcgcgtgtacacgagcatgtccgactgcctcatcaagaccgtccgctccgagggctacttcggcatgtaccggggtgaggtttggctcggctgggctcgatatgggcaggcctgggtagcgcccgcgagtcgtggcagggagcggtgggggaggcagggcagggcggccagcctgggcctggtgtgtgagcgtggacgtgtttgtgggggctgtgcctgtgcaggggggactggatctctggtgagtggtagttctcagcctctcccgtggcagctccccacccccacttagtgcctggtgcgtgggatgccatggtacatctgtctcttctctggtggccacagctgcctctgccttctgggccaggctggaccccgtttgtggctggggatgggagggagtaaggggcattaccgcaaagcagcttaggacacaatccagagcctagatttggcagaagctctccagccctgagccttcggcactgagatgggggctct

SEQ ID NO: 8579 - protein, 139 aa, Homo sapiens [sequence omitted]

SEQ ID NO: 8580 - DNA, 844 bp, Homo sapiens
agcttccccttctgtgtgagtgctgggctggagtgtggaagagccatccagagacagaagtggcggttgctgacgcctggaaattcccctgaaggtggagcaccacccaacccccctgggtcccaccctccctcaaggcctcctccacctccacctccaccccgcctggcctggcgtccacctctgcggctcctacctgggtgcaatcgagttaaatggctgataagcagatcagcctgccagccaagctcatcaatggcggcatcgccgggctgatcggtgtcacctgcgtgtttcccatcgacctggccaagaccaggctgcagaaccagcagaacggccagcgcgtgtacacgagcatgtccgactgcctcatcaagaccgtccgctccgagggctacttcggcatgtaccggggtgaggtttggctcggctgggctcgatatgggcaggcctgggtagcgcccgcgagtcgtggcagggagcggtgggggaggcagggcagggcggccagcctgggcctggtgtgtgagcgtggacgtgtttgtgggggctgtgcctgtgcaggggggactggatctctggtgagtggtagttctcagcctctcccgtggcagctccccacccccacttagtgcctggtgcgtgggatgccatggtacatctgtctcttctctggtggccacagctgcctctgccttctgggccaggctggaccccgtttgtggctggggatgggagggagtaaggggcattaccgcaaagcagcttaggacacaatccagagcctagatttggcagaagctctccagccctgagccttcggcactgagatgggggctct

SEQ ID NO: 8581 - protein, 139 aa, Homo sapiens [sequence omitted]

SEQ ID NO: 8582 - DNA, 1119 bp, Homo sapiens
aggctgccggaagcctctgcttgcccaaagtgaaagagaaagtgcccccccacccaagcccgccccaccccgccccacggccaatccctgcggcccctcgcctcctcccccggcagcttccccttctgtgtgagtgctgggctggagtgtggaagagccatccagagtgagtgcctggggcagagtgagagcaggaccagcgggcaggtggcggagcgggggtcggtggtggatggcccagccctggaaagccgaggtgaaggttacgagtccctgaggatctgtgggtgtgagccagccgcgtggccctgggcaacggcgctgccggacagaagtggcggttgctgacgcctggaaattcccctgaaggtggagcaccacccaacccccctgggtcccaccctccctcaaggcctcctccacctccacctccaccccgcctggcctggcgtccacctctgcggctcctacctgggtgcaatcgagttaaatggctgataagcagatcagcctgccagccaagctcatcaatggcggcatcgccgggctgatcggtgtcacctgcgtgtttcccatcgacctggccaagaccaggctgcagaaccagcagaacggccagcgcgtgtacacgagcatgtccgactgcctcatcaagaccgtccgctccgagggctacttcggcatgtaccggggtgaggtttggctcggctgggctcgatatgggcaggcctgggtagcgcccgcgagtcgtggcagggagcggtgggggaggcagggcagggcggccagcctgggcctggtgtgtgagcgtggacgtgtttgtgggggctgtgcctgtgcaggggggactggatctctggtgagtggtagttctcagcctctcccgtggcagctccccacccccacttagtgcctggtgcgtgggatgccatggtacatctgtctcttctctggtggccacagctgcctctgccttctgggccaggctggaccccgtttgtggctggggatgggagggagtaaggggcattaccgcaaagcagcttaggacacaatccagagcctagatttggcagaagctctccagccctgagccttcggcactgagatgggggctct

SEQ ID NO: 8583 - protein, 139 aa, Homo sapiens [sequence omitted]

SEQ ID NO: 8584 - DNA, 272 bp, Homo sapiens
aggtgctggccgagcgcggggcgggcaggcgagcgcggcggcggcggcgagcgtggacagaagtggcggttgctgacgcctggaaattcccctgaaggtggagcaccacccaacccccctgggtcccaccctccctcaaggcctcctccacctccacctccaccccgcctggcctggcgtccacctctgcggctcctacctgggtgcaatcgagttaaatggctgataagcagatcagcctgccagccaagctcatcaatggcggcatcgcc

SEQ ID NO: 8585 - protein, 30 aa, Homo sapiens
VLAERGAGRRARRRRRAWTEVAVADAWKFP

SEQ ID NO: 8586 - DNA, 581 bp, Homo sapiens
acatacgtgtccccgagggtgggtgtccggggcccgagcccaaggaagaaaggccgacccgtgtgggacgcacacgtgggagttcaccggacatctgtggacacgtgcgtggccggagtcgcggtggccaggcggaggacggagcggtcggctgagccccagcagtagggcaggggcctgagccggcctccgagcgcagagagcggcccccaacccgcttctcctttgtcctctggccgaggcatcgcgcagttggagtccccttccgggaccctccagccagcaggatagaaagcaccgccccaagaggacggggacagcgggagattgaatggggagccgccggccagactcggagcctcacccccattgcctttcttgggggacagaagtggcggttgctgacgcctggaaattcccctgaaggtggagcaccacccaacccccctgggtcccaccctccctcaaggcctcctccacctccacctccaccccgcctggcctggcgtccacctctgcggctcctacctgggtgcaatcgagttaaatggctgataagcagatcagcctgccagccaagc

SEQ ID NO: 8587 - protein, 30 aa, Homo sapiens
MGSRRPDSEPHPHCLSWGTEVAVADAWKFP

SEQ ID NO: 8588 - DNA, 4525 bp, Homo sapiens
ggcgccgagcgcccgctgagcagccaccctttgcgcgccgcctgcagcgcagcttccccgggcgctgcctggacaggcctgcctgcgtgctgggacatgtctggcctccaaggaccgtcggtgggcgatggctgcaacggtggaggggccagagctggaggcagctgctgccgcaggagatgcttcagaggattcggacgcagggtccagggcgctgcctttcctgggcggcaaccggctgagcttggacctgtaccccgggggctgccagcagctgctgcacctgtgtgtccagcagcctctgcagctgctgcaggtggaattcttgcgtctgagcactcacgaggaccctcagctgctggaggccaccctggcccagctgcctcagagcctgtcctgcctccgctccctggtcctcaaaggtgagttccacctgttctgggccctgtctccatctctcgctctgccctgcctctgctgcatgttctcaaaggcaaaccccagtcccagccccagctccaggccgcccctcccggctccccaggtgtgaactgttctgctcttggtcctgtccagccccatcgccatcctcggtgatcaccacccccagtgtggggctggctgggccctggctcctggaccctgacgctgcccagtgggggtctctccagaccacagtgcagatgttgttcctggggaaggttgtgggtgatggttgtcagctgagatgagccggtggtctccacccctgcctccttccatttgcgggcacctctccagtgtttctgtctgtctgtccctgtctggctggggtgggggtggggtgggaggtctgtgcctctcgagcagctgtttctctggctggcagggtcgatctgggacctcggaccctggctctgagggccacatccgcctccccccttcccaggagggcaacgccgggacacactgggtgcctgtctccggggtgccctgaccaacctgcccgctggtctgagtggcctggcccatctggcccacctggacctgagcttcaacagcctggagacactgccggcctgtgtcctgcagatgcgaggtctgggtgcgctcttgctgtctcacaactgcctctctgagctgcctgaggctctgggggccctccccgccctcaccttcctcacagtgacacacaaccgcctgcagacgctgcccccagcactgggggccctatccaccctgcagcgcctcgatctctctcagaatctgctggacacgctacctcctgagattggaggcctgggcagcctcctggagctcaacctggcctccaaccggctgcagagcctcccagcctctctgggtgagtagcccctgcgccccgacacactggccccacgggagggtccctgaagcctgcctgtcttctgcaggggcctctgcacccacaggcttggtccacagctgcctcttggttgtccctccacctccctggcctttgagactccctcagtggctttgtcagagttctctgagcccagctgtggaggagagtctgaaacagctgctctgggaggcggcagcaggagtgtcccagcgccgtgggctgggctggtgccaagcctaagccagcaactgcccgcagcgggacttcggtccttgcggctccttgtcctgcacagcaacctcctggcctctgtgccagctgacttggcccgccttccactcctcacccggctcgacctgagggacaaccagctccgggacctgccccctgagctgctagacgccccctttgtgcgcctgcaggggaaccccctgggtgaggcctcgccagacgccccgagttcaccagtggcagccctcattccagaaatgcccagactgttcctgacctcagatttggacagctttcctgtgacccctcaaggctgctcagtgaccctggcctgtggcgtccgcctgcagttcccagcgggagccaccgccacccccatcaccatccgctatcggctgctgctgccggagccaggcctcgtccccctgggtcctcatgacgccctgctcagccatgtgctggagctgcagccccatggggtggccttccagcaggatgtggggctgtggctgctcttcaccccaccgcaggcccggcgctgccgtgaagtggtggtcaggacccggaatgacaacagctggggtgacctggagacctacctggaggaagaggcaccccaggtgagggccacccaggcctgccggtggcgagtggagagctgctgccctgagccgtgcacctctgcccagagcctcaccctggcaccttccaccctgccccgtccctcctggatcctgcttccctatgtccctggcaccttccaccccaccccgtccctcctggatcctgcttccctgtgtccctggcaacttccaccccaccccgtccctcctggatcctgctccctgtgtccctggcaccttccaccccgccccgtctctcctggatcctgctccctgtgtccctgactggctgtgccctgacccaggctcctgtgacctcctctctcccccatcccagcggctctgggctcactgccaggtgccccacttctcctggttccttgtggtttcccgccctgtgtccaatgcctgcctggtgccaccggaggggacactgctgtgctcctcgggtcatcctggggtcaaagtcatcttcccccctggggccactgaggagcctcgtcgagtctccatgcaggtggtgcgcatggctggccgagagctgcaggccctcctgggagaaccagaggctgcagtgagccccctgctgtgcctgtcacagagcggtccccccagcttcctccaaccggtcaccgtgcagctgcctctgccctctggcatcacaggcctcagtctggaccgctcccgcctgcacctgttgtactgggcccctcctgcagccacctgggatgacatcacagctcaggtggtcctggagctcacccacctgtacgcacgcttccaggtcacacacttctcctggtcagtgccccccagctttctcagcccccctcccccagtctgtacagccctcctcacccccagctctcccaggtactggctctggtacaccaccaagaactgtgtgggaggcctggctcggaaggcctgggagcggctgcggctgcaccgtgtgaacctcatcgctctgcagcggcgccgggaccctgagcaggtcctgctgcagtgcctgccccgaaacaaggtggacgccacccttcggcggctgctggagcggtaccggggccccgagccctctgacacggtggagatgttcgagggcgaagagttctttgcggccttcgagcgcggcatcgacgtggatgctgaccgccctgactgtgtggagggcagaatctgctttgtcttctactcgcacctgaagaatgtgaaggaggtgtccttctaccgtggcgcggtgcctgtgcgggtgcccgaggaggctgaggctgcccggcagaggaagggcgcagacgccctgtggatggccactctgcccatcaagctgccggtgggactgagggacagcagaggggcggggcaggaccgaggcccaggggtgaccagggtgacatggtggagttgggggtggagcccagggcttaatgcactttttccttccaacagagacttcgagggtccgaggggccacggcggggggctggcctctccttggcacccttgaatctgggagatgccgagaccggctttctgacgcagagcaacctgctgagtgtggctgggcgtctgggtctggactggccagccgtggccctgcacctgggggtgtcctaccgggaggtgcagcgcatccggcacgagttccggtgaggctcccactgcccgctggctgccagccccagggctgagccctggctgcctggagggcccacctgattctgacagaagtttcttccaggggaggtgggggaagggcaaacaccaggctggaaaggaaaggtctggccgcacctggccccaggagccgggaactcccccacactccgaggcagagtgtggtggggggtcctgggcaggtggacaggacccctctgtcgcccatcctctgcctgcagggatgatctggatgagcagatccgtcacatgctcttctcctgggctgagcgccaggctgggcagccaggggctgtggggctcctggtgcaggccctggagcagagtgaccggcaggacgtggctgaagaggtgcgcgcagtcttggagctcggccgccgcaagtaccaggacagcatccgacgcatgggcttggcccccaaggaccccgctctgcctggctcctcggctccacagcccccagagcctgcccaggcctaggccccacagacttttaggctggcccagatattccccagtggatgggcagagcccccaccttcaagtctctccagtgtgtggggacgggtccctgtgagcaacaaaactgcactgtttctttcacctcagagcttgatttatttgttggatg

SEQ ID NO: 8589 - protein, 460 aa, Homo sapiens
MSLAPSTPPRPSWILLPCVPGNFHPTPSLLDPAPCVPGTFHPAPSLLDPAPCVPDWLCPDPGSCDLLSPPSQRLWAHCQVPHFSWFLVVSRPVSNACLVPPEGTLLCSSGHPGVKVIFPPGATEEPRRVSMQVVRMAGRELQALLGEPEAAVSPLLCLSQSGPPSFLQPVTVQLPLPSGITGLSLDRSRLHLLYWAPPAATWDDITAQVVLELTHLYARFQVTHFSWSVPPSFLSPPPPVCTALLTPSSPRYWLWYTTKNCVGGLARKAWERLRLHRVNLIALQRRRDPEQVLLQCLPRNKVDATLRRLLERYRGPEPSDTVEMFEGEEFFAAFERGIDVDADRPDCVEGRICFVFYSHLKNVKEVSFYRGAVPVRVPEEAEAARQRKGADALWMATLPIKLPVGLRDSRGAGQDRGPGVTRVTWWSWGWSPGLNALFPSNRDFEGPRGHGGGLASPWHP

SEQ ID NO: 8590 - DNA, 3207 bp, Homo sapiens
ctcctgcgagccatggcggtcccattccccaaccctctttccagtggtgacccaggcctccggggttcagggtgaccacaaggtctcccccactctgcagcccaggcccagatggcctggctctagagctccccactccatccagagtccctgtttccccaaagagaagggcccaccccggctcccgctcactcctcctcctgcctctgcagcttccccgggcgctgcctggacaggcctgcctgcgtgctgggacatgtctggcctccaaggaccgtcggtgggcgatggctgcaacggtggaggggccagagctggaggcagctgctgccgcaggagatgcttcagaggattcggacgcagggtccagggcgctgcctttcctgggcggcaaccggctgagcttggacctgtaccccgggggctgccagcagctgctgcacctgtgtgtccagcagcctctgcagctgctgcaggtggaattcttgcgtctgagcactcacgaggaccctcagctgctggaggccaccctggcccagctgcctcagagcctgtcctgcctccgctccctggtcctcaaagggtcgatctgggacctcggaccctggctctgagggccacatccgcctccccccttcccaggagggcaacgccgggacacactgggtgcctgtctccggggtgccctgaccaacctgcccgctggtctgagtggcctggcccatctggcccacctggacctgagcttcaacagcctggagacactgccggcctgtgtcctgcagatgcgaggtctgggtgcgctcttgctgtctcacaactgcctctctgagctgcctgaggctctgggggccctccccgccctcaccttcctcacagtgacacacaaccgcctgcagacgctgcccccagcactgggggccctatccaccctgcagcgcctcgatctctctcagaatctgctggacacgctacctcctgagattggaggcctgggcagcctcctggagctcaacctggcctccaaccggctgcagagcctcccagcctctctggcgggacttcggtccttgcggctccttgtcctgcacagcaacctcctggcctctgtgccagctgacttggcccgccttccactcctcacccggctcgacctgagggacaaccagctccgggacctgccccctgagctgctagacgccccctttgtgcgcctgcaggggaaccccctgggtgaggcctcgccagacgccccgagttcaccagtggcagccctcattccagaaatgcccagactgttcctgacctcagatttggacagctttcctgtgacccctcaaggctgctcagtgaccctggcctgtggcgtccgcctgcagttcccagcgggagccaccgccacccccatcaccatccgctatcggctgctgctgccggagccaggcctcgtccccctgggtcctcatgacgccctgctcagccatgtgctggagctgcagccccatggggtggccttccagcaggatgtggggctgtggctgctcttcaccccaccgcaggcccggcgctgccgtgaagtggtggtcaggacccggaatgacaacagctggggtgacctggagacctacctggaggaagaggcaccccagcggctctgggctcactgccaggtgccccacttctcctggttccttgtggtttcccgccctgtgtccaatgcctgcctggtgccaccggaggggacactgctgtgctcctcgggtcatcctggggtcaaagtcatcttcccccctggggccactgaggagcctcgtcgagtctccatgcaggtggtgcgcatggctggccgagagctgcaggccctcctgggagaaccagaggctgcagtgagccccctgctgtgcctgtcacagagcggtccccccagcttcctccaaccggtcaccgtgcagctgcctctgccctctggcatcacaggcctcagtctggaccgctcccgcctgcacctgttgtactgggcccctcctgcagccacctgggatgacatcacagctcaggtggtcctggagctcacccacctgtacgcacgcttccaggtcacacacttctcctggtactggctctggtacaccaccaagaactgtgtgggaggcctggctcggaaggcctgggagcggctgcggctgcaccgtgtgaacctcatcgctctgcagcggcgccgggaccctgagcaggtcctgctgcagtgcctgccccgaaacaaggtggacgccacccttcggcggctgctggagcggtaccggggccccgagccctctgacacggtggagatgttcgagggcgaagagttctttgcggccttcgagcgcggcatcgacgtggatgctgaccgccctgactgtgtggagggcagaatctgctttgtcttctactcgcacctgaagaatgtgaaggaggtatacgtgaccaccactctggaccgggaggctcaggctgtgcggggccaggtgtccttctaccgtggcgcggtgcctgtgcgggtgcccgaggaggctgaggctgcccggcagaggaagggcgcagacgccctgtggatggccactctgcccatcaagctgccgagacttcgagggtccgaggggccacggcggggggctggcctctccttggcacccttgaatctgggagatgccgagaccggctttctgacgcagagcaacctgctgagtgtggctgggcgtctgggtctggactggccagccgtggccctgcacctgggggtgtcctaccgggaggtgcagcgcatccggcacgagttccgggatgatctggatgagcagatccgtcacatgctcttctcctgggctgagcgccaggctgggcagccaggggctgtggggctcctggtgcaggccctggagcagagtgaccggcaggacgtggctgaagaggtgcgcgcagtcttggagctcggccgccgcaagtaccaggacagcatccgacgcatgggcttggcccccaaggaccccgctctgcctggctcctcggctccacagcccccagagcctgcccaggcctaggccccacagacttttaggctggcccagatattccccagtggatgggcagagcccccaccttcaagtctctccagtgtgtggggacgggtccctgtgagcaacaaaactgcactgtttctttcacctc

SEQ ID NO: 8591 - protein, 764 aa, Homo sapiens
MRGLGALLLSHNCLSELPEALGALPALTFLTVTHNRLQTLPPALGALSTLQRLDLSQNLLDTLPPEIGGLGSLLELNLASNRLQSLPASLAGLRSLRLLVLHSNLLASVPADLARLPLLTRLDLRDNQLRDLPPELLDAPFVRLQGNPLGEASPDAPSSPVAALIPEMPRLFLTSDLDSFPVTPQGCSVTLACGVRLQFPAGATATPITIRYRLLLPEPGLVPLGPHDALLSHVLELQPHGVAFQQDVGLWLLFTPPQARRCREVVVRTRNDNSWGDLETYLEEEAPQRLWAHCQVPHFSWFLVVSRPVSNACLVPPEGTLLCSSGHPGVKVIFPPGATEEPRRVSMQVVRMAGRELQALLGEPEAAVSPLLCLSQSGPPSFLQPVTVQLPLPSGITGLSLDRSRLHLLYWAPPAATWDDITAQVVLELTHLYARFQVTHFSWYWLWYTTKNCVGGLARKAWERLRLHRVNLIALQRRRDPEQVLLQCLPRNKVDATLRRLLERYRGPEPSDTVEMFEGEEFFAAFERGIDVDADRPDCVEGRICFVFYSHLKNVKEVYVTTTLDREAQAVRGQVSFYRGAVPVRVPEEAEAARQRKGADALWMATLPIKLPRLRGSEGPRRGAGLSLAPLNLGDAETGFLTQSNLLSVAGRLGLDWPAVALHLGVSYREVQRIRHEFRDDLDEQIRHMLFSWAERQAGQPGAVGLLVQALEQSDRQDVAEEVRAVLELGRRKYQDSIRRMGLAPKDPALPGSSAPQPPEPAQA

SEQ ID NO: 8592 - DNA, 3917 bp, Homo sapiens
ccccgacgcccgggggatcccgagcctgcctcggggctggggcccgccccccacgccgtctgagcggtgcgcggtgcaccaccctccccagtggaccgaactggaaaggccgggagaggtttcctccggggctcacgaattggggtcccggccccaggaccccgaagctgcccaatggctcacgccccaggccctcacccttacacggccttccctgactttcggggcgcagtcacccccgcggtaggggagggtcacggccttcctggtaaaacggatgtaaatagaagggggactcatctccaggactggggaacagcccctatgacctcgcagctccacggctccattggccagatttccaggaccaggactgaagcctcactaccccggctttgctgctcatagcgaggtctccctgcccggtgctcctgcgagccatggcggtcccattccccaaccctctttccagtggtgacccaggcctccggggttcagggtgaccacaaggtctcccccactctgcagcccaggcccagatggcctggctctagagctccccactccatccagagtccctgtttccccaaagagaagggcccaccccggctcccgctcactcctcctcctgcctctgcagcttccccgggcgctgcctggacaggcctgcctgcgtgctgggacatgtctggcctccaaggaccgtcggtgggcgatggctgcaacggtggaggggccagagctggaggcagctgctgccgcaggagatgcttcagaggattcggacgcagggtccagggcgctgcctttcctgggcggcaaccggctgagcttggacctgtaccccgggggctgccagcagctgctgcacctgtgtgtccagcagcctctgcagctgctgcaggtggaattcttgcgtctgagcactcacgaggaccctcagctgctggaggccaccctggcccagctgcctcagagcctgtcctgcctccgctccctggtcctcaaagggtcgatctgggacctcggaccctggctctgagggccacatccgcctccccccttcccaggagggcaacgccgggacacactgggtgcctgtctccggggtgccctgaccaacctgcccgctggtctgagtggcctggcccatctggcccacctggacctgagcttcaacagcctggagacactgccggcctgtgtcctgcagatgcgaggtctgggtgcgctcttgctgtctcacaactgcctctctgagctgcctgaggctctgggggccctccccgccctcaccttcctcacagtgacacacaaccgcctgcagacgctgcccccagcactgggggccctatccaccctgcagcgcctcgatctctctcagaatctgctggacacgctacctcctgagattggaggcctgggcagcctcctggagctcaacctggcctccaaccggctgcagagcctcccagcctctctgggtgagtagcccctgcgccccgacacactggccccacgggagggtccctgaagcctgcctgtcttctgcaggggcctctgcacccacaggcttggtccacagctgcctcttggttgtccctccacctccctggcctttgagactccctcagtggctttgtcagagttctctgagcccagctgtggaggagagtctgaaacagctgctctgggaggcggcagcaggagtgtcccagcgccgtgggctgggctggtgccaagcctaagccagcaactgcccgcagcgggacttcggtccttgcggctccttgtcctgcacagcaacctcctggcctctgtgccagctgacttggcccgccttccactcctcacccggctcgacctgagggacaaccagctccgggacctgccccctgagctgctagacgccccctttgtgcgcctgcaggggaaccccctgggtgaggcctcgccagacgccccgagttcaccagtggcagccctcattccagaaatgcccagactgttcctgacctcagatttggacagctttcctgtgacccctcaaggctgctcagtgaccctggcctgtggcgtccgcctgcagttcccagcgggagccaccgccacccccatcaccatccgctatcggctgctgctgccggagccaggcctcgtccccctgggtcctcatgacgccctgctcagccatgtgctggagctgcagccccatggggtggccttccagcaggatgtggggctgtggctgctcttcaccccaccgcaggcccggcgctgccgtgaagtggtggtcaggacccggaatgacaacagctggggtgacctggagacctacctggaggaagaggcaccccagcggctctgggctcactgccaggtgccccacttctcctggttccttgtggtttcccgccctgtgtccaatgcctgcctggtgccaccggaggggacactgctgtgctcctcgggtcatcctggggtcaaagtcatcttcccccctggggccactgaggagcctcgtcgagtctccatgcaggtggtgcgcatggctggccgagagctgcaggccctcctgggagaaccagaggctgcagtgagccccctgctgtgcctgtcacagagcggtccccccagcttcctccaaccggtcaccgtgcagctgcctctgccctctggcatcacaggcctcagtctggaccgctcccgcctgcacctgttgtactgggcccctcctgcagccacctgggatgacatcacagctcaggtggtcctggagctcacccacctgtacgcacgcttccaggtcacacacttctcctggtactggctctggtacaccaccaagaactgtgtgggaggcctggctcggaaggcctgggagcggctgcggctgcaccgtgtgaacctcatcgctctgcagcggcgccgggaccctgagcaggtcctgctgcagtgcctgccccgaaacaaggtggacgccacccttcggcggctgctggagcggtaccggggccccgagccctctgacacggtggagatgttcgagggcgaagagttctttgcggccttcgagcgcggcatcgacgtggatgctgaccgccctgactgtgtggagggcagaatctgctttgtcttctactcgcacctgaagaatgtgaaggaggtatacgtgaccaccactctggaccgggaggctcaggctgtgcggggccaggtgtccttctaccgtggcgcggtgcctgtgcgggtgcccgaggaggctgaggctgcccggcagaggaagggcgcagacgccctgtggatggccactctgcccatcaagctgccgagacttcgagggtccgaggggccacggcggggggctggcctctccttggcacccttgaatctgggagatgccgagaccggctttctgacgcagagcaacctgctgagtgtggctgggcgtctgggtctggactggccagccgtggccctgcacctgggggtgtcctaccgggaggtgcagcgcatccggcacgagttccgggatgatctggatgagcagatccgtcacatgctcttctcctgggctgagcgccaggctgggcagccaggggctgtggggctcctggtgcaggccctggagcagagtgaccggcaggacgtggctgaagaggtgcgcgcagtcttggagctcggccgccgcaagtaccaggacagcatccgacgcatgggcttggcccccaaggaccccgctctgcctggctcctcggctccacagcccccagagcctgcccaggcctaggccccacagacttttaggctggcccagatattccccagtggatgggcagagcccccaccttcaagtctctccagtgtgtggggacgggtccctgtgagcaacaaaactgcactgtttctttcacctc

SEQ ID NO: 8593 - protein, 597 aa, Homo sapiens
MPRLFLTSDLDSFPVTPQGCSVTLACGVRLQFPAGATATPITIRYRLLLPEPGLVPLGPHDALLSHVLELQPHGVAFQQDVGLWLLFTPPQARRCREVVVRTRNDNSWGDLETYLEEEAPQRLWAHCQVPHFSWFLVVSRPVSNACLVPPEGTLLCSSGHPGVKVIFPPGATEEPRRVSMQVVRMAGRELQALLGEPEAAVSPLLCLSQSGPPSFLQPVTVQLPLPSGITGLSLDRSRLHLLYWAPPAATWDDITAQVVLELTHLYARFQVTHFSWYWLWYTTKNCVGGLARKAWERLRLHRVNLIALQRRRDPEQVLLQCLPRNKVDATLRRLLERYRGPEPSDTVEMFEGEEFFAAFERGIDVDADRPDCVEGRICFVFYSHLKNVKEVYVTTTLDREAQAVRGQVSFYRGAVPVRVPEEAEAARQRKGADALWMATLPIKLPRLRGSEGPRRGAGLSLAPLNLGDAETGFLTQSNLLSVAGRLGLDWPAVALHLGVSYREVQRIRHEFRDDLDEQIRHMLFSWAERQAGQPGAVGLLVQALEQSDRQDVAEEVRAVLELGRRKYQDSIRRMGLAPKDPALPGSSAPQPPEPAQA

SEQ ID NO: 8594 - DNA, 2944 bp, Homo sapiens
ggatcccaggcgccgagcgcccgctgagcagccaccctttgcgcgccgcctgcagcgcagcttccccgggcgctgcctggacaggcctgcctgcgtgctgggacatgtctggcctccaaggaccgtcggtgggcgatggctgcaacggtggaggggccagagctggaggcagctgctgccgcaggagatgcttcagaggattcggacgcagggtccagggcgctgcctttcctgggcggcaaccggctgagcttggacctgtaccccgggggctgccagcagctgctgcacctgtgtgtccagcagcctctgcagctgctgcaggtggaattcttgcgtctgagcactcacgaggaccctcagctgctggaggccaccctggcccagctgcctcagagcctgtcctgcctccgctccctggtcctcaaaggagggcaacgccgggacacactgggtgcctgtctccggggtgccctgaccaacctgcccgctggtctgagtggcctggcccatctggcccacctggacctgagcttcaacagcctggagacactgccggcctgtgtcctgcagatgcgaggtctgggtgcgctcttgctgtctcacaactgcctctctgagctgcctgaggctctgggggccctccccgccctcaccttcctcacagtgacacacaaccgcctgcagacgctgcccccagcactgggggccctatccaccctgcagcgcctcgatctctctcagaatctgctggacacgctacctcctgagattggaggcctgggcagcctcctggagctcaacctggcctccaaccggctgcagagcctcccagcctctctggcgggacttcggtccttgcggctccttgtcctgcacagcaacctcctggcctctgtgccagctgacttggcccgccttccactcctcacccggctcgacctgagggacaaccagctccgggacctgccccctgagctgctagacgccccctttgtgcgcctgcaggggaaccccctgggtgaggcctcgccagacgccccgagttcaccagtggcagccctcattccagaaatgcccagactgttcctgacctcagatttggacagctttcctgtgacccctcaaggctgctcagtgaccctggcctgtggcgtccgcctgcagttcccagcgggagccaccgccacccccatcaccatccgctatcggctgctgctgccggagccaggcctcgtccccctgggtcctcatgacgccctgctcagccatgtgctggagctgcagccccatggggtggccttccagcaggatgtggggctgtggctgctcttcaccccaccgcaggcccggcgctgccgtgaagtggtggtcaggacccggaatgacaacagctggggtgacctggagacctacctggaggaagaggcaccccagcggctctgggctcactgccaggtgccccacttctcctggttccttgtggtttcccgccctgtgtccaatgcctgcctggtgccaccggaggggacactgctgtgctcctcgggtcatcctggggtcaaagtcatcttcccccctggggccactgaggagcctcgtcgagtctccatgcaggtggtgcgcatggctggccgagagctgcaggccctcctgggagaaccagaggctgcagtgagccccctgctgtgcctgtcacagagcggtccccccagcttcctccaaccggtcaccgtgcagctgcctctgccctctggcatcacaggcctcagtctggaccgctcccgcctgcacctgttgtactgggcccctcctgcagccacctgggatgacatcacagctcaggtggtcctggagctcacccacctgtacgcacgcttccaggtcacacacttctcctggtactggctctggtacaccaccaagaactgtgtgggaggcctggctcggaaggcctgggagcggctgcggctgcaccgtgtgaacctcatcgctctgcagcggcgccgggaccctgagcaggtcctgctgcagtgcctgccccgaaacaaggtggacgccacccttcggcggctgctggagcggtaccggggccccgagccctctgacacggtggagatgttcgagggcgaagagttctttgcggccttcgagcgcggcatcgacgtggatgctgaccgccctgactgtgtggagggcagaatctgctttgtcttctactcgcacctgaagaatgtgaaggaggtgtccttctaccgtggcgcggtgcctgtgcgggtgcccgaggaggctgaggctgcccggcagaggaagggcgcagacgccctgtggatggccactctgcccatcaagctgccgagacttcgagggtccgaggggccacggcggggggctggcctctccttggcacccttgaatctgggagatgccgagaccggctttctgacgcagagcaacctgctgagtgtggctgggcgtctgggtctggactggccagccgtggccctgcacctgggggtgtcctaccgggaggtgcagcgcatccggcacgagttccgggatgatctggatgagcagatccgtcacatgctcttctcctgggctgagcgccaggctgggcagccaggggctgtggggctcctggtgcaggccctggagcagagtgaccggcaggacgtggctgaagaggtgcgcgcagtcttggagctcggccgccgcaagtaccaggacagcatccgacgcatgggcttggcccccaaggaccccgctctgcctggctcctcggctccacagcccccagagcctgcccaggcctaggccccacagacttttaggctggcccagatattccccagtggatgggcagagcccccaccttcaagtctctccagtgtgtggggacgggtccctgtgagcaacaaaactgcactgtttctttcacctc

SEQ ID NO: 8595 - protein, 893 aa, Homo sapiens; identical to SEQ ID NO: 1229

SEQ ID NO: 8596 - DNA, 3002 bp, Homo sapiens
gccggcgggatcccaggcgccgagcgcccgctgagcagccaccctttgcgcgccgcctgcagcgcagcttccccgggcgctgcctggacaggcctgcctgcgtgctgggacatgtctggcctccaaggaccgtcggtgggcgatggctgcaacggtggaggggccagagctggaggcagctgctgccgcaggagatgcttcagaggattcggacgcagggtccagggcgctgcctttcctgggcggcaaccggctgagcttggacctgtaccccgggggctgccagcagctgctgcacctgtgtgtccagcagcctctgcagctgctgcaggtggaattcttgcgtctgagcactcacgaggaccctcagctgctggaggccaccctggcccagctgcctcagagcctgtcctgcctccgctccctggtcctcaaaggagggcaacgccgggacacactgggtgcctgtctccggggtgccctgaccaacctgcccgctggtctgagtggcctggcccatctggcccacctggacctgagcttcaacagcctggagacactgccggcctgtgtcctgcagatgcgaggtctgggtgcgctcttgctgtctcacaactgcctctctgagctgcctgaggctctgggggccctccccgccctcaccttcctcacagtgacacacaaccgcctgcagacgctgcccccagcactgggggccctatccaccctgcagcgcctcgatctctctcagaatctgctggacacgctacctcctgagattggaggcctgggcagcctcctggagctcaacctggcctccaaccggctgcagagcctcccagcctctctggcgggacttcggtccttgcggctccttgtcctgcacagcaacctcctggcctctgtgccagctgacttggcccgccttccactcctcacccggctcgacctgagggacaaccagctccgggacctgccccctgagctgctagacgccccctttgtgcgcctgcaggggaaccccctgggtgaggcctcgccagacgccccgagttcaccagtggcagccctcattccagaaatgcccagactgttcctgacctcagatttggacagctttcctgtgacccctcaaggctgctcagtgaccctggcctgtggcgtccgcctgcagttcccagcgggagccaccgccacccccatcaccatccgctatcggctgctgctgccggagccaggcctcgtccccctgggtcctcatgacgccctgctcagccatgtgctggagctgcagccccatggggtggccttccagcaggatgtggggctgtggctgctcttcaccccaccgcaggcccggcgctgccgtgaagtggtggtcaggacccggaatgacaacagctggggtgacctggagacctacctggaggaagaggcaccccagcggctctgggctcactgccaggtgccccacttctcctggttccttgtggtttcccgccctgtgtccaatgcctgcctggtgccaccggaggggacactgctgtgctcctcgggtcatcctggggtcaaagtcatcttcccccctggggccactgaggagcctcgtcgagtctccatgcaggtggtgcgcatggctggccgagagctgcaggccctcctgggagaaccagaggctgcagtgagccccctgctgtgcctgtcacagagcggtccccccagcttcctccaaccggtcaccgtgcagctgcctctgccctctggcatcacaggcctcagtctggaccgctcccgcctgcacctgttgtactgggcccctcctgcagccacctgggatgacatcacagctcaggtggtcctggagctcacccacctgtacgcacgcttccaggtcacacacttctcctggtactggctctggtacaccaccaagaactgtgtgggaggcctggctcggaaggcctgggagcggctgcggctgcaccgtgtgaacctcatcgctctgcagcggcgccgggaccctgagcaggtcctgctgcagtgcctgccccgaaacaaggtggacgccacccttcggcggctgctggagcggtaccggggccccgagccctctgacacggtggagatgttcgagggcgaagagttctttgcggccttcgagcgcggcatcgacgtggatgctgaccgccctgactgtgtggagggcagaatctgctttgtcttctactcgcacctgaagaatgtgaaggaggtatacgtgaccaccactctggaccgggaggctcaggctgtgcggggccaggtgtccttctaccgtggcgcggtgcctgtgcgggtgcccgaggaggctgaggctgcccggcagaggaagggcgcagacgccctgtggatggccactctgcccatcaagctgccgagacttcgagggtccgaggggccacggcggggggctggcctctccttggcacccttgaatctgggagatgccgagaccggctttctgacgcagagcaacctgctgagtgtggctgggcgtctgggtctggactggccagccgtggccctgcacctgggggtgtcctaccgggaggtgcagcgcatccggcacgagttccgggatgatctggatgagcagatccgtcacatgctcttctcctgggctgagcgccaggctgggcagccaggggctgtggggctcctggtgcaggccctggagcagagtgaccggcaggacgtggctgaagaggtgcgcgcagtcttggagctcggccgccgcaagtaccaggacagcatccgacgcatgggcttggcccccaaggaccccgctctgcctggctcctcggctccacagcccccagagcctgcccaggcctaggccccacagacttttaggctggcccagatattccccagtggatgggcagagcccccaccttcaagtctctccagtgtgtggggacgggtccctgtgagcaacaaaactgcactgtttctttcacctc

SEQ ID NO: 8597 - protein, 910 aa, Homo sapiens; identical to SEQ ID NO: 1227

SEQ ID NO: 8598 - DNA, 3067 bp, Homo sapiens
aacgcgccggcgggatcccaggcgccgagcgcccgctgagcagccaccctttgcgcgccgcctgcagcgcagcttccccgggcgctgcctggacaggcctgcctgcgtgctgggacatgtctggcctccaaggaccgtcggtgggcgatggctgcaacggtggaggggccagagctggaggcagctgctgccgcaggagatgcttcagaggattcggacgcagggtccagggcgctgcctttcctgggcggcaaccggctgagcttggacctgtaccccgggggctgccagcagctgctgcacctgtgtgtccagcagcctctgcagctgctgcaggtggaattcttgcgtctgagcactcacgaggaccctcagctgctggaggccaccctggcccagctgcctcagagcctgtcctgcctccgctccctggtcctcaaagggtcgatctgggacctcggaccctggctctgagggccacatccgcctccccccttcccaggagggcaacgccgggacacactgggtgcctgtctccggggtgccctgaccaacctgcccgctggtctgagtggcctggcccatctggcccacctggacctgagcttcaacagcctggagacactgccggcctgtgtcctgcagatgcgaggtctgggtgcgctcttgctgtctcacaactgcctctctgagctgcctgaggctctgggggccctccccgccctcaccttcctcacagtgacacacaaccgcctgcagacgctgcccccagcactgggggccctatccaccctgcagcgcctcgatctctctcagaatctgctggacacgctacctcctgagattggaggcctgggcagcctcctggagctcaacctggcctccaaccggctgcagagcctcccagcctctctggcgggacttcggtccttgcggctccttgtcctgcacagcaacctcctggcctctgtgccagctgacttggcccgccttccactcctcacccggctcgacctgagggacaaccagctccgggacctgccccctgagctgctagacgccccctttgtgcgcctgcaggggaaccccctgggtgaggcctcgccagacgccccgagttcaccagtggcagccctcattccagaaatgcccagactgttcctgacctcagatttggacagctttcctgtgacccctcaaggctgctcagtgaccctggcctgtggcgtccgcctgcagttcccagcgggagccaccgccacccccatcaccatccgctatcggctgctgctgccggagccaggcctcgtccccctgggtcctcatgacgccctgctcagccatgtgctggagctgcagccccatggggtggccttccagcaggatgtggggctgtggctgctcttcaccccaccgcaggcccggcgctgccgtgaagtggtggtcaggacccggaatgacaacagctggggtgacctggagacctacctggaggaagaggcaccccagcggctctgggctcactgccaggtgccccacttctcctggttccttgtggtttcccgccctgtgtccaatgcctgcctggtgccaccggaggggacactgctgtgctcctcgggtcatcctggggtcaaagtcatcttcccccctggggccactgaggagcctcgtcgagtctccatgcaggtggtgcgcatggctggccgagagctgcaggccctcctgggagaaccagaggctgcagtgagccccctgctgtgcctgtcacagagcggtccccccagcttcctccaaccggtcaccgtgcagctgcctctgccctctggcatcacaggcctcagtctggaccgctcccgcctgcacctgttgtactgggcccctcctgcagccacctgggatgacatcacagctcaggtggtcctggagctcacccacctgtacgcacgcttccaggtcacacacttctcctggtactggctctggtacaccaccaagaactgtgtgggaggcctggctcggaaggcctgggagcggctgcggctgcaccgtgtgaacctcatcgctctgcagcggcgccgggaccctgagcaggtcctgctgcagtgcctgccccgaaacaaggtggacgccacccttcggcggctgctggagcggtaccggggccccgagccctctgacacggtggagatgttcgagggcgaagagttctttgcggccttcgagcgcggcatcgacgtggatgctgaccgccctgactgtgtggagggcagaatctgctttgtcttctactcgcacctgaagaatgtgaaggaggtatacgtgaccaccactctggaccgggaggctcaggctgtgcggggccaggtgtccttctaccgtggcgcggtgcctgtgcgggtgcccgaggaggctgaggctgcccggcagaggaagggcgcagacgccctgtggatggccactctgcccatcaagctgccgagacttcgagggtccgaggggccacggcggggggctggcctctccttggcacccttgaatctgggagatgccgagaccggctttctgacgcagagcaacctgctgagtgtggctgggcgtctgggtctggactggccagccgtggccctgcacctgggggtgtcctaccgggaggtgcagcgcatccggcacgagttccgggatgatctggatgagcagatccgtcacatgctcttctcctgggctgagcgccaggctgggcagccaggggctgtggggctcctggtgcaggccctggagcagagtgaccggcaggacgtggctgaagaggtgcgcgcagtcttggagctcggccgccgcaagtaccaggacagcatccgacgcatgggcttggcccccaaggaccccgctctgcctggctcctcggctccacagcccccagagcctgcccaggcctaggccccacagacttttaggctggcccagatattccccagtggatgggcagagcccccaccttcaagtctctccagtgtgtggggacgggtccctgtgagcaacaaaactgcactgtttctttcacctc

SEQ ID NO: 8599 - protein, 764 aa, Homo sapiens; identical to SEQ ID NO: 8591

SEQ ID NO: 8600 - DNA, 3013 bp, Homo sapiens
gcgccgcgggcctacccggaacggcgcgtgggcccgggcagaagctgctggcggtaggctcgccttgactccttggtggttccctggccgcggcgaccggtggtcccacgtccagccgggctcagtgagcttccccgggcgctgcctggacaggcctgcctgcgtgctgggacatgtctggcctccaaggaccgtcggtgggcgatggctgcaacggtggaggggccagagctggaggcagctgctgccgcaggagatgcttcagaggattcggacgcagggtccagggcgctgcctttcctgggcggcaaccggctgagcttggacctgtaccccgggggctgccagcagctgctgcacctgtgtgtccagcagcctctgcagctgctgcaggtggaattcttgcgtctgagcactcacgaggaccctcagctgctggaggccaccctggcccagctgcctcagagcctgtcctgcctccgctccctggtcctcaaaggagggcaacgccgggacacactgggtgcctgtctccggggtgccctgaccaacctgcccgctggtctgagtggcctggcccatctggcccacctggacctgagcttcaacagcctggagacactgccggcctgtgtcctgcagatgcgaggtctgggtgcgctcttgctgtctcacaactgcctctctgagctgcctgaggctctgggggccctccccgccctcaccttcctcacagtgacacacaaccgcctgcagacgctgcccccagcactgggggccctatccaccctgcagcgcctcgatctctctcagaatctgctggacacgctacctcctgagattggaggcctgggcagcctcctggagctcaacctggcctccaaccggctgcagagcctcccagcctctctggcgggacttcggtccttgcggctccttgtcctgcacagcaacctcctggcctctgtgccagctgacttggcccgccttccactcctcacccggctcgacctgagggacaaccagctccgggacctgccccctgagctgctagacgccccctttgtgcgcctgcaggggaaccccctgggtgaggcctcgccagacgccccgagttcaccagtggcagccctcattccagaaatgcccagactgttcctgacctcagatttggacagctttcctgtgacccctcaaggctgctcagtgaccctggcctgtggcgtccgcctgcagttcccagcgggagccaccgccacccccatcaccatccgctatcggctgctgctgccggagccaggcctcgtccccctgggtcctcatgacgccctgctcagccatgtgctggagctgcagccccatggggtggccttccagcaggatgtggggctgtggctgctcttcaccccaccgcaggcccggcgctgccgtgaagtggtggtcaggacccggaatgacaacagctggggtgacctggagacctacctggaggaagaggcaccccagcggctctgggctcactgccaggtgccccacttctcctggttccttgtggtttcccgccctgtgtccaatgcctgcctggtgccaccggaggggacactgctgtgctcctcgggtcatcctggggtcaaagtcatcttcccccctggggccactgaggagcctcgtcgagtctccatgcaggtggtgcgcatggctggccgagagctgcaggccctcctgggagaaccagaggctgcagtgagccccctgctgtgcctgtcacagagcggtccccccagcttcctccaaccggtcaccgtgcagctgcctctgccctctggcatcacaggcctcagtctggaccgctcccgcctgcacctgttgtactgggcccctcctgcagccacctgggatgacatcacagctcaggtggtcctggagctcacccacctgtacgcacgcttccaggtcacacacttctcctggtactggctctggtacaccaccaagaactgtgtgggaggcctggctcggaaggcctgggagcggctgcggctgcaccgtgtgaacctcatcgctctgcagcggcgccgggaccctgagcaggtcctgctgcagtgcctgccccgaaacaaggtggacgccacccttcggcggctgctggagcggtaccggggccccgagccctctgacacggtggagatgttcgagggcgaagagttctttgcggccttcgagcgcggcatcgacgtggatgctgaccgccctgactgtgtggagggcagaatctgctttgtcttctactcgcacctgaagaatgtgaaggaggtgtccttctaccgtggcgcggtgcctgtgcgggtgcccgaggaggctgaggctgcccggcagaggaagggcgcagacgccctgtggatggccactctgcccatcaagctgccgagacttcgagggtccgaggggccacggcggggggctggcctctccttggcacccttgaatctgggagatgccgagaccggctttctgacgcagagcaacctgctgagtgtggctgggcgtctgggtctggactggccagccgtggccctgcacctgggggtgtcctaccgggaggtgcagcgcatccggcacgagttccgggatgatctggatgagcagatccgtcacatgctcttctcctgggctgagcgccaggctgggcagccaggggctgtggggctcctggtgcaggccctggagcagagtgaccggcaggacgtggctgaagaggtgcgcgcagtcttggagctcggccgccgcaagtaccaggacagcatccgacgcatgggcttggcccccaaggaccccgctctgcctggctcctcggctccacagcccccagagcctgcccaggcctaggccccacagacttttaggctggcccagatattccccagtggatgggcagagcccccaccttcaagtctctccagtgtgtggggacgggtccctgtgagcaacaaaactgcactgtttctttcacctc

SEQ ID NO: 8601 - protein, 893 aa, Homo sapiens; identical to SEQ ID NO: 1229

SEQ ID NO: 8602 - DNA, 782 bp, Homo sapiens
cgggtgcccgaggaggctgaggctgcccggcagaggaagggcgcagacgccctgtggatggccactctgcccatcaagctgccggtgggactgagggacagcagaggggcggggcaggaccgaggcccaggggtgaccagggtgacatggtggagttgggggtggagcccagggcttaatgcactttttccttccaacagagacttcgagggtccgaggggccacggcggggggctggcctctccttggcacccttgaatctgggagatgccgagaccggctttctgacgcagagcaacctgctgagtgtggctgggcgtctgggtctggactggccagccgtggccctgcacctgggggtgtcctaccgggaggtgcagcgcatccggcacgagttccgggatgatctggatgagcagatccgtcacatgctcttctcctgggctgagcgccaggctgggcagccaggggctgtggggctcctggtgcaggccctggagcagagtgaccggcaggacgtggctgaagaggtgcgcgcagtcttggagctcggccgccgcaagtaccaggacagcatccgacgcatgggcttggcccccaaggaccccgctctgcctggctcctcggctccacagcccccagagcctgcccaggcctaggccccacagacttttaggctggcccagatattccccagtggatgggcagagcccccaccttcaagtctctccagtgtgtggggacgggtccctgtgagcaacaaaactgcactgtttctttca

SEQ ID NO: 8603 - protein, 75 aa, Homo sapiens [sequence omitted]

SEQ ID NO: 8604 - DNA, 4497 bp, Homo sapiens
ggcgccgagcgcccgctgagcagccaccctttgcgcgccgcctgcagcgcagcttccccgggcgctgcctggacaggcctgcctgcgtgctgggacatgtctggcctccaaggaccgtcggtgggcgatggctgcaacggtggaggggccagagctggaggcagctgctgccgcaggagatgcttcagaggattcggacgcagggtccagggcgctgcctttcctgggcggcaaccggctgagcttggacctgtaccccgggggctgccagcagctgctgcacctgtgtgtccagcagcctctgcagctgctgcaggtggaattcttgcgtctgagcactcacgaggaccctcagctgctggaggccaccctggcccagctgcctcagagcctgtcctgcctccgctccctggtcctcaaaggtgagttccacctgttctgggccctgtctccatctctcgctctgccctgcctctgctgcatgttctcaaaggcaaaccccagtcccagccccagctccaggccgcccctcccggctccccaggtgtgaactgttctgctcttggtcctgtccagccccatcgccatcctcggtgatcaccacccccagtgtggggctggctgggccctggctcctggaccctgacgctgcccagtgggggtctctccagaccacagtgcagatgttgttcctggggaaggttgtgggtgatggttgtcagctgagatgagccggtggtctccacccctgcctccttccatttgcgggcacctctccagtgtttctgtctgtctgtccctgtctggctggggtgggggtggggtgggaggtctgtgcctctcgagcagctgtttctctggctggcagggtcgatctgggacctcggaccctggctctgagggccacatccgcctccccccttcccaggagggcaacgccgggacacactgggtgcctgtctccggggtgccctgaccaacctgcccgctggtctgagtggcctggcccatctggcccacctggacctgagcttcaacagcctggagacactgccggcctgtgtcctgcagatgcgaggtctgggtgcgctcttgctgtctcacaactgcctctctgagctgcctgaggctctgggggccctccccgccctcaccttcctcacagtgacacacaaccgcctgcagacgctgcccccagcactgggggccctatccaccctgcagcgcctcgatctctctcagaatctgctggacacgctacctcctgagattggaggcctgggcagcctcctggagctcaacctggcctccaaccggctgcagagcctcccagcctctctgggtgagtagcccctgcgccccgacacactggccccacgggagggtccctgaagcctgcctgtcttctgcaggggcctctgcacccacaggcttggtccacagctgcctcttggttgtccctccacctccctggcctttgagactccctcagtggctttgtcagagttctctgagcccagctgtggaggagagtctgaaacagctgctctgggaggcggcagcaggagtgtcccagcgccgtgggctgggctggtgccaagcctaagccagcaactgcccgcagcgggacttcggtccttgcggctccttgtcctgcacagcaacctcctggcctctgtgccagctgacttggcccgccttccactcctcacccggctcgacctgagggacaaccagctccgggacctgccccctgagctgctagacgccccctttgtgcgcctgcaggggaaccccctgggtgaggcctcgccagacgccccgagttcaccagtggcagccctcattccagaaatgcccagactgttcctgacctcagatttggacagctttcctgtgacccctcaaggctgctcagtgaccctggcctgtggcgtccgcctgcagttcccagcgggagccaccgccacccccatcaccatccgctatcggctgctgctgccggagccaggcctcgtccccctgggtcctcatgacgccctgctcagccatgtgctggagctgcagccccatggggtggccttccagcaggatgtggggctgtggctgctcttcaccccaccgcaggcccggcgctgccgtgaagtggtggtcaggacccggaatgacaacagctggggtgacctggagacctacctggaggaagaggcaccccaggtgagggccacccaggcctgccggtggcgagtggagagctgctgccctgagccgtgcacctctgcccagagcctcaccctggcaccttccaccctgccccgtccctcctggatcctgcttccctatgtccctggcaccttccaccccaccccgtccctcctggatcctgcttccctgtgtccctggcaacttccaccccaccccgtccctcctggatcctgctccctgtgtccctggcaccttccaccccgccccgtctctcctggatcctgctccctgtgtccctgactggctgtgccctgacccaggctcctgtgacctcctctctcccccatcccagcggctctgggctcactgccaggtgccccacttctcctggttccttgtggtttcccgccctgtgtccaatgcctgcctggtgccaccggaggggacactgctgtgctcctcgggtcatcctggggtcaaagtcatcttcccccctggggccactgaggagcctcgtcgagtctccatgcaggtggtgcgcatggctggccgagagctgcaggccctcctgggagaaccagaggctgcagtgagccccctgctgtgcctgtcacagagcggtccccccagcttcctccaaccggtcaccgtgcagctgcctctgccctctggcatcacaggcctcagtctggaccgctcccgcctgcacctgttgtactgggcccctcctgcagccacctgggatgacatcacagctcaggtggtcctggagctcacccacctgtacgcacgcttccaggtcacacacttctcctggtcagtgccccccagctttctcagcccccctcccccagtctgtacagccctcctcacccccagctctcccaggtactggctctggtacaccaccaagaactgtgtgggaggcctggctcggaaggcctgggagcggctgcggctgcaccgtgtgaacctcatcgctctgcagcggcgccgggaccctgagcaggtcctgctgcagtgcctgccccgaaacaaggtggacgccacccttcggcggctgctggagcggtaccggggccccgagccctctgacacggtggagatgttcgagggcgaagagttctttgcggccttcgagcgcggcatcgacgtggatgctgaccgccctgactgtgtggagggcagaatctgctttgtcttctactcgcacctgaagaatgtgaaggaggtgtccttctaccgtggcgcggtgcctgtgcgggtgcccgaggaggctgaggctgcccggcagaggaagggcgcagacgccctgtggatggccactctgcccatcaagctgccggtgggactgagggacagcagaggggcggggcaggaccgaggcccaggggtgaccagggtgacatggtggagttgggggtggagcccagggcttaatgcactttttccttccaacagagacttcgagggtccgaggggccacggcggggggctggcctctccttggcacccttgaatctgggagatgccgagaccggctttctgacgcagagcaacctgctgagtgtggctgggcgtctgggtctggactggccagccgtggccctgcacctgggggtgtcctaccgggaggtgcagcgcatccggcacgagttccggtgaggctcccactgcccgctggctgccagccccagggctgagccctggctgcctggagggcccacctgattctgacagaagtttcttccaggggaggtgggggaagggcaaacaccaggctggaaaggaaaggtctggccgcacctggccccaggagccgggaactcccccacactccgaggcagagtgtggtggggggtcctgggcaggtggacaggacccctctgtcgcccatcctctgcctgcagggatgatctggatgagcagatccgtcacatgctcttctcctgggctgagcgccaggctgggcagccaggggctgtggggctcctggtgcaggccctggagcagagtgaccggcaggacgtggctgaagaggtgcgcgcagtcttggagctcggccgccgcaagtaccaggacagcatccgacgcatgggcttggcccccaaggaccccgctctgcctggctcctcggctccacagcccccagagcctgcccaggcctaggccccacagacttttaggctggcccagatattccccagtggatgggcagagcccccaccttcaagtctctccagtgtgtggggacgggtccctgtgagcaacaaaactgcactgtttctttca

SEQ ID NO: 8605 - protein, 460 aa, Homo sapiens; identical to SEQ ID NO: 8589

SEQ ID NO: 8606 - DNA, 3995 bp, Homo sapiens
aagctgctggcggtaggctcgccttgactccttggtggttccctggccgcggcgaccggtggtcccacgtccagccgggctcagtgagcttccccgggcgctgcctggacaggcctgcctgcgtgctgggacatgtctggcctccaaggaccgtcggtgggcgatggctgcaacggtggaggggccagagctggaggcagctgctgccgcaggagatgcttcagaggattcggacgcagggtccagggcgctgcctttcctgggcggcaaccggctgagcttggacctgtaccccgggggctgccagcagctgctgcacctgtgtgtccagcagcctctgcagctgctgcaggtggaattcttgcgtctgagcactcacgaggaccctcagctgctggaggccaccctggcccagctgcctcagagcctgtcctgcctccgctccctggtcctcaaaggtgagttccacctgttctgggccctgtctccatctctcgctctgccctgcctctgctgcatgttctcaaaggcaaaccccagtcccagccccagctccaggccgcccctcccggctccccaggtgtgaactgttctgctcttggtcctgtccagccccatcgccatcctcggtgatcaccacccccagtgtggggctggctgggccctggctcctggaccctgacgctgcccagtgggggtctctccagaccacagtgcagatgttgttcctggggaaggttgtgggtgatggttgtcagctgagatgagccggtggtctccacccctgcctccttccatttgcgggcacctctccagtgtttctgtctgtctgtccctgtctggctggggtgggggtggggtgggaggtctgtgcctctcgagcagctgtttctctggctggcagggtcgatctgggacctcggaccctggctctgagggccacatccgcctccccccttcccaggagggcaacgccgggacacactgggtgcctgtctccggggtgccctgaccaacctgcccgctggtctgagtggcctggcccatctggcccacctggacctgagcttcaacagcctggagacactgccggcctgtgtcctgcagatgcgaggtctgggtgcgctcttgctgtctcacaactgcctctctgagctgcctgaggctctgggggccctccccgccctcaccttcctcacagtgacacacaaccgcctgcagacgctgcccccagcactgggggccctatccaccctgcagcgcctcgatctctctcagaatctgctggacacgctacctcctgagattggaggcctgggcagcctcctggagctcaacctggcctccaaccggctgcagagcctcccagcctctctgggtgagtagcccctgcgccccgacacactggccccacgggagggtccctgaagcctgcctgtcttctgcaggggcctctgcacccacaggcttggtccacagctgcctcttggttgtccctccacctccctggcctttgagactccctcagtggctttgtcagagttctctgagcccagctgtggaggagagtctgaaacagctgctctgggaggcggcagcaggagtgtcccagcgccgtgggctgggctggtgccaagcctaagccagcaactgcccgcagcgggacttcggtccttgcggctccttgtcctgcacagcaacctcctggcctctgtgccagctgacttggcccgccttccactcctcacccggctcgacctgagggacaaccagctccgggacctgccccctgagctgctagacgccccctttgtgcgcctgcaggggaaccccctgggtgaggcctcgccagacgccccgagttcaccagtggcagccctcattccagaaatgcccagactgttcctgacctcagatttggacagctttcctgtgacccctcaaggctgctcagtgaccctggcctgtggcgtccgcctgcagttcccagcgggagccaccgccacccccatcaccatccgctatcggctgctgctgccggagccaggcctcgtccccctgggtcctcatgacgccctgctcagccatgtgctggagctgcagccccatggggtggccttccagcaggatgtggggctgtggctgctcttcaccccaccgcaggcccggcgctgccgtgaagtggtggtcaggacccggaatgacaacagctggggtgacctggagacctacctggaggaagaggcaccccagcggctctgggctcactgccaggtgccccacttctcctggttccttgtggtttcccgccctgtgtccaatgcctgcctggtgccaccggaggggacactgctgtgctcctcgggtcatcctggggtcaaagtcatcttcccccctggggccactgaggagcctcgtcgagtctccatgcaggtggtgcgcatggctggccgagagctgcaggccctcctgggagaaccagaggctgcagtgagccccctgctgtgcctgtcacagagcggtccccccagcttcctccaaccggtcaccgtgcagctgcctctgccctctggcatcacaggcctcagtctggaccgctcccgcctgcacctgttgtactgggcccctcctgcagccacctgggatgacatcacagctcaggtggtcctggagctcacccacctgtacgcacgcttccaggtcacacacttctcctggtcagtgccccccagctttctcagcccccctcccccagtctgtacagccctcctcacccccagctctcccaggtactggctctggtacaccaccaagaactgtgtgggaggcctggctcggaaggcctgggagcggctgcggctgcaccgtgtgaacctcatcgctctgcagcggcgccgggaccctgagcaggtcctgctgcagtgcctgccccgaaacaaggtggacgccacccttcggcggctgctggagcggtaccggggccccgagccctctgacacggtggagatgttcgagggcgaagagttctttgcggccttcgagcgcggcatcgacgtggatgctgaccgccctgactgtgtggagggcagaatctgctttgtcttctactcgcacctgaagaatgtgaaggaggtatacgtgaccaccactctggaccgggaggctcaggctgtgcggggccaggtgtccttctaccgtggcgcggtgcctgtgcgggtgcccgaggaggctgaggctgcccggcagaggaagggcgcagacgccctgtggatggccactctgcccatcaagctgccggtgggactgagggacagcagaggggcggggcaggaccgaggcccaggggtgaccagggtgacatggtggagttgggggtggagcccagggcttaatgcactttttccttccaacagagacttcgagggtccgaggggccacggcggggggctggcctctccttggcacccttgaatctgggagatgccgagaccggctttctgacgcagagcaacctgctgagtgtggctgggcgtctgggtctggactggccagccgtggccctgcacctgggggtgtcctaccgggaggtgcagcgcatccggcacgagttccgggatgatctggatgagcagatccgtcacatgctcttctcctgggctgagcgccaggctgggcagccaggggctgtggggctcctggtgcaggccctggagcagagtgaccggcaggacgtggctgaagaggtgcgcgcagtcttggagctcggccgccgcaagtaccaggacagcatccgacgcatgggcttggcccccaaggaccccgctctgcctggctcctcggctccacagcccccagagcctgcccaggcctaggccccacagacttttaggctggcccagatattccccagtggatgggcagagcccccaccttcaagtctctccagtgtgtggggacgggtccctgtgagcaacaaaactgcactgtttctttca

SEQ ID NO: 8607 - protein, 526 aa, Homo sapiens
MPRLFLTSDLDSFPVTPQGCSVTLACGVRLQFPAGATATPITIRYRLLLPEPGLVPLGPHDALLSHVLELQPHGVAFQQDVGLWLLFTPPQARRCREVVVRTRNDNSWGDLETYLEEEAPQRLWAHCQVPHFSWFLVVSRPVSNACLVPPEGTLLCSSGHPGVKVIFPPGATEEPRRVSMQVVRMAGRELQALLGEPEAAVSPLLCLSQSGPPSFLQPVTVQLPLPSGITGLSLDRSRLHLLYWAPPAATWDDITAQVVLELTHLYARFQVTHFSWSVPPSFLSPPPPVCTALLTPSSPRYWLWYTTKNCVGGLARKAWERLRLHRVNLIALQRRRDPEQVLLQCLPRNKVDATLRRLLERYRGPEPSDTVEMFEGEEFFAAFERGIDVDADRPDCVEGRICFVFYSHLKNVKEVYVTTTLDREAQAVRGQVSFYRGAVPVRVPEEAEAARQRKGADALWMATLPIKLPVGLRDSRGAGQDRGPGVTRVTWWSWGWSPGLNALFPSNRDFEGPRGHGGGLASPWHP

SEQ ID NO: 8608 - DNA, 787 bp, Homo sapiens
ccagcggctctgggctcactgccaggtgccccacttctcctggttccttgtggtttcccgccctgtgtccaatgcctgcctggtgccaccggaggggacactgctgtgctcctcgggtcatcctggggtcaaagtcatcttcccccctggggccactgaggagcctcgtcgagtctccatgcaggtggtgcgcatggctggccgagagctgcaggccctcctgggagaaccagaggctgcagtgagccccctgctgtgcctgtcacagagcggtccccccagcttcctccaaccggtcaccgtgcagctgcctctgccctctggcatcacaggtgagaggcagccatggggcatacctggacctgtggccatagggtggagggggtctccggccaggaggcctcagctcgctgcccctcccatccccaggcctcagtctggaccgctcccgcctgcacctgttgtactgggcccctcctgcagccacctgggatgacatcacagctcaggtggtcctggagctcacccacctgtacgcacgcttccaggtcacacacttctcctggtcagtgccccccagctttctcagcccccctcccccagtctgtacagccctcctcacccccagctctcccaggtactggctctggtacaccaccaagaactgtgtgggaggcctggctcggaaggcctgggagcggctgcggctgcaccgtgtgaacctcatcgctctgcagcggcgccgggaccctgagcaggtcctgctgcagtgcctgccccgaaacaa

SEQ ID NO: 8609 - protein, 105 aa, Homo sapiens
MQVVRMAGRELQALLGEPEAAVSPLLCLSQSGPPSFLQPVTVQLPLPSGITGERQPWGIPGPVAIGWRGSPARRPQLAAPPIPRPQSGPLPPAPVVLGPSCSHLG

SEQ ID NO: 8610 - DNA, 1031 bp, Homo sapiens
cgccgacgcaagaggcggggttaaaccgctacccagaaggctctgggacccgtgcgcggcgccgcatgaggcgcctcagagtgacgtcacgaggcgctcagccaatgacgacggggagggagtcgttgactccttccccctcccccttcccagcccccgtcaggcacttttcgcggcaaaggcgaagggcagcagttccggaagtgactgctcttatagcgtggggcgaagggccaccgaaactcgtgggggcgttggacgaagcgagtccaaagggacggcatctgccttcggtacctagcacccccagcatgccacgcggcgcctacagctcccaacatggagcgcggccgccacgcccgggactcaacctttgccagcgaactgcaagtcccatggtgcaccgctgccggaagtggcctgcgccgcgggcctacccggaacggcgcgtgggcccgggcagaagctgctggcggtaggctcgccttgactccttggtggttccctggccgcggcgaccggtggtcccacgtccagccgggctcagtgagacggagtcttgctctgtctcccaggctggagtgcagtggcaccatctcggctcactacaacctccgcctcccgggttcacgccattcttctgcctcagcctcctgagtagctgggactacaggcgcgcatcaccacgcccggctaatttttgtatttttagtagagacggggtttcaccatgttggccaggctggtctcaaactcctgacctcgtgatccacccgcctcggcctcccaaagtgctgggattacaggcgtcagccaccgcgcccgctcaatattttatctcttaacgcctccttctcccctgcgcgattgaaggagacagtgccaggaggctcactgcttctggcccagagtgatggctcgaaaggaagggtctttgcaggcccagagaggaggtcctggcaggcttcccggaggaggccgtttgggctggtttggaaaggacactgcaattgttccggcttgtagcaggg

SEQ ID NO: 8611 - protein, 105 aa, Homo sapiens
MERGRHARDSTFASELQVPWCTAAGSGLRRGPTRNGAWARAEAAGGRLALTPWWFPGRGDRWSHVQPGSVRRSLALSPRLECSGTISAHYNLRLPGSRHSSASAS

SEQ ID NO: 8612 - DNA, 1596 bp, Homo sapiens
ggcgactgtgaagtcgagttccagtgcttgacgtatacacaccccagggtttgcactgctgttagagcccaacgggagctggcgctgcctgctaacacggtagatacctgcatctgaccctgttcctggtgctcgcccgggatattggcagggatggctccttctcatctctcagctcaagctttctcaggctgcccagaggaccaagtctccctctgtccctgtccttcggatcgcctccctattcacctcctgcgtcctcgcacaagaactcaagtccttaggaggcagggccaaccctgttccctcccaggacccgagaatgtagcggggtccctgaggtgctgatgtccacatggacaccgaggtcagttccgggccaaagcggccagcgcaggggctgaccactcagacctcactcctcgcaggggtgagcgggcgacgctgcctcacgtcattgtcctgccctccaaggcccgcgctcgtcctctgacaggatgccctgacaccgcagtgcgggggcggcctcccagatagggccgcagtcgctaagtccgaggcggctggctcacctcactgagcccggctggacgtgggaccaccggtcgccgcggccagggaaccaccaaggagtcaaggcgagcctaccgccagcagcttctgcccgggcccacgcgccgttccgggtaggcccgcggcgcaggccacttccggcagcggtgcaccatgggacttgcagttcgctggcaaaggttgagtcccgggcgtggcggccgcgctccatgttgggagctgtaggcgccgcgtggcatgctgggggtgctaggtaccgaaggcagatgccgtccctttggactcgcttcgtccaacgcccccacgagtttcggtggcccttcgccccacgctataagagcagtcacttccggaactgctgcccttcgcctttgccgcgaaaagtgcctgacgggggctgggaagggggagggggaaggagtcaacgactccctccccgtcgtcattggctgagcgcctcgtgacgtcactctgaggcgcctcatgcggcgccgcgcacgggtcccagagccttctgggtagcggtttaaccccgcctcttgcgtcggcgccttccttttcctccctgtcgccaccgaggtcgcacgcgtgagacttctccgccgcctccgccgcagacgccgccgcgatgcgctacgtcgcctcctacctgctggctgccctagggggcaactcctcccccagcgccaaggacatcaagaagatcttggacagcgtgggtatcgaggcggacgacgaccggctcaacaaggttatcagtgagctgaatggaaaaaacattgaagacgtcattgcccagggtattggcaagcttgccagtgtacctgctggtggggctgtagccgtctctgctgccccaggctctgcagcccctgctgctggttctgcccctgctgcagcagaggagaagaaagatgagaagaaggaggagtctgaagagtcagatgatgacatgggatttggcctttttgattaaattcctgctcccctgcaaataaagcctttttacacatctctcaagta

SEQ ID NO: 8613 - protein, 115 aa, Homo sapiens; identical to SEQ ID NO: 1231

SEQ ID NO: 8614 - DNA, 695 bp, Homo sapiens
gctccatgttgggagctgtaggcgccgcgtggcatgctgggggtgctaggtaccgaaggcagatgccgtccctttggactcgcttcgtccaacgcccccacgagtttcggtggcccttcgccccacgctataagagcagtcacttccggaactgctgcccttcgcctttgccgcgaaaagtgcctgacgggggctgggaagggggagggggaaggagtcaacgactccctccccgtcgtcattggctgagcgcctcgtgacgtcactctgaggcgcctcatgcggcgccgcgcacgggtcccagagccttctgggtagcggtttaaccccgcctcttgcgtcggcgccttccttttcctccctgtcgccaccgaggtcgcacgcgtgagacttctccgccgcctccgccgcagacgccgccgcgttatcagtgagctgaatggaaaaaacattgaagacgtcattgcccagggtattggcaagcttgccagtgtacctgctggtggggctgtagccgtctctgctgccccaggctctgcagcccctgctgctggttctgcccctgctgcagcagaggagaagaaagatgagaagaaggaggagtctgaagagtcagatgatgacatgggatttggcctttttgattaaattcctgctcccctgcaaataaagcctttttacacatctctcaagta

SEQ ID NO: 8615 - protein, 84 aa, Homo sapiens
MLGAVGAAWHAGGARYRRQMPSLWTRFVQRPHEFRWPFAPRYKSSHFRNCCPSPLPRKVPDGGWEGGGGRSQRLPPRRHWLSAS

SEQ ID NO: 8616 - DNA, 797 bp, Homo sapiens
cctccctgtcgccaccgaggtcgcacgcgtgagacttctccgccgcctccgccgcagacgccgccgcgtgagtgtggtgaccgggcccggggtgccggctggggacgcggagtccgtggggatgcggggtgggcggcggggtatttttgggacggaggcctacgggccgagccacgcgcggcctcgcccggcggccccgggatgggccggcaggaggccgccggggtaactccgccgtcgcgtcctctccgcccgcctcaggatgcgctacgtcgcctcctacctgctggctgccctagggggcaactcctcccccagcgccaaggacatcaagaagatcttggacagcgtgggtatcgaggcggacgacgaccggctcaacaaggtagcggccgcccttgccccgcagccgccgtggggccccagtgtcccatacaggcgattcttctgcctgatccggccacatgctggagggttcggggagaggctcgtttcagtctagttggcgatttcttggatagagaagttatcagtgagctgaatggaaaaaacattgaagacgtcattgcccagggtattggcaagcttgccagtgtacctgctggtggggctgtagccgtctctgctgccccaggctctgcagcccctgctgctggttctgcccctgctgcagcagaggagaagaaagatgagaagaaggaggagtctgaagagtcagatgatgacatgggatttggcctttttgattaaattcctgctcccctgcaaataaagcctttttacacatctctcaagta

SEQ ID NO: 8617 - protein, 182 aa, Homo sapiens
MGRQEAAGVTPPSRPLRPPQDALRRLLPAGCPRGQLLPQRQGHQEDLGQRGYRGGRRPAQQGSGRPCPAAAVGPQCPIQAILLPDPATCWRVRGEARFSLVGDFLDREVISELNGKNIEDVIAQGIGKLASVPAGGAVAVSAAPGSAAPAAGSAPAAAEEKKDEKKEESEESDDDMGFGLFD

SEQ ID NO: 8618 - DNA, 645 bp, Homo sapiens
caccgaggtcgcacgcgtgagacttctccgccgcctccgccgcagacgccgccgcgtgagtgtggtgaccgggcccggggtgccggctggggacgcggagtccgtggggatgcggggtgggcggcggggtatttttgggacggaggcctacgggccgagccacgcgcggcctcgcccggcggccccgggatgggccggcaggaggccgccggggtaactccgccgtcgcgtcctctccgcccgcctcaggatgcgctacgtcgcctcctacctgctggctgccctagggggcaactcctcccccagcgccaaggacatcaagaagatcttggacagcgtgggtatcgaggcggacgacgaccggctcaacaaggttatcagtgagctgaatggaaaaaacattgaagacgtcattgcccagggtattggcaagcttgccagtgtacctgctggtggggctgtagccgtctctgctgccccaggctctgcagcccctgctgctggttctgcccctgctgcagcagaggagaagaaagatgagaagaaggaggagtctgaagagtcagatgatgacatgggatttggcctttttgattaaattcctgctcccctgcaaataaagcctttttacacatctctcaagta

SEQ ID NO: 8619 - protein, 115 aa, Homo sapiens; identical to SEQ ID NO: 1231

SEQ ID NO: 8620 - DNA, 2027 bp, Homo sapiens
gcacgcgtgagacttctccgccgcctccgccgcagacgccgccgcgtgagtgtggtgaccgggcccggggtgccggctggggacgcggagtccgtggggatgcggggtgggcggcggggtatttttgggacggaggcctacgggccgagccacgcgcggcctcgcccggcggccccgggatgggccggcaggaggccgccggggtaactccgccgtcgcgtcctctccgcccgcctcaggatgcgctacgtcgcctcctacctgctggctgccctagggggcaactcctcccccagcgccaaggacatcaagaagatcttggacagcgtgggtatcgaggcggacgacgaccggctcaacaaggtagcggccgcccttgccccgcagccgccgtggggccccagtgtcccatacaggcgattcttctgcctgatccggccacatgctggagggttcggggagaggctcgtttcagtctagttggcgatttcttggatagagaagtaagccgggcggaggtcgggcgcggtggctcacgcctgtagtcccagtactttgggaggacgaggcaggcggatcacctgaggtcaggggttcgagaccagcctggtaaacatgtcgaaaccccatccctactaaaaatacaaaaattagccgggcgtggtggtgggtgcctgtagtccccctacttgggaggctgaggcaggaaaatcgctcgaacccgggagatggaggttgcacggatcgtgccactgtactccagtctgggtggcagaaggagaccctgtctcaaaaggaaaaaaaaaaaaaaaagcagggtgggtacgaggcaaaatcgtgattaacaagctttggaagtttaataccagtgagctgcgtaagattgcgttaaaaaaaaaaaaaagcagtcctggcgcatggctcacccggctttgggaggccatggcgagtggattattggagccttgaagttcgagactggtctggaaaacattgcaagacccggtctccacaaaaaaaaaaaaaaaaaaaaatggttggaggcagtggtgcacatctgtagtctcagctactcatgaggctgatgcgggagaatcatttgagccttagaggtcaaggctgcactgagtagtgattgtgccactgcagtctaacagaaccaggcctcgtctctaaaatacaataaaaaattagccaggcttggttgctcatgcctgtagtcccagactgaggtgggatagtcacttgagcccgggaggtcaaggctgcagtgagatcctaccactgcactccagcctgaagtcaaagtcaatttcattgccagtttattttgccagtgttgaagatacctatgagtagtcaacataagtagtgagatgccctgtgtccttttgtcagtcctaagtctaagaaagctagtgtccatttatttttatatcacttcccaagtgaggctggtggctccctttgggcagtgcagttctggaaacttcagggcctattcccatgtggggaacccagtcctgctgtgactctgggagggagagggccggggatacaatcgtacattcctggtaacagccctgtgattgtctgcttcaggttatcagtgagctgaatggaaaaaacattgaagacgtcattgcccagggtgagttgatgtggacgggctttcgtttgttttcatggtccatcctaatccctgccggtccatctgtggcctgccaggtttcgcttgtggaccagagcaccctagaagcctcacccgaggagtgagcagggctccagtgggctcacgtcatgggcacttctagacactctcaggagcagggcagcagggggcaccctgtgttctcagcagacgtttaggtggccctgcctcttaagcctgactgctcctagccctgaggccattccccaggatttgtctgaagcttggtgtctggagaactgagttcacgtcagcagtccttaccacatgctttctgtgagggggttgggggcagggactgagggtgccagggatg

SEQ ID NO: 8621 - protein, 121 aa, Homo sapiens
MGRQEAAGVTPPSRPLRPPQDALRRLLPAGCPRGQLLPQRQGHQEDLGQRGYRGGRRPAQQGSGRPCPAAAVGPQCPIQAILLPDPATCWRVRGEARFSLVGDFLDREVSRAEVGRGGSRL

SEQ ID NO: 8622 - DNA, 1388 bp, Homo sapiens
gagacttctccgccgcctccgccgcagacgccgccgcgtgagtgtggtgaccgggcccggggtgccggctggggacgcggagtccgtggggatgcggggtgggcggcggggtatttttgggacggaggcctacgggccgagccacgcgcggcctcgcccggcggccccgggatgggccggcaggaggccgccggggtaactccgccgtcgcgtcctctccgcccgcctcaggatgcgctacgtcgcctcctacctgctggctgccctagggggcaactcctcccccagcgccaaggacatcaagaagatcttggacagcgtgggtatcgaggcggacgacgaccggctcaacaaggttatcagtgagctgaatggaaaaaacattgaagacgtcattgcccagggtgagttgatgtggacgggctttcgtttgttttcatggtccatcctaatccctgccggtccatctgtggcctgccaggtttcgcttgtggaccagagcaccctagaagcctcacccgaggagtgagcagggctccagtgggctcacgtcatgggcacttctagacactctcaggagcagggcagcagggggcaccctgtgttctcagcagacgtttaggtggccctgcctcttaagcctgactgctcctagccctgaggccattccccaggatttgtctgaagcttggtgtctggagaactgagttcacgtcagcagtccttaccacatgctttctgtgagggggttgggggcagggactgagggtgccagggatgtccataggctccttgcctctttgttgggcagatggttttttgttggcttcagctgagctggtggaacttgtttggaagttgagctgttggggcagctgttcttgtcttccatgcatgtgaccacgacagggccagctcagcaaacgggccaagccatgaacacagcgttgtggccagagatgtggatactggggcagcacactcattccctacctagttatgaacatgtctgtccagtggacctctgagggtggaggtggggaaattgggcaggcaggcagtgtgggcctaattcctagaaggcaagtccctggataggaaaggtggggaagagaagtccccgttgaggagtggctcagggagggagtgttcaggaagaacgggagacactggcatatggtgggtccagatatgttgggtgccatgtgccatctctggtgccatctaacttccctgtggaacagcctcccaggctgggcagctgctctggtctcacctctctgctttctgtaggtattggcaagcttgccagtgtacctgctggtggggctgtagccgtctctgctgccccaggctctgcagcccctgctgctggttctgcccctgct

SEQ ID NO: 8623 - protein, 98 aa, Homo sapiens [sequence omitted]

SEQ ID NO: 8624 - DNA, 325 bp, Homo sapiens
tagggggcaactcctcccccagcgccaaggacatcaagaagatcttggacagcgttatcagtgagctgaatggaaaaaacattgaagacgtcattgcccagggtattggcaagcttgccagtgtacctgctggtggggctgtagccgtctctgctgccccaggctctgcagcccctgctgctggttctgcccctgctgcagcagaggagaagaaagatgagaagaaggaggagtctgaagagtcagatgatgacatgggatttggcctttttgattaaattcctgctcccctgcaaataaagcctttttacacatctctcaagta

SEQ ID NO: 8625 - protein, 44 aa, Homo sapiens
RRHCPGYWQACQCTCWWGCSRLCCPRLCSPCCWFCPCCSRGEER

SEQ ID NO: 8626 - DNA, 427 bp, Homo sapiens
gtgagatgccctgtgtccttttgtcagtcctaagtctaagaaagctagtgtccatttatttttatatcacttcccaagtgaggctggtggctccctttgggcagtgcagttctggaaacttcagggcctattcccatgtggggaacccagtcctgctgtgactctgggagggagagggccggggatacaatcgtacattcctggtaacagccctgtgattgtctgcttcaggttatcagtgagctgaatggaaaaaacattgaagacgtcattcccctgctgctggttctgcccctgctgcagcagaggagaagaaagatgagaagaaggaggagtctgaagagtcagatgatgacatgggatttggcctttttgattaaattcctgctcccctgcaaataaagcctttttacacatctctcaagta

SEQ ID NO: 8627 - protein, 51 aa, Homo sapiens
MPCVLLSVLSLRKLVSIYFYITSQVRLVAPFGQCSSGNFRAYSHVGNPVLL

SEQ ID NO: 8628 - DNA, 503 bp, Homo sapiens
gtgagatgccctgtgtccttttgtcagtcctaagtctaagaaagctagtgtccatttatttttatatcacttcccaagtgaggctggtggctccctttgggcagtgcagttctggaaacttcagggcctattcccatgtggggaacccagtcctgctgtgactctgggagggagagggccggggatacaatcgtacattcctggtaacagccctgtgattgtctgcttcaggttatcagtgagctgaatggaaaaaacattgaagacgtcattgcccagggtattggcaagcttgccagtgtacctgctggtggggctgtagccgtctctgctgccccaggctctgcagcccctgctgctggttctgcccctgctgcagcagaggagaagaaagatgagaagaaggaggagtctgaagagtcagatgatgacatgggatttggcctttttgattaaattcctgctcccctgcaaataaagcctttttacacatctctcaagta

SEQ ID NO: 8629 - protein, 51 aa, Homo sapiens; identical to SEQ ID NO: 8627

SEQ ID NO: 8630 - DNA, 1044 bp, Homo sapiens
gcctgccaggtttcgcttgtggaccagagcaccctagaagcctcacccgaggagtgagcagggctccagtgggctcacgtcatgggcacttctagacactctcaggagcagggcagcagggggcaccctgtgttctcagcagacgtttaggtggccctgcctcttaagcctgactgctcctagccctgaggccattccccaggatttgtctgaagcttggtgtctggagaactgagttcacgtcagcagtccttaccacatgctttctgtgagggggttgggggcagggactgagggtgccagggatgtccataggctccttgcctctttgttgggcagatggttttttgttggcttcagctgagctggtggaacttgtttggaagttgagctgttggggcagctgttcttgtcttccatgcatgtgaccacgacagggccagctcagcaaacgggccaagccatgaacacagcgttgtggccagagatgtggatactggggcagcacactcattccctacctagttatgaacatgtctgtccagtggacctctgagggtggaggtggggaaattgggcaggcaggcagtgtgggcctaattcctagaaggcaagtccctggataggaaaggtggggaagagaagtccccgttgaggagtggctcagggagggagtgttcaggaagaacgggagacactggcatatggtgggtccagatatgttgggtgccatgtgccatctctggtgccatctaacttccctgtggaacagcctcccaggctgggcagctgctctggtctcacctctctgctttctgtaggtattggcaagcttgccagtgtacctgctggtggggctgtagccgtctctgctgccccaggctctgcagcccctgctgctggttctgcccctgctgcagcagaggagaagaaagatgagaagaaggaggagtctgaagagtcagatgatgacatgggatttggcctttttgattaaattcctgctcccctgcaaataaagcctttttacacatctctcaagta

SEQ ID NO: 8631 - protein, 45 aa, Homo sapiens
MHVTTTGPAQQTGQAMNTALWPEMWILGQHTHSLPSYEHVCPVDL

SEQ ID NO: 8632 - DNA, 2083 bp, Homo sapiens
ggcggccccagtcagacgcaggcagccccaaagcctgaacaggcagggccagacccagcttcttcgcctccgccagcggggaccccgagctagagccgcagcgggacctgcccggcccccggctccagcgagcgagcggcgagcaggcggctcacagaggcctggccgcccacggaacccggggcccggcggccgccgccgcgatgtttccccgcgagaagacgtggaacatctcgttcgcgggctgcggcttcctcggcgtctactacgtcggcgtggcctcctgcctccgcgagcacgcgcccttcctggtggccaacgccacgcacatctacggcgcctcggccggggcgctcacggccacggcgctggtcaccggggtctgcctgggtgaggctggtgccaagttcattgaggtatctaaagaggcccggaagcggttcctgggccccctgcacccctccttcaacctggtaaagatcatccgcagtttcctgctgaaggtcctgcctgctgatagccatgagcatgccagtgggcgcctgggcatctccctgacccgcgtgtcagacggcgagaatgtcattatatcccacttcaactccaaggacgagctcatccaggccaatgtctgcagcggtttcatccccgtgtactgtgggctcatccctccctccctccagggggtgcgctacgtggatggtggcatttcagacaacctgccactctatgagcttaagaacaccatcacagtgtcccccttctcgggcgagagtgacatctgtccgcaggacagctccaccaacatccacgagctgcgggtcaccaacaccagcatccagttcaacctgcgcaacctctaccgcctctccaaggccctcttcccgccggagcccctggtgctgcgagagatgtgcaagcagggataccgggatggcctgcgctttctgcagcggaacggcctcctgaaccggcccaaccccttgctggcgttgccccccgcccgcccccacggcccagaggacaaggaccaggcagtggagagcgcccaagcggaggattactcgcagctgcccggagaagatcacatcctggagcacctgcccgcccggctcaatgaggccctgctggaggcctgcgtggagcccacggacctgctgaccaccctctccaacatgctgcctgtgcgtctggccacggccatgatggtgccctacacgctgccgctggagagcgctctgtccttcaccatccgcttgctggagtggctgcccgacgttcccgaggacatccggtggatgaaggagcagacgggcagcatctgccagtacctggtgatgcgcgccaagaggaagctgggcaggcacctgccctccaggctgccggagcaggtggagctgcgccgcgtccagtcgctgccgtccgtgccgctgtcctgcgccgcctacagagaggcactgcccggctggatgcgcaacaacctctcgctgggggacgcgctggccaagtgggaggagtgccagcgccagctgctgctcggcctcttctgcaccaacgtggccttcccgcccgaagctctgcgcatgcgcgcacccgccgacccggctcccgcccccgcggacccagcatccccgcagcaccagctggccgggcctgcccccttgctgagcacccctgctcccgaggcccggcccgtgatcggggccctggggctgtgagaccccgaccctctcgaggaaccctgcctgagacgcctccattaccactgcgcagtgagatgaggggactcacagttgccaagaggggtctttgccgtgggccccctcgccagccactcaccagctgcatgcactgagaggggaggtttccacacccctcccctgggccgctgaggccccgcgcacctgtgccttaatcttccctcccctgtgctgcccgagcacctcccccgcccctttactcctgagaactttgcagctgcccttccctccccgtttttcatggcctgctgaaatatgtgtgtgaagaattatttattttcgccaaagcacatgtaataaatgctgcagcccagcctctgccc

SEQ ID NO: 8633 - protein, 504 aa, Homo sapiens; identical to SEQ ID NO: 1234

SEQ ID NO: 8634 - DNA, 2015 bp, Homo sapiens
atgtttccccgcgagaagacgtggaacatctcgttcgcgggctgcggcttcctcggcgtctactacgtcggcgtggcctcctgcctccgcgagcacgcgcccttcctggtggccaacgccacgcacatctacggcgcctcggccggggcgctcacggccacggcgctggtcaccggggtctgcctgggtgagcggggccgggggcggcaggcggggggctggcgggaaggccgtgcggggccgggggatggtctccgtgagcggaggggccccgcggcgagtcggtgggtaccgtggggagggttccggtccgcgcctggggaacccggcgaggatccaatccgggtcgctggcctgggggcggggcctggtttgttttgctccgagggtgcccggggcccgcctgtctggcgcaaaggtttgggggcgggcaggtgcagcaaaagctgcttaattggacagaaaaagtaactcgtgggcgggaccgtgagaatccgaggagggacctaagtcaccccgtggccctggatattacaaccggtgccagcgatcggtcacagtgtcctgggcttccgcagttgcaggctgctatcagggggcctggcatgggggtagcctcttgagaggcgtctgggaaccgtgacctggtccttcccaagggcccggaggaggagccccgctgaggtcagggctgggcgcgaaggggctctcctgccctctccttgcacacggtgccctgtggcctggctccccgctgcggcccaccgcgtttgcacacttcatgggtgagggtgcttctgggctctggtgcctgggtcaggagtggatgggtctctgtgtgctgggctggcctcggctcgcaccatcggctgccatgagggagtgatgtttacagcacacgacttcaggagcctgtgaggacacccaagatgacaggggcactctgctcagcaggagcctgtccggggctcacccctgccccctccctctcatggaggccttcagacaagcgcctcagtcggccccctggcttcaagatacatcaaggtccctgctacccgagccaaggacacctctcccacagtgcttccccaccctgctcccaacaagactccttctcacgggtggtcttgcacagctggagcccatagtgcagcaggtgctggctgaagagcccctggctccacactgccccactcctgaccagggtgatgcactggaggagggcttggacctcagctcctccctcagtgctcccgaccacttccagggactatccccaagctggccagcactcctgcgccccaagaggagtgtttggggtgcttcctcttggctgcagtgggacacaggtgtgccttcctaggaactgggccctgactacttccagcccaacactcccgggcctgtgaactgtgacctgtgtgccgggatgggttttgtgggtctgccccatccccgcactgctggatctggccaagtgggtgaaggctaaggccggtcagagttgagtttctgccttgtcccctctcctgggctagatgccacaccaggcccagtgactcatagggcaggcagttgggaaataccaggcagagggcaggtcctggtctcagctggccagcctctgctgtctgccatcccaggggaggtggccaaagtcccaactgtgagccaggccccacattcactgggcctcctccagggtctgtatgccatggaaccctggacatggggctatgaaggaaggtgggtgttgctaagcccaggagcatgggcccctaaccttggccctgtgccccaggtgaggctggtgccaagttcattgaggtatctaaagaggcccggaagcggttcctgggccccctgcacccctccttcaacctggtaaagatcatccgcagtttcctgctgaaggtcctgcctgctgatagccatgagcatgccagtgggcgcctgggcatctccctgacccgcgtgtcagacggcgagaatgtcattatatcccacttcaa

SEQ ID NO: 8635 - protein, 73 aa, Homo sapiens
MTGALCSAGACPGLTPAPSLSWRPSDKRLSRPPGFKIHQGPCYPSQGHLSHSASPPCSQQDSFSRVVLHSWSP

SEQ ID NO: 8636 - DNA, 2734 bp, Homo sapiens
gcctcagtcggccccctggcttcaagatacatcaaggtccctgctacccgagccaaggacacctctcccacagtgcttccccaccctgctcccaacaagactccttctcacgggtggtcttgcacagctggagcccatagtgcagcaggtgctggctgaagagcccctggctccacactgccccactcctgaccagggtgatgcactggaggagggcttggacctcagctcctccctcagtgctcccgaccacttccagggactatccccaagctggccagcactcctgcgccccaagaggagtgtttggggtgcttcctcttggctgcagtgggacacaggtgtgccttcctaggaactgggccctgactacttccagcccaacactcccgggcctgtgaactgtgacctgtgtgccgggatgggttttgtgggtctgccccatccccgcactgctggatctggccaagtgggtgaaggctaaggccggtcagagttgagtttctgccttgtcccctctcctgggctagatgccacaccaggcccagtgactcatagggcaggcagttgggaaataccaggcagagggcaggtcctggtctcagctggccagcctctgctgtctgccatcccaggggaggtggccaaagtcccaactgtgagccaggccccacattcactgggcctcctccagggtctgtatgccatggaaccctggacatggggctatgaaggaaggtgggtgttgctaagcccaggagcatgggcccctaaccttggccctgtgccccaggtgaggctggtgccaagttcattgaggtatctaaagaggcccggaagcggttcctgggccccctgcacccctccttcaacctggtaaagatcatccgcagtttcctgctgaaggtcctgcctgctgatagccatgagcatgccagtgggcgcctgggcatctccctgacccgcgtgtcagacggcgagaatgtcattatatcccacttcaactccaaggacgagctcatccaggccaatgtctgcagcggtttcatccccgtgtactgtgggctcatccctccctccctccagggggtgcgctacgtggatggtggcatttcagacaacctgccactctatgagcttaagaacaccatcacagtgtcccccttctcgggcgagagtgacatctgtccgcaggacagctccaccaacatccacgagctgcgggtcaccaacaccagcatccagttcaacctgcgcaacctctaccgcctctccaaggccctcttcccgccggagcccctggtgctgcgagagatgtgcaagcagggataccgggatggcctgcgctttctgcagcggaacggtgcgcggacccgggcgggagagggcggggtgggctcggctctgctaccccctgcgggccgcggccgcgctgatgaactgagaatcccttctctccccaaccccaggcctcctgaaccggcccaaccccttgctggcgttgccccccgcccgcccccacggcccagaggacaaggaccaggcagtggagagcgcccaagcggaggattactcgcagctgcccggagaagatcacatcctggagcacctgcccgcccggctcaatgagggtgcgcacctgggggacgggaggggaggaggggaggcaggagggaaagagagagaggagaggacggtgagcaggggagggaagccgagcgggtcctgggccccgctgcctccactggccgccgacctcccgcccacccgcagccctgctggaggcctgcgtggagcccacggacctgctgaccaccctctccaacatgctgcctgtgcgtctggccacggccatgatggtgccctacacgctgccgctggagagcgctctgtccttcaccatccgcttgctggagtggctgcccgacgttcccgaggacatccggtggatgaaggagcagacgggcagcatctgccagtacctggtgatgcgcgccaagaggaagctgggcaggcacctgccctccaggctgccggagcaggtggagctgcgccgcgtccagtcgctgccgtccgtgccgctgtcctgcgccgcctacagagaggcactgcccggctggatgcgcaacaacctctcgctgggggacgcgctggccaagtgggaggagtgccagcgccagctgctgctcggcctcttctgcaccaacgtggccttcccgcccgaagctctgcgcatgcgcgcacccgccgacccggctcccgcccccgcggacccagcatccccgcagcaccagctggccgggcctgcccccttgctgagcacccctgctcccgaggcccggcccgtgatcggggccctggggctgtgagaccccgaccctctcgaggaaccctgcctgagacgcctccattaccactgcgcagtgagatgaggggactcacagttgccaagaggggtctttgccgtgggccccctcgccagccactcaccagctgcatgcactgagaggggaggtttccacacccctcccctgggccgctgaggccccgcgcacctgtgccttaatcttccctcccctgtgctgcccgagcacctcccccgcccctttactcctgagaactttgcagctgcccttccctccccgtttttcatggcctgctgaaatatgtgtgtgaagaattatttattttcgccaaagcacatgtaataaatgctgcagcccagcctctgccc

SEQ ID NO: 8637 - protein, 180 aa, Homo sapiens
MLPVRLATAMMVPYTLPLESALSFTIRLLEWLPDVPEDIRWMKEQTGSICQYLVMRAKRKLGRHLPSRLPEQVELRRVQSLPSVPLSCAAYREALPGWMRNNLSLGDALAKWEECQRQLLLGLFCTNVAFPPEALRMRAPADPAPAPADPASPQHQLAGPAPLLSTPAPEARPVIGALGL

SEQ ID NO: 8638 - DNA, 1036 bp, Homo sapiens
tgggctgcagcatttattacatgtgctttggcgaaaataaataattcttcacacacatatttcagcaggccatgaaaaacggggagggaagggcagctgcaaagttctcaggagtaaaggggcgggggaggtgctcgggcagcacaggggagggaagattaaggcacaggtgcgcggggcctcagcggcccaggggaggggtgtggaaacctcccctctcagtgcatgcagctggtgagtggctggcgagggggcccacggcaaagacccctcttggcaactgtgagtcccctcatctcactgcgcagtggtaatggaggcgtctcaggcagggttcctcgagagggtcggggtctcacagccccagggccccgatcacgggccgggcctcgggagcaggggtgctcagcaagggggcaggcccggccagctggtgctgcggggatgctgggtccgcgggggcgggagccgggtcggcgggtgcgcgcatgcgcagagcttcgggcgggaaggccacgttggtgcagaagaggccgagcagcagctggcgctggcactcctcccacttggccagcgcgtcccccagcgagaggttgttgcgcatccagccgggcagtgcctctctgtaggcggcgcaggacagcggcacggacggcagcgactggacgcggcgcagctccacctgctccggcagcctgcggggcagggatgcggcagggagggcttcagctcccggcgctagcaccgcgggccccgggtggacgcgcggtcggcggctcacctggagggcaggtgcctgcccagcttcctcttggcgcgcatcaccaggtgcgcaccctcattgagccgggcgggcaggtgctccaggatgtgatcttctccgggcagctgcgagtaatcctccgcttgggcgctctccactgcctggtccttgtcctctgggccgtgggggcgggcggggggcaacgccagcaaggggttgggccggttcaggaggcctggggttggggagagaagggattctcagttcatcagc

SEQ ID NO: 8639 - protein, 269 aa, Homo sapiens
MQLVSGWRGGPRQRPLLATVSPLISLRSGNGGVSGRVPREGRGLTAPGPRSRAGPREQGCSARGQARPAGAAGMLGPRGREPGRRVRACAELRAGRPRWCRRGRAAAGAGTPPTWPARPPARGCCASSRAVPLCRRRRTAARTAATGRGAAPPAPAACGAGMRQGGLQLPALAPRAPGGRAVGGSPGGQVPAQLPLGAHHQVRTLIEPGGQVLQDVIFSGQLRVILRLGALHCLVLVLWAVGAGGGQRQQGVGPVQEAWGWGEKGFSVH

SEQ ID NO: 8640 - DNA, 472 bp, Homo sapiens
ccctcccgcggcggcgggcgctcggcaggtctgaacccgcgtgggtgtaggcgctgggggtcgacctggcactgcggaggccgggcgagctgcagccctgggggcgccaatagcccagcaagggcccatcccgtccaaggacggaggagctgggcgggaggcgggcccggaggtcctgctcgcggctctgcagctccagctccagacggcttctccgctccccgcgggcgaagttctgggacgcacggaggaccactgagcctccgccggccgctcggccatgcaaaagaggtgcgcaccctcattgagccgggcgggcaggtgctccaggatgtgatcttctccgggcagctgcgagtaatcctccgcttgggcgctctccactgcctggtccttgtcctctgggccgtgggggcgggcggggggcaacgccagcaaggggttgggccggttcaggaggcctggggttggg

SEQ ID NO: 8641 - protein, 156 aa, Homo sapiens
PSRGGGRSAGLNPRGCRRWGSTWHCGGRASCSPGGANSPARAHPVQGRRSWAGGGPGGPARGSAAPAPDGFSAPRGRSSGTHGGPLSLRRPLGHAKEVRTLIEPGGQVLQDVIFSGQLRVILRLGALHCLVLVLWAVGAGGGQRQQGVGPVQEAWG

SEQ ID NO: 8642 - DNA, 1797 bp, Homo sapiens
ggacctcaggtctagccggcaagccggagggcgggcgagacaacaacgtggcctggaggcaatggccctggcctctcgtgtccccttctctcacccgcccagacttgccctctttggaggtcgcccgggctaaggtcttctccactggcccctgagattgccatcacctccagctcctcctctcctgaagttggcagcccctcctgggttccagcctcctgagatgccagacccactggggcagtacccacaggccctgagcctacatcaaccaccccagtgacaccccaagcctgcagcattttccacccccagccccctggtcccaccttgccttccgcccaccttcccacctgctgcagggagggccctcggctgagccttcagacacacttgcaccccatccgctcccctcctgaatttcttctgaccctcccttggcttcacagcacctgaaggccaggctgaggccccctgctctcatggccagccctggaaagcctggggctgatgaggcccaggaggaggagggggaactcgaggggggctctgcagggccgcgggctgcaatactggagcaggctgaggagctgtttctgctgtgtgacaaggaggctaagggcttcatcaccaagcacgacctgcagggtctccagagcgacctgcccctcacgccagagcagctggaggctgtgtttgaaagtctggaccgggctcacactggcttcctcaccgccagggagttctgcctgggcctggggatgtttgtgggggtggcgtcagcccagggagcgaacccctgcaggactcccgaggagacctttgagtcgggcgggctcgacgtgcagggcacggcgggctctctggatgaggaggaggaagaggaggagcgattccacactgtgctggagcagctgggggtggccccggtcctgggcaagcagcgggctgtgaggacgctctgggccaggctgcagcgcgagcgccccgagctgctgggctctttcgaggatgttctgatacgcgcgtcggcctgcctggaggaggcggcccgggagcgcgacggcctggagcaggcgctgcggaggcgcgagagcgagcacgagagggaggtgcgcgctctgtacgaggagacggagcagcttcgggagcagagccggcgcccgccgagtcagaacttcgcccgcggggagcggagaagccgtctggagctggagctgcagagccgcgagcaggacctggaacgcgcgggcctgcggcagcgggagagacgtggtcgccgtctccaggaacatgcagaaagagaaagtcagcctgctacggcaactggagctgctcagggagctgaatacacggctgcgggatgacagggacgcctgcgaggccaggcgggcgggcagcagctgcaggaaggctctgacaacagcccgcctgcctgggcccacctgctgctgctgctgttgctgggctcggccccccagacgcggctctggccaccttcccagtgcccggtgaccagccccgagtgactcacggaccatgagctagaagctgcccttgcaggaggcttgtcatgggtcgggggtgcccactcaggatgcaggctctccccagtgggccccaggctcgcctgactgaagacatgaaggacctagcctaggagtggtcagggtcccgggagtggccagggtcccgtgtgtgccctctgccagtcttcgctctgtccccgttcaatcaaccccatctcagttcagcagaaaaccccctcgtcaaataaaacccactgactgcactgcg

SEQ ID NO: 8643 - protein, 294 aa, Homo sapiens; identical to SEQ ID NO: 1236

SEQ ID NO: 8644 - DNA, 2472 bp, Homo sapiens
tactcgttgggagggtgaacggggacacagccacggtggcgacccacagccctggtaatcgctcgctccatgcccgcagggatgtttgtgggggtggcgtcagcccagggagcgaacccctgcaggactcccgaggagacctttgagtcgggcgggctcgacgtgcagggcacggcgggctctctggatgaggaggaggaagaggaggagcgattccacactgtgctggagcagctgggggtggccccggtcctgggcaagtgagtcggcgctggccccgctcccactgcccgctctgctgtttctctgcctgcatgctgtctgcccttgtcacccgagtgctggttctgcacagggtctctaggccgggtcaggcccagcctagcgtcagctgcgattccctgggagggacccggcatgatttcccgcagaatttgcatttcatgaggcagcagccagggctgcagggaggaggggcagcgccgggcgcggggccacataccggcactgcccagggtacacacacctcaccgaccacgcacgccgggcaggggcgaaagcgctcacgggagggatgccctgcacgcagcaagtgctcctgtcctgcccaggggcgaagaagtctcctaagggtttgctgctggcggagggaagcctgcttcccgcttctgccagctccagcctcagttcccgcccgccctccaggcagcgggctgtgaggacgctctgggccaggctgcagcgcgagcgccccgagctgctgggctctttcgaggatgttctgatacgcgcgtcggcctgcctggaggaggcggcccgggagcgcgacggcctggagcaggcgctgcggaggtgagggccggggtggggtatgggggccaatggagggcctcagggcagcagcagaggcggtgccagggggctgtagcgctggcaagttctcatccggggtcgcccggtcccccgaaggcgcgagagcgagcacgagagggaggtgcgcgctctgtacgaggagacggagcagcttcgggagcagagccggcgcccgccgagtcaggtgggcctcgggccccgcccctcccgccaggcccaatcccacctcgctggcctccctggctccgccttctctgaattaatccctccccgacggccccacctccgcgggtccaggctgccctcagcccgaggagatcccactgggcctcacgtatcacccccgtccggtcttctccacccgaccccgctccgcccgggcccactcccagcccctggccctccgtgtacctcttttgcatggccgagcggccggcggaggctcagtggtcctccgtgcgtcccagaacttcgcccgcggggagcggagaagccgtctggagctggagctgcagagccgcgagcaggacctggaacgcgcgggcctgcggcagcgggaggtgagcacccggcccctgccctgtccccacggtcacccgtgcactctccccctgtgccttagcgtccccgggttgtcgggagcctggggcacgcgcagcaccccggggaagagggggcgttcctcgccggtctccatccttccaccctccagttagagcagcagctgcacgcccaggctgcggagcacctggaggcacaggcccagaactcccagctgtggcgggcgcacgaggcgctgcgaacgcagctggagggggcgcaggagcagatccgcaggctggagagcgaagcacgaggccgccaggagcaaacccaacggtgccgtgggacggggctgggcgggccccggtgcgtgtcccgggggcggggccgacgggcgctcaggtctgggccactttcatccccatctcaagtcccaggcccgccccgtgggaaggaggatcttctagggggtccgggggctccccaaggagccttcctgcagccgggtcaccacctcccatccacagagacgtggtcgccgtctccaggaacatgcagaaagagaaagtcagcctgctacggcaactggagctgctcagggagctgaatacacggctgcgggatgacagggacgcctgcgaggccaggcgggcgggcagcagctgcaggaaggctctgacaacagcccgcctgcctgggcccacctgctgctgctgctgttgctgggctcggccccccagacgcggctctggccaccttcccagtgcccggtgaccagccccgagtgactcacggaccatgagctagaagctgcccttgcaggaggcttgtcatgggtcgggggtgcccactcaggatgcaggctctccccagtgggccccaggctcgcctgactgaagacatgaaggacctagcctaggagtggtcagggtcccgggagtggccagggtcccgtgtgtgccctctgccagtcttcgctctgtccccgttcaatcaaccccatctcagttcagcagaaaaccccctcgtcaaataaaacccactgactgcactgcg

SEQ ID NO: 8645 - protein, 73 aa, Homo sapiens
MQKEKVSLLRQLELLRELNTRLRDDRDACEARRAGSSCRKALTTARLPGPTCCCCCCWARPPRRGSGHLPSAR

SEQ ID NO: 8646 - DNA, 1611 bp, Homo sapiens
gaacggggacacagccacggtggcgacccacagccctggtaatcgctcgctccatgcccgcagggatgtttgtgggggtggcgtcagcccagggagcgaacccctgcaggactcccgaggagacctttgagtcgggcgggctcgacgtgcagggcacggcgggctctctggatgaggaggaggaagaggaggagcgattccacactgtgctggagcagctgggggtggccccggtcctgggcaagcagcgggctgtgaggacgctctgggccaggctgcagcgcgagcgccccgagctgctgggctctttcgaggatgttctgatacgcgcgtcggcctgcctggaggaggcggcccgggagcgcgacggcctggagcaggcgctgcggaggcgcgagagcgagcacgagagggaggtgcgcgctctgtacgaggagacggagcagcttcgggagcagagccggcgcccgccgagtcagaacttcgcccgcggggagcggagaagccgtctggagctggagctgcagagccgcgagcaggacctggaacgcgcgggcctgcggcagcgggaggtgagcacccggcccctgccctgtccccacggtcacccgtgcactctccccctgtgccttagcgtccccgggttgtcgggagcctggggcacgcgcagcaccccggggaagagggggcgttcctcgccggtctccatccttccaccctccagttagagcagcagctgcacgcccaggctgcggagcacctggaggcacaggcccagaactcccagctgtggcgggcgcacgaggcgctgcgaacgcagctggagggggcgcaggagcagatccgcaggctggagagcgaagcacgaggccgccaggagcaaacccaacggtgccgtgggacggggctgggcgggccccggtgcgtgtcccgggggcggggccgacgggcgctcaggtctgggccactttcatccccatctcaagtcccaggcccgccccgtgggaaggaggatcttctagggggtccgggggctccccaaggagccttcctgcagccgggtcaccacctcccatccacagagacgtggtcgccgtctccaggaacatgcagaaagagaaagtcagcctgctacggcaactggagctgctcagggagctgaatacacggctgcgggatgacagggacgcctgcgaggccaggcgggcgggcagcagctgcaggaaggctctgacaacagcccgcctgcctgggcccacctgctgctgctgctgttgctgggctcggccccccagacgcggctctggccaccttcccagtgcccggtgaccagccccgagtgactcacggaccatgagctagaagctgcccttgcaggaggcttgtcatgggtcgggggtgcccactcaggatgcaggctctccccagtgggccccaggctcgcctgactgaagacatgaaggacctagcctaggagtggtcagggtcccgggagtggccagggtcccgtgtgtgccctctgccagtcttcgctctgtccccgttcaatcaaccccatctcagttcagcagaaaaccccctcgtcaaataaaacccactgactgcactgcg

SEQ ID NO: 8647 - protein, 224 aa, Homo sapiens
MPAGMFVGVASAQGANPCRTPEETFESGGLDVQGTAGSLDEEEEEEERFHTVLEQLGVAPVLGKQRAVRTLWARLQRERPELLGSFEDVLIRASACLEEAARERDGLEQALRRRESEHEREVRALYEETEQLREQSRRPPSQNFARGERRSRLELELQSREQDLERAGLRQREVSTRPLPCPHGHPCTLPLCLSVPGLSGAWGTRSTPGKRGRSSPVSILPPSS

SEQ ID NO: 8648 - DNA, 1734 bp, Homo sapiens
acacagccacggtggcgacccacagccctggtaatcgctcgctccatgcccgcagggatgtttgtgggggtggcgtcagcccagggagcgaacccctgcaggactcccgaggagacctttgagtcgggcgggctcgacgtgcagggcacggcgggctctctggatgaggaggaggaagaggaggagcgattccacactgtgctggagcagctgggggtggccccggtcctgggcaagcagcgggctgtgaggacgctctgggccaggctgcagcgcgagcgccccgagctgctgggctctttcgaggatgttctgatacgcgcgtcggcctgcctggaggaggcggcccgggagcgcgacggcctggagcaggcgctgcggaggcgcgagagcgagcacgagagggaggtgcgcgctctgtacgaggagacggagcagcttcgggagcagagccggcgcccgccgagtcaggtgggcctcgggccccgcccctcccgccaggcccaatcccacctcgctggcctccctggctccgccttctctgaattaatccctccccgacggccccacctccgcgggtccaggctgccctcagcccgaggagatcccactgggcctcacgtatcacccccgtccggtcttctccacccgaccccgctccgcccgggcccactcccagcccctggccctccgtgtacctcttttgcatggccgagcggccggcggaggctcagtggtcctccgtgcgtcccagaacttcgcccgcggggagcggagaagccgtctggagctggagctgcagagccgcgagcaggacctggaacgcgcgggcctgcggcagcgggagttagagcagcagctgcacgcccaggctgcggagcacctggaggcacaggcccagaactcccagctgtggcgggcgcacgaggcgctgcgaacgcagctggagggggcgcaggagcagatccgcaggctggagagcgaagcacgaggccgccaggagcaaacccaacggtgccgtgggacggggctgggcgggccccggtgcgtgtcccgggggcggggccgacgggcgctcaggtctgggccactttcatccccatctcaagtcccaggcccgccccgtgggaaggaggatcttctagggggtccgggggctccccaaggagccttcctgcagccgggtcaccacctcccatccacagagacgtggtcgccgtctccaggaacatgcagaaagagaaagtcagcctgctacggcaactggagctgctcagggagctgaatacacggctgcgggatgacagggacgcctgcgaggccaggcgggcgggcagcagctgcaggaaggctctgacaacagcccgcctgcctgggcccacctgctgctgctgctgttgctgggctcggccccccagacgcggctctggccaccttcccagtgcccggtgaccagccccgagtgactcacggaccatgagctagaagctgcccttgcaggaggcttgtcatgggtcgggggtgcccactcaggatgcaggctctccccagtgggccccaggctcgcctgactgaagacatgaaggacctagcctaggagtggtcagggtcccgggagtggccagggtcccgtgtgtgccctctgccagtcttcgctctgtccccgttcaatcaaccccatctcagttcagcagaaaaccccctcgtcaaataaaacccactgactgcactgcg

SEQ ID NO: 8649 - protein, 468 aa, Homo sapiens
MPAGMFVGVASAQGANPCRTPEETFESGGLDVQGTAGSLDEEEEEEERFHTVLEQLGVAPVLGKQRAVRTLWARLQRERPELLGSFEDVLIRASACLEEAARERDGLEQALRRRESEHEREVRALYEETEQLREQSRRPPSQVGLGPRPSRQAQSHLAGLPGSAFSELIPPRRPHLRGSRLPSARGDPTGPHVSPPSGLLHPTPLRPGPLPAPGPPCTSFAWPSGRRRLSGPPCVPELRPRGAEKPSGAGAAEPRAGPGTRGPAAAGVRAAAARPGCGAPGGTGPELPAVAGARGAANAAGGGAGADPQAGERSTRPPGANPTVPWDGAGRAPVRVPGAGPTGAQVWATFIPISSPRPAPWEGGSSRGSGGSPRSLPAAGSPPPIHRDVVAVSRNMQKEKVSLLRQLELLRELNTRLRDDRDACEARRAGSSCRKALTTARLPGPTCCCCCCWARPPRRGSGHLPSAR

SEQ ID NO: 8650 - DNA, 922 bp, Homo sapiens
gtatcacccccgtccggtcttctccacccgaccccgctccgcccgggcccactcccagcccctggccctccgtgtacctcttttgcatggccgagcggccggcggaggctcagtggtcctccgtgcgtcccagaacttcgcccgcggggagcggagaagccgtctggagctggagctgcagagccgcgagcaggacctggaacgcgcgggcctgcggcagcgggagttagagcagcagctgcacgcccaggctgcggagcacctggaggcacaggcccagaactcccagctgtggcgggcgcacgaggcgctgcgaacgcagctggagggggcgcaggagcagatccgcaggctggagagcgaagcacgaggccgccaggagcaaacccaacgagacgtggtcgccgtctccaggaacatgcagaaagagaaagtcagcctgctacggcaactggagctgctcagggagctgaatacacggctgcgggatgacagggacgcctgcgaggccaggcgggcgggcagcagctgcaggaaggctctgacaacagcccgcctgcctgggcccacctgctgctgctgctgttgctgggctcggccccccagacgcggctctggccaccttcccagtgcccggtgaccagccccgagtgactcacggaccatgagctagaagctgcccttgcaggaggcttgtcatgggtcgggggtgcccactcaggatgcaggctctccccagtgggccccaggctcgcctgactgaagacatgaaggacctagcctaggagtggtcagggtcccgggagtggccagggtcccgtgtgtgccctctgccagtcttcgctctgtccccgttcaatcaaccccatctcagttcagcagaaaaccccctcgtcaaataaaacccactgactgcactgcg

SEQ ID NO: 8651 - protein, 73 aa, Homo sapiens; identical to SEQ ID NO: 8645

SEQ ID NO: 8652 - DNA, 1476 bp, Homo sapiens
cgcgggttcagacctgccgagcgcccgccgccgcgggaggggcttgaggccggggcggggccggggcggggcggggcggggcgtccccctcgtaggctccgggccgcgcattctcagcgctgggagccgccgcccccgcagctgctgccgccgccgccagggcccggactcggacgcgtggtagcctagagtcctggggagcttctgtccacctgtcctgcagaggagtcgtttccagcccggctgccccaggatgggtgagttcaacgagaagaagacaacatgtggcaccgtttgcctcaagtacctgctgtttacctacaattgctgcttctggctggctggcctggctgtcatggcagtgggcatctggacgctggccctcaagagtgactacatcagcctgctggcctcaggcacctacctggccacagcctacatcctggtggtggcgggcactgtcgtcatggtgactggggtcttgggctgctgcgccaccttcaaggagcgtcggaacctgctgcgcctgtacttcatcctgctcctcatcatctttctgctggagatcatcgctggtatcctcgcctacgcctactaccagcagctgaacacggagctcaaggagaacctgaaggacaccatgaccaagcgctaccaccagccgggccatgaggctgtgaccagcgctgtggaccagctgcagcaggagttccactgctgtggcagcaacaactcacaggactggcgagacagtgagtggatccgctcacaggaggccggtggccgtgtggtcccagacagctgctgcaagacggtggtggctctttgtgggcagcgagaccatgcctccaacatctacaaggtggagggcggctgcatcaccaagttggagaccttcatccaggagcacctgagggtcattggggctgtggggatcggcattgcctgtgtgcaggtctttggcatgatcttcacgtgctgcctgtacaggagtctcaagctggagcactactgaccctgccttgggccttgctgctgctgcacccaactactgagctgagaccactgagtaccaggggctgggctccctgatgacacccaccctgtgccatcaccataacctctggggaccccaacctcagaggcagcttcaagtgccttttgctgcgcaccaatgcccagcaggggaggtgaggggggctggcggggcgaagtttggggggtgttttgtggggctccccagacacactctctgcctggtggtcagatgcaggttggaaggggccttgctgagtggcgcaaggccgagcgttcccagcagggggagaaacccttcacaccccaggcccttcaggaactggggccttgccttgcagccacatggccccatcccagttggggaagccaggtgagctctgacccttgggcctgggcctctgcccctcccaacccagccctcgtctccctcgacagcgc

SEQ ID NO: 8653 - protein, 253 aa, Homo sapiens; identical to SEQ ID NO: 1238

SEQ ID NO: 8654 - DNA, 1676 bp, Homo sapiens
cgcgggttcagacctgccgagcgcccgccgccgcgggaggggcttgaggccggggcggggccggggcggggcggggcggggcgtccccctcgtaggctccgggccgcgcattctcagcgctgggagccgccgcccccgcagctgctgccgccgccgccagggcccggactcggacgcgtggtagcctagagtcctggggagcttctgtccacctgtcctgcagaggagtcgtttccagcccggctgccccaggatgggtgagttcaacgagaagaagacaacatgtggcaccgtttgcctcaagtacctgctgtttacctacaattgctgcttctggctggctggcctggctgtcatggcagtgggcatctggacgctggccctcaagagtgactacatcagcctgctggcctcaggcacctacctggccacagcctacatcctggtggtggcgggcactgtcgtcatggtgactggggtcttgggctgctgcgccaccttcaaggagcgtcggaacctgctgcgcctgtacttcatcctgctcctcatcatctttctgctggagatcatcgctggtatcctcgcctacgcctactaccagcagctgaacacggagctcaaggagaacctgaaggacaccatgaccaagcgctaccaccagccgggccatgaggctgtgaccagcgctgtggaccagctgcagcaggagttccactgctgtggcagcaacaactcacaggactggcgagacagtgagtggatccgctcacaggaggccggtggccgtgtggtcccagacagctgctgcaagacggtggtggctctttgtgggcagcgagaccatgcctccaacatctacaaggtggagggcggctgcatcaccaagttggagaccttcatccaggagcacctgagggtcattggggctgtggggatcggcattgcctgtgtgcaggtctttggcatgatcttcacgtgctgcctgtacaggagtctcaagctggagcactactgaccctgccttgggccttgctgctgctgcacccaactactgagctgagaccactgagtaccaggggctgggctccctgatgacacccaccctgtgccatcaccataacctctggggaccccaacctcagaggcagcttcaagtgccttttgctgcgcaccaatgcccagcaggggaggtgaggggggctggcggggcgaagtttggggggtgttttgtggggctccccagacacactctctgcctggtggtcagatgcaggttggaaggggccttgctgagtggcgcaaggccgagcgttcccagcagggggagaaacccttcacaccccaggcccttcaggaactggggccttgccttgcagccacatggccccatcccagttggggaagccaggtgagctctgacccttgggcctgggcctctgcccctcccaacccagccctcgtctccctcgacagcgcccctgctgtcttccccaccgcagtcaccaccacccgaaatgccacgtggtcactgtgcactgccctgttcatgtgcctctgcggggcagggccttcctggttttgttcactgctgtacccagatgcctacaaccatccctgccacatacaggtgctcaataaacacttgtagagcagatggacgagctcgctgtgctggt

SEQ ID NO: 8655 - protein, 253 aa, Homo sapiens; identical to SEQ ID NO: 1238

SEQ ID NO: 8656 - DNA, 1324 bp, Homo sapiens
cgtaggctccgggccgcgcattctcagcgctgggagccgccgcccccgcagctgctgccgccgccgccagggcccggactcggacgcgtggtagccccaggatgggtgagttcaacgagaagaagacaacatgtggcaccgtttgcctcaagtacctgctgtttacctacaattgctgcttctggctggctggcctggctgtcatggcagtgggcatctggacgctggccctcaagagtgactacatcagcctgctggcctcaggcacctacctggccacagcctacatcctggtggtggcgggcactgtcgtcatggtgactggggtcttgggctgctgcgccaccttcaaggagcgtcggaacctgctgcgcctgtacttcatcctgctcctcatcatctttctgctggagatcatcgctggtatcctcgcctacgcctactaccagcagctgaacacggagctcaaggagaacctgaaggacaccatgaccaagcgctaccaccagccgggccatgaggctgtgaccagcgctgtggaccagctgcagcaggagttccactgctgtggcagcaacaactcacaggactggcgagacagtgagtggatccgctcacaggaggccggtggccgtgtggtcccagacagctgctgcaagacggtggtggctctttgtgggcagcgagaccatgcctccaacatctacaaggtggagggcggctgcatcaccaagttggagaccttcatccaggagcacctgagggtcattggggctgtggggatcggcattgcctgtgtgcaggtctttggcatgatcttcacgtgctgcctgtacaggagtctcaagctggagcactactgaccctgccttgggccttgctgctgctgcacccaactactgagctgagaccactgagtaccaggggctgggctccctgatgacacccaccctgtgccatcaccataacctctggggaccccaacctcagaggcagcttcaagtgccttttgctgcgcaccaatgcccagcaggggaggtgaggggggctggcggggcgaagtttggggggtgttttgtggggctccccagacacactctctgcctggtggtcagatgcaggttggaaggggccttgctgagtggcgcaaggccgagcgttcccagcagggggagaaacccttcacaccccaggcccttcaggaactggggccttgccttgcagccacatggccccatcccagttggggaagccaggtgagctctgacccttgggcctgggcctctgcccctcccaacccagccctcgtctccctcgacagcgc

SEQ ID NO: 8657 - protein, 253 aa, Homo sapiens; identical to SEQ ID NO: 1238

SEQ ID NO: 8658 - DNA, 1524 bp, Homo sapiens
cgtaggctccgggccgcgcattctcagcgctgggagccgccgcccccgcagctgctgccgccgccgccagggcccggactcggacgcgtggtagccccaggatgggtgagttcaacgagaagaagacaacatgtggcaccgtttgcctcaagtacctgctgtttacctacaattgctgcttctggctggctggcctggctgtcatggcagtgggcatctggacgctggccctcaagagtgactacatcagcctgctggcctcaggcacctacctggccacagcctacatcctggtggtggcgggcactgtcgtcatggtgactggggtcttgggctgctgcgccaccttcaaggagcgtcggaacctgctgcgcctgtacttcatcctgctcctcatcatctttctgctggagatcatcgctggtatcctcgcctacgcctactaccagcagctgaacacggagctcaaggagaacctgaaggacaccatgaccaagcgctaccaccagccgggccatgaggctgtgaccagcgctgtggaccagctgcagcaggagttccactgctgtggcagcaacaactcacaggactggcgagacagtgagtggatccgctcacaggaggccggtggccgtgtggtcccagacagctgctgcaagacggtggtggctctttgtgggcagcgagaccatgcctccaacatctacaaggtggagggcggctgcatcaccaagttggagaccttcatccaggagcacctgagggtcattggggctgtggggatcggcattgcctgtgtgcaggtctttggcatgatcttcacgtgctgcctgtacaggagtctcaagctggagcactactgaccctgccttgggccttgctgctgctgcacccaactactgagctgagaccactgagtaccaggggctgggctccctgatgacacccaccctgtgccatcaccataacctctggggaccccaacctcagaggcagcttcaagtgccttttgctgcgcaccaatgcccagcaggggaggtgaggggggctggcggggcgaagtttggggggtgttttgtggggctccccagacacactctctgcctggtggtcagatgcaggttggaaggggccttgctgagtggcgcaaggccgagcgttcccagcagggggagaaacccttcacaccccaggcccttcaggaactggggccttgccttgcagccacatggccccatcccagttggggaagccaggtgagctctgacccttgggcctgggcctctgcccctcccaacccagccctcgtctccctcgacagcgcccctgctgtcttccccaccgcagtcaccaccacccgaaatgccacgtggtcactgtgcactgccctgttcatgtgcctctgcggggcagggccttcctggttttgttcactgctgtacccagatgcctacaaccatccctgccacatacaggtgctcaataaacacttgtagagcagatggacgagctcgctgtgctggt

SEQ ID NO: 8659 - protein, 253 aa, Homo sapiens; identical to SEQ ID NO: 1238

SEQ ID NO: 8660 - DNA, 335 bp, Homo sapiens
attctcagcgctgggagccgccgcccccgcagctgctgccgccgccgccagggcccggactcggacgcgtggtagcctagagtcctggggagcttctgtccacctgtcctgcagaggagtcgtttccagcccggctgccccaggatgggtgagttcaacgagaagaagacaacatgtggcaccgtttgcctcaagtacctgctgtttacctacaattgctgcttctggctggctggcctggctgtcatggcagtgggcatctggacgctggccctcaagagtgactacatcagcctgctggcctcaggcacctacctggccacagcctacatcct

SEQ ID NO: 8661 - protein, 62 aa, Homo sapiens
MGEFNEKKTTCGTVCLKYLLFTYNCCFWLAGLAVMAVGIWTLALKSDYISLLASGTYLATAY

SEQ ID NO: 8662 - DNA, 851 bp, Homo sapiens
attctcagcgctgggagccgccgcccccgcagctgctgccgccgccgccagggcccggactcggacgcgtggtagccccaggatgggtgagttcaacgagaagaagacaacatgtggcaccgtttgcctcaagtacctgctgtttacctacaattgctgcttctgggtgaggaggggtcgccttgcccccacccccacccccacccctcccgggccaccatcagacctgggcagatgcgatgacctttgtgtactgcttgtagctggctggcctggctgtcatggcagtgggcatctggacgctggccctcaagagtgactacatcagcctgctggcctcaggcacctacctggccacagcctacatcctggtggtggcgggcactgtcgtcatggtgactggggtcttgggctgctgcgccaccttcaaggagcgtcggaacctgctgcgcctggtcaggagggcgcagggccacggggtgggggtggtgcagatgggcccaaggaggttgtcgctgcaggctttgaacctgtgccttgctgtgctcacctggggggggggtcacggtccttccacacctgcctagtcctgtgggtccccacgttcctgctggaccagctgagggaagacaccagctccgcaagaaagcttcagggagggtggccgcccctcagcccccacctggagcctggggagccggggtggggactctgctctgaggtgcactaggtctaggcactaggcctcagaacaagggtgcccttgtgctgccccccccagtacttcatcctgctcctcatcatctttctgctggagatcatcgctggtatcctcgcctacgcctactacc

SEQ ID NO: 8663 - protein, 101 aa, Homo sapiens [sequence omitted]

SEQ ID NO: 8664 - DNA, 1893 bp, Homo sapiens
attctcagcgctgggagccgccgcccccgcagctgctgccgccgccgccagggcccggactcggacgcgtggtagcctagagtcctggggagcttctgtccacctgtcctgcagaggagtcgtttccagcccggctgccccaggatgggtgagttcaacgagaagaagacaacatgtggcaccgtttgcctcaagtacctgctgtttacctacaattgctgcttctggctggctggcctggctgtcatggcagtgggcatctggacgctggccctcaagagtgactacatcagcctgctggcctcaggcacctacctggccacagcctacatcctggtggtggcgggcactgtcgtcatggtgactggggtcttgggctgctgcgccaccttcaaggagcgtcggaacctgctgcgcctggtcaggagggcgcagggccacggggtgggggtggtgcagatgggcccaaggaggttgtcgctgcaggctttgaacctgtgccttgctgtgctcacctggggggggggtcacggtccttccacacctgcctagtcctgtgggtccccacgttcctgctggaccagctgagggaagacaccagctccgcaagaaagcttcagggagggtggccgcccctcagcccccacctggagcctggggagccggggtggggactctgctctgaggtgcactaggtctaggcactaggcctcagaacaagggtgcccttgtgctgccccccccagtacttcatcctgctcctcatcatctttctgctggagatcatcgctggtatcctcgcctacgcctactaccagcagctgaacacggagctcaaggagaacctgaaggacaccatgaccaagcgctaccaccagccgggccatgaggctgtgaccagcgctgtggaccagctgcagcaggagttccactgctgtggcagcaacaactcacaggactggcgagacagtgagtggatccgctcacaggaggccggtggccgtgtggtcccagacagctgctgcaagacggtggtggctctttgtgggcagcgagaccatgcctccaacatctacaaggtggagggcggctgcatcaccaagttggagaccttcatccaggagcacctgagggtcattggggctgtggggatcggcattgcctgtgtgcaggtctttggcatgatcttcacgtgctgcctgtacaggagtctcaagctggagcactactgaccctgccttgggccttgctgctgctgcacccaactactgagctgagaccactgagtaccaggggctgggctccctgatgacacccaccctgtgccatcaccataacctctggggaccccaacctcagaggcagcttcaagtgccttttgctgcgcaccaatgcccagcaggggaggtgaggggggctggcggggcgaagtttggggggtgttttgtggggctccccagacacactctctgcctggtggtcagatgcaggttggaaggggccttgctgagtggcgcaaggccgagcgttcccagcagggggagaaacccttcacaccccaggcccttcaggaactggggccttgccttgcagccacatggccccatcccagttggggaagccaggtgagctctgacccttgggcctgggcctctgcccctcccaacccagccctcgtctccctcgacagcgcccctgctgtcttccccaccgcagtcaccaccacccgaaatgccacgtggtcactgtgcactgccctgttcatgtgcctctgcggggcagggccttcctggttttgttcactgctgtacccagatgcctacaaccatccctgccacatacaggtgctcaataaacacttgtagagcagatggacgagctcgctgtgctggt

SEQ ID NO: 8665 - protein, 135 aa, Homo sapiens
MGEFNEKKTTCGTVCLKYLLFTYNCCFWLAGLAVMAVGIWTLALKSDYISLLASGTYLATAYILVVAGTVVMVTGVLGCCATFKERRNLLRLVRRAQGHGVGVVQMGPRRLSLQALNLCLAVLTWGGGHGPSTPA

SEQ ID NO: 8666 - DNA, 879 bp, Homo sapiens
gctgccgccgccgccagggcccggactcggacgcgtggtagcctagagtcctggggagcttctgtccacctgtcctgcagaggagtcgtttccagcccggctgccccaggatgggtgagttcaacgagaagaagacaacatgtggcaccgtttgcctcaagtacctgctgtttacctacaattgctgcttctgggtgaggaggggtcgccttgcccccacccccacccccacccctcccgggccaccatcagacctgggcagatgcgatgacctttgtgtactgcttgtagctggctggcctggctgtcatggcagtgggcatctggacgctggccctcaagagtgactacatcagcctgctggcctcaggcacctacctggccacagcctacatcctggtggtggcgggcactgtcgtcatggtgactggggtcttgggctgctgcgccaccttcaaggagcgtcggaacctgctgcgcctggtcaggagggcgcagggccacggggtgggggtggtgcagatgggcccaaggaggttgtcgctgcaggctttgaacctgtgccttgctgtgctcacctggggggggggtcacggtccttccacacctgcctagtcctgtgggtccccacgttcctgctggaccagctgagggaagacaccagctccgcaagaaagcttcagggagggtggccgcccctcagcccccacctggagcctggggagccggggtggggactctgctctgaggtgcactaggtctaggcactaggcctcagaacaagggtgcccttgtgctgccccccccagtacttcatcctgctcctcatcatctttctgctggagatcatcgctggtatcctcgcctacgcctactacc

SEQ ID NO: 8667 - protein, 101 aa, Homo sapiens [sequence omitted]

SEQ ID NO: 8668 - DNA, 905 bp, Homo sapiens
gctgccgccgccgccagggcccggactcggacgcgtggtagccccaggatgggtgagttcaacgagaagaagacaacatgtggcaccgtttgcctcaagtacctgctgtttacctacaattgctgcttctggctggctggcctggctgtcatggcagtgggcatctggacgctggccctcaagagtgactacatcagcctgctggcctcaggcacctacctggccacagcctacatcctggtggtggcgggcactgtcgtcatggtgactggggtcttgggctgctgcgccaccttcaaggagcgtcggaacctgctgcgcctggtcaggagggcgcagggccacggggtgggggtggtgcagatgggcccaaggaggttgtcgctgcaggctttgaacctgtgccttgctgtgctcacctggggggggggtcacggtccttccacacctgcctagtcctgtgggtccccacgttcctgctggaccagctgagggaagacaccagctccgcaagaaagcttcagggagggtggccgcccctcagcccccacctggagcctggggagccggggtggggactctgctctgaggtgcactaggtctaggcactaggcctcagaacaagggtgcccttgtgctgccccccccagtacttcatcctgctcctcatcatctttctgctggagatcatcgctggtatcctcgcctacgcctactaccagcaggtgaggggcctgggcaggccattcagagacacagacatgcacaggcggggcggacacacacacatgcacacgcgtggctagccccaacccccacccccatggtcccagagctaaccaatgtgccactgggccctggagatggggtctaggtctctgcaggggcacatggggtcaggcagg

SEQ ID NO: 8669 - protein, 135 aa, Homo sapiens; identical to SEQ ID NO: 8665

SEQ ID NO: 8670 - DNA, 144 bp, Homo sapiens
aggctgtagctgccgctgtttgtgggggaagggccagtgatgggtctggagcgaaggccaagagtggggcacctgggggaagcctagagtcctggggagcttctgtccacctgtcctgcagaggagtcgtttccagcccggctg

SEQ ID NO: 8671 - protein, 46 aa, Homo sapiens
AVAAAVCGGRASDGSGAKAKSGAPGGSLESWGASVHLSCRGVVSSP

SEQ ID NO: 8672 - DNA, 1319 bp, Homo sapiens
tgacctgacatgtccttgcccctctagcctagagtcctggggagcttctgtccacctgtcctgcagaggagtcgtttccagcccggctgccccaggatgggtgagttcaacgagaagaagacaacatgtggcaccgtttgcctcaagtacctgctgtttacctacaattgctgcttctggctggctggcctggctgtcatggcagtgggcatctggacgctggccctcaagagtgactacatcagcctgctggcctcaggcacctacctggccacagcctacatcctggtggtggcgggcactgtcgtcatggtgactggggtcttgggctgctgcgccaccttcaaggagcgtcggaacctgctgcgcctgtacttcatcctgctcctcatcatctttctgctggagatcatcgctggtatcctcgcctacgcctactaccagcagctgaacacggagctcaaggagaacctgaaggacaccatgaccaagcgctaccaccagccgggccatgaggctgtgaccagcgctgtggaccagctgcagcaggagttccactgctgtggcagcaacaactcacaggactggcgagacagtgagtggatccgctcacaggaggccggtggccgtgtggtcccagacagctgctgcaagacggtggtggctctttgtgggcagcgagaccatgcctccaacatctacaaggtggagggcggctgcatcaccaagttggagaccttcatccaggagcacctgagggtcattggggctgtggggatcggcattgcctgtgtgcaggtctttggcatgatcttcacgtgctgcctgtacaggagtctcaagctggagcactactgaccctgccttgggccttgctgctgctgcacccaactactgagctgagaccactgagtaccaggggctgggctccctgatgacacccaccctgtgccatcaccataacctctggggaccccaacctcagaggcagcttcaagtgccttttgctgcgcaccaatgcccagcaggggaggtgaggggggctggcggggcgaagtttggggggtgttttgtggggctccccagacacactctctgcctggtggtcagatgcaggttggaaggggccttgctgagtggcgcaaggccgagcgttcccagcagggggagaaacccttcacaccccaggcccttcaggaactggggccttgccttgcagccacatggccccatcccagttggggaagccaggtgagctctgacccttgggcctgggcctctgcccctcccaacccagccctcgtctccctcgacagcgc

SEQ ID NO: 8673 - protein, 253 aa, Homo sapiens; identical to SEQ ID NO: 1238

SEQ ID NO: 8674 - DNA, 1429 bp, Homo sapiens
tgacctgacatgtccttgcccctctagcctagagtcctggggagcttctgtccacctgtcctgcagaggagtcgtttccagcccggctgccccaggatgggtgagttcaacgagaagaagacaacatgtggcaccgtttgcctcaagtacctgctgtttacctacaattgctgcttctggctggctggcctggctgtcatggcagtgggcatctggacgctggccctcaagagtgactacatcagcctgctggcctcaggcacctacctggccacagcctacatcctggtggtggcgggcactgtcgtcatggtgactggggtcttgggctgctgcgccaccttcaaggagcgtcggaacctgctgcgcctgtacttcatcctgctcctcatcatctttctgctggagatcatcgctggtatcctcgcctacgcctactaccagcagctgaacacggagctcaaggagaacctgaaggacaccatgaccaagcgctaccaccagccgggccatgaggctgtgaccagcgctgtggaccagctgcagcaggagttccactgctgtggcagcaacaactcacaggactggcgagacagtgagtggatccgctcacaggaggccggtggccgtgtggtcccagacagctgctgcaagacggtggtggctctttgtgggcagcgagaccatgcctccaacatctacaaggtggagggcggctgcatcaccaagttggagaccttcatccaggagcacctgagggtcattggggctgtggggatcggcattgcctgtgtgcaggtctttggcatgatcttcacgtgctgcctgtacaggagtctcaagctggagcactactgaccctgccttgggccttgctgctgctgcacccaactactgagctgagaccactgagtaccaggggctgggctccctgatgacacccaccctgtgccatcaccataacctctggggaccccaacctcagaggcagcttcaagtgccttttgctgcgcaccaatgcccagcaggggagatgcaggttggaaggggccttgctgagtggcgcaaggccgagcgttcccagcagggggagaaacccttcacaccccaggcccttcaggaactggggccttgccttgcagccacatggccccatcccagttggggaagccaggtgagctctgacccttgggcctgggcctctgcccctcccaacccagccctcgtctccctcgacagcgcccctgctgtcttccccaccgcagtcaccaccacccgaaatgccacgtggtcactgtgcactgccctgttcatgtgcctctgcggggcagggccttcctggttttgttcactgctgtacccagatgcctacaaccatccctgccacatacaggtgctcaataaacacttgtagagcagatggacgagc

SEQ ID NO: 8675 - protein, 253 aa, Homo sapiens; identical to SEQ ID NO: 1238

SEQ ID NO: 8676 - DNA, 1519 bp, Homo sapiens
tgacctgacatgtccttgcccctctagcctagagtcctggggagcttctgtccacctgtcctgcagaggagtcgtttccagcccggctgccccaggatgggtgagttcaacgagaagaagacaacatgtggcaccgtttgcctcaagtacctgctgtttacctacaattgctgcttctggctggctggcctggctgtcatggcagtgggcatctggacgctggccctcaagagtgactacatcagcctgctggcctcaggcacctacctggccacagcctacatcctggtggtggcgggcactgtcgtcatggtgactggggtcttgggctgctgcgccaccttcaaggagcgtcggaacctgctgcgcctgtacttcatcctgctcctcatcatctttctgctggagatcatcgctggtatcctcgcctacgcctactaccagcagctgaacacggagctcaaggagaacctgaaggacaccatgaccaagcgctaccaccagccgggccatgaggctgtgaccagcgctgtggaccagctgcagcaggagttccactgctgtggcagcaacaactcacaggactggcgagacagtgagtggatccgctcacaggaggccggtggccgtgtggtcccagacagctgctgcaagacggtggtggctctttgtgggcagcgagaccatgcctccaacatctacaaggtggagggcggctgcatcaccaagttggagaccttcatccaggagcacctgagggtcattggggctgtggggatcggcattgcctgtgtgcaggtctttggcatgatcttcacgtgctgcctgtacaggagtctcaagctggagcactactgaccctgccttgggccttgctgctgctgcacccaactactgagctgagaccactgagtaccaggggctgggctccctgatgacacccaccctgtgccatcaccataacctctggggaccccaacctcagaggcagcttcaagtgccttttgctgcgcaccaatgcccagcaggggaggtgaggggggctggcggggcgaagtttggggggtgttttgtggggctccccagacacactctctgcctggtggtcagatgcaggttggaaggggccttgctgagtggcgcaaggccgagcgttcccagcagggggagaaacccttcacaccccaggcccttcaggaactggggccttgccttgcagccacatggccccatcccagttggggaagccaggtgagctctgacccttgggcctgggcctctgcccctcccaacccagccctcgtctccctcgacagcgcccctgctgtcttccccaccgcagtcaccaccacccgaaatgccacgtggtcactgtgcactgccctgttcatgtgcctctgcggggcagggccttcctggttttgttcactgctgtacccagatgcctacaaccatccctgccacatacaggtgctcaataaacacttgtagagcagatggacgagctcgctgtgctggt

SEQ ID NO: 8677 - protein, 253 aa, Homo sapiens; identical to SEQ ID NO: 1238

SEQ ID NO: 8678 - DNA, 593 bp, Homo sapiens
ggccgggcagtctgggacgcgccgccgccatgatcatccctgtacgctgcttcacttgtggcaagatcgtcggcaacaagtgggaggcttacctggggctgctgcaggccgagtacaccgagggggatgcgctggatgccctgggcctgaagcgctactgctgccgccggatgctgctggcccacgtggacctgatcgagaagctgctcaattatgcacccctggagaagtgaccacgctggaacccacccacccgctgtgctgaccatgggccctgagcgtcctgccccgaattcacgaggctgaggcatccgggagctggcgtaatgcctggccgcagtgtatgttggaggcatggtctcgctgcccacaaagagccaccaccgtcttgcagcagctgtctgggaccacacggccaccggcctcctgtgagcggatccactcactgtctcgccagtcctgtgagttgttgctgccacagcagtggaactgcatcaagaacaaggctggggttgagacctggggccagaggctcctgcagaggtccagggaggccctggggatgcacgcgccctcccagcaccacccaccca

SEQ ID NO: 8679 - protein, 88 aa, Homo sapiens
MPGRSVCWRHGLAAHKEPPPSCSSCLGPHGHRPPVSGSTHCLASPVSCCCHSSGTASRTRLGLRPGARGSCRGPGRPWGCTRPPSTTH

SEQ ID NO: 8680 - DNA, 1419 bp, Homo sapiens
gccgggccgggcagtctgggacgcgccgccgccatgatcatccctgtacgctgcttcacttgtggcaagatcgtcggcaacaagtgggaggcttacctggggctgctgcaggccgagtacaccgagggggatgcgctggatgccctgggcctgaagcgctactgctgccgccggatgctgctggcccacgtggacctgatcgagaagctgctcaattatgcacccctggagaagtgaccacgctggaacccacccacccgctgtgctgaccatgggccctgagcgtcctgccccgaattcacgaggctgaggcatccgggagctggcgtaatgcctggccgcagtgtgtgtgtatccgataccccactctggaaggaaccatccagtaaaggtctttcagaaccactaaggtcccagccctcactaggatgtcaggagccaggtctaggcccagctttcacactgtggcagcccagtgaagcagactgggccatgaactctcctagccctggggccagcctgttccacaggcacccctgcaggaggcgctgccaggagagccttccatctcggggctctttgaggttccctccttctgggtgttcttcaggctgagcagagaggctcctgtaccctctctctcggaatctgaagagccagatttaggccgggcaaaggggctcacccctataatcccaggactttgggaggccaaggcaggaggatcacttgagtccagaaattcaagacccgcctgggcatcataatgagaccccatctctacaacaaaatttaataaattagctgggcacagtgttcacacctgtagtcccggccactcggggctgaggcaggaggatcactggaacctgggaggttgccactgcagtgaactgtgtttgcaccactgcactccagcctgggcaacagagtaagactctgtctcaacacaactatgaaaaagaagagagaaacagattttctggggcccagtctctgctgtggtcagggctgccagtacctgctggcctctgcccactgctgcctgtccctgagcgtcccacccaagcccagcagggagggcaggccttaagacgctcctagctgggttgggaggtggccctaaggaggccctgctgtccaggcagtgctgccagcaagcaccccaggtcagatgtccctgctgcccagatatctggcgtggtgtcctctggtaggggagaacgggtctgcctgagggtctacagttctgagccttaaggacaggaacctgggcagtggggggcacaatcagtgaccgagccctggctcccatctccagggtacctctgccagacaccaggctctggtacctcctaccctctggcccccagcagggcctataggctcctccatgtaaaccccctcaccctactgccc

SEQ ID NO: 8681 - protein, 67 aa, Homo sapiens; identical to SEQ ID NO: 1246

SEQ ID NO: 8682 - DNA, 887 bp, Homo sapiens
gccgggccgggcagtctgggacgcgccgccgccatgatcatccctgtacgctgcttcacttgtggcaagatcgtcggcaacaagtgggaggcttacctggggctgctgcaggccgagtacaccgagggggatgcgctggatgccctgggcctgaagcgctactgctgccgccggatgctgctggcccacgtggacctgatcgagaagctgctcaattatgcacccctggagaagtgaccacgctggaacccacccacccgctgtgctgaccatgggccctgagcgtcctgccccgaattcacgaggctgaggcatccgggagctggcgtaatgcctggccgcagtgtgtgtgtatccgataccccactctggaaggaaccatccagtaaaggtctttcagaaccactaaggtcccagccctcactaggatgtcaggagccaggtctaggcccagctttcacactgtggcagcccagtgaagcagactgggccatgaactctcctagccctggggccagcctgttccacaggcacccctgcaggaggcgctgccaggagagccttccatctcggggctctttgaggttccctccttctgggtgttcttcaggctgagcagagaggctcctgtaccctctctctcggaatctgaagagccagatttaggccgggcaaaggggctcacccctataatcccaggactttgggaggccaaggcaggaggatcacttgagtccagaaattcaagacccgcctgggcatcataatgagaccccatctctacaacaaaatttaataaattagctgggcacagtgttcacacctgtagtcccggccactcggggctgaggcaggaggatcactggaacctgggaggttgccactgc

SEQ ID NO: 8683 - protein, 67 aa, Homo sapiens; identical to SEQ ID NO: 1246

SEQ ID NO: 8684 - DNA, 819 bp, Homo sapiens
gccgggccgggcagtctgggacgcgccgccgccatgatcatccctgtacgctgcttcacttgtggcaagatcgtcggcaacaagtgggaggcttacctggggctgctgcaggccgagtacaccgagggggatgcgctggatgccctgggcctgaagcgctactgctgccgccggatgctgctggcccacgtggacctgatcgagaagctgctcaattatgcacccctggagaagtgaccacgctggaacccacccacccgctgtgctgaccatgggccctgagcgtcctgccccgaattcacgaggctgaggcatccgggagctggcgtaatgcctggccgcagtgtgtgtgtatccgataccccactctggaaggaaccatccagtaaaggtctttcagaaccactaaggtcccagccctcactaggatgtcaggagccaggtctaggcccagctttcacactgtggcagcccagtgaagcagactgggccatgaactctcctagccctggggccagcctgttccacaggcacccctgcaggaggcgctgccaggagagccttccatctcggggctctttgaggttccctccttctgggtgttcttcaggctgagcagagaggctcctgtaccctctctctcggaatctgaagagccagatttaggccgggcaaaggggctcacccctataatcccaggactttgggaggccaaggcaggaggatcacttgagtccagaaattcaagacccgcctgggcatcataatgagaccccatctctacaacaaaatttaataaattagctgggcacagtgttc

SEQ ID NO: 8685 - protein, 67 aa, Homo sapiens; identical to SEQ ID NO: 1246

SEQ ID NO: 8686 - DNA, 406 bp, Homo sapiens
gccgggccgggcagtctgggacgcgccgccgccatgatcatccctgtacgctgcttcacttgtggcaagatcgtcggcaacaagtgggaggcttacctggggctgctgcaggccgagtacaccgagggggatgcgctggatgccctgggcctgaagcgctactgctgccgccggatgctgctggcccacgtggacctgatcgagaagctgctcaattatgcacccctggagaagtgaccacgctggaacccacccacccgctgtgctgaccatgggccctgagcgtcctgccccgaattcacgaggctgaggcatccgggagctggcgtaatgcctggccgcagtgtgtgtgtatccgataccccactctggaaggaaccatccagtaaaggtctttcagaaccac

SEQ ID NO: 8687 - protein, 67 aa, Homo sapiens; identical to SEQ ID NO: 1246

SEQ ID NO: 8688 - DNA, 1433 bp, Homo sapiens
gtctgagcagggccgtaaagctgcggcggcggttcgcgtttctcgtgtccgcttgactgacagctgcgcggcgggagcgggcggcgcgagcgggaggcggcggcgcagagcttggggcttccttggtcgcacccaccacctgcctgcccactggtcagccttcagggaccctgagcaccgcctggtctctttcctgtggccagcccagaactgaagcgctgcggcatggcgcgcgcctgcctccaggccgtcaagtacctcatgttcgccttcaacctgctcttctggctgggaggctgtggcgtgctgggtgtcggcatctggctggccgccacacaggggagcttcgccacgctgtcctcttccttcccgtccctgtcggctgccaacttgctcatcatcaccggcgcctttgtcatggccatcggcttcgtgggctgcctgggtgccatcaaggagaacaagtgcctcctgctcactttcttcctgctgctgctgctggtgttcctgctggaggccaccatcgccatcctcttcttcgcctacacggacaagattgacaggtatgcccagcaagacctgaagaaaggcttgcacctgtacggcacgcagggcaacgtgggcctcaccaacgcctggagcatcatccagaccgacttccgctgctgtggcgtctccaactacactgactggttcgaggtgtacaacgccacgcgggtacctgactcctgctgcttggagttcagtgagagctgtgggctgcacgcccccggcacctggtggaaggcgccgtgctacgagacggtgaaggtgtggcttcaggagaacctgctggctgtgggcatctttgggctgtgcacggcgctggtgcagatcctgggcctgaccttcgccatgaccatgtactgccaagtggtcaaggcagacacctactgcgcgtaggccgcccaccgcccgcttctctgccaaaaggacgcccacggggagatggccgcacccacagctgcctttcccaccaccagcctcggtgctctgccccatgctgggaggagggagggagggacaggtgcctggagcccccggaaccctgtttctggaaggccctagctcaggtggcttcagggcctccggaccccccctgggaggggtggccacgtgctggctgcggaacccagggcaggggtgggaggggcctccagcactttttatatttacgtattctccaaagcagtgttcacacgggagccagcctgtggcccccagcctcctggaaaacaggttggcgctggaggagccgggtcttggcatcctggaggtggccccactggtcctggtgctccaggcggggccgtggacccctcacctacattccatagtgggcccgtggggctcctggtgcatcttaataaagtgtgagcagcaaccttgcgtct

SEQ ID NO: 8689 - protein, 238 aa, Homo sapiens; identical to SEQ ID NO: 1248

SEQ ID NO: 8690 - DNA, 1317 bp, Homo sapiens
aaagctgcggcggcggttcgcgtttctcgtgtccgcttgactgacagctgcgcggcgggagcgggcggcgcgagcgggaggcggcggcgcagaactgaagcgctgcggcatggcgcgcgcctgcctccaggccgtcaagtacctcatgttcgccttcaacctgctcttctggctgggaggctgtggcgtgctgggtgtcggcatctggctggccgccacacaggggagcttcgccacgctgtcctcttccttcccgtccctgtcggctgccaacttgctcatcatcaccggcgcctttgtcatggccatcggcttcgtgggctgcctgggtgccatcaaggagaacaagtgcctcctgctcactttcttcctgctgctgctgctggtgttcctgctggaggccaccatcgccatcctcttcttcgcctacacggacaagattgacaggtatgcccagcaagacctgaagaaaggcttgcacctgtacggcacgcagggcaacgtgggcctcaccaacgcctggagcatcatccagaccgacttccgctgctgtggcgtctccaactacactgactggttcgaggtgtacaacgccacgcgggtacctgactcctgctgcttggagttcagtgagagctgtgggctgcacgcccccggcacctggtggaaggcgccgtgctacgagacggtgaaggtgtggcttcaggagaacctgctggctgtgggcatctttgggctgtgcacggcgctggtgcagatcctgggcctgaccttcgccatgaccatgtactgccaagtggtcaaggcagacacctactgcgcgtaggccgcccaccgcccgcttctctgccaaaaggacgcccacggggagatggccgcacccacagctgcctttcccaccaccagcctcggtgctctgccccatgctgggaggagggagggagggacaggtgcctggagcccccggaaccctgtttctggaaggccctagctcaggtggcttcagggcctccggaccccccctgggaggggtggccacgtgctggctgcggaacccagggcaggggtgggaggggcctccagcactttttatatttacgtattctccaaagcagtgttcacacgggagccagcctgtggcccccagcctcctggaaaacaggttggcgctggaggagccgggtcttggcatcctggaggtggccccactggtcctggtgctccaggcggggccgtggacccctcacctacattccatagtgggcccgtggggctcctggtgcatcttaataaagtgtgagcagcaaccttgcgtct

SEQ ID NO: 8691 - protein, 238 aa, Homo sapiens; identical to SEQ ID NO: 1248

SEQ ID NO: 8692 - DNA, 1337 bp, Homo sapiens
aaagctgcggcggcggttcgcgtttctcgtgtccgcttgactgacagctgcgcggcgggagcgggcggcgcgagcgggaggcggcggcgcagagcttggggcttccttggtcgcacccaccacctgcctgcccactggtcagccttcagggaccctgagcaccgcctggtctctttcctgtggccagcccagctgggaggctgtggcgtgctgggtgtcggcatctggctggccgccacacaggggagcttcgccacgctgtcctcttccttcccgtccctgtcggctgccaacttgctcatcatcaccggcgcctttgtcatggccatcggcttcgtgggctgcctgggtgccatcaaggagaacaagtgcctcctgctcactttcttcctgctgctgctgctggtgttcctgctggaggccaccatcgccatcctcttcttcgcctacacggacaagattgacaggtatgcccagcaagacctgaagaaaggcttgcacctgtacggcacgcagggcaacgtgggcctcaccaacgcctggagcatcatccagaccgacttccgctgctgtggcgtctccaactacactgactggttcgaggtgtacaacgccacgcgggtacctgactcctgctgcttggagttcagtgagagctgtgggctgcacgcccccggcacctggtggaaggcgccgtgctacgagacggtgaaggtgtggcttcaggagaacctgctggctgtgggcatctttgggctgtgcacggcgctggtgcagatcctgggcctgaccttcgccatgaccatgtactgccaagtggtcaaggcagacacctactgcgcgtaggccgcccaccgcccgcttctctgccaaaaggacgcccacggggagatggccgcacccacagctgcctttcccaccaccagcctcggtgctctgccccatgctgggaggagggagggagggacaggtgcctggagcccccggaaccctgtttctggaaggccctagctcaggtggcttcagggcctccggaccccccctgggaggggtggccacgtgctggctgcggaacccagggcaggggtgggaggggcctccagcactttttatatttacgtattctccaaagcagtgttcacacgggagccagcctgtggcccccagcctcctggaaaacaggttggcgctggaggagccgggtcttggcatcctggaggtggccccactggtcctggtgctccaggcggggccgtggacccctcacctacattccatagtgggcccgtggggctcctggtgcatcttaataaagtgtgagcagcaaccttgcgtct

SEQ ID NO: 8693 - protein, 174 aa, Homo sapiens; identical to SEQ ID NO: 1258

SEQ ID NO: 8694 - DNA, 1298 bp, Homo sapiens
tcgcgtttctcgtgtccgcttgactgacagctgcgcggcgggagcgggcggcgcgagcgggaggcggcggcgcagagcttggggcttccttggtcgcacccaccacctgcctgcccactggtcagccttcagggaccctgagcaccgcctggtctctttcctgtggccagcccagaactgaagcgctgcggcatggcgcgcgcctgcctccaggccgtcaagtacctcatgttcgccttcaacctgctcttctggctgggaggctgtggcgtgctgggtgtcggcatctggctggccgccacacaggggagcttcgccacgctgtcctcttccttcccgtccctgtcggctgccaacttgctcatcatcaccggcgcctttgtcatggccatcggcttcgtgggctgcctgggtgccatcaaggagaacaagtgcctcctgctcactttcttcctgctgctgctgctggtgttcctgctggaggccaccatcgccatcctcttcttcgcctacacggacaagttccgctgctgtggcgtctccaactacactgactggttcgaggtgtacaacgccacgcgggtacctgactcctgctgcttggagttcagtgagagctgtgggctgcacgcccccggcacctggtggaaggcgccgtgctacgagacggtgaaggtgtggcttcaggagaacctgctggctgtgggcatctttgggctgtgcacggcgctggtgcagatcctgggcctgaccttcgccatgaccatgtactgccaagtggtcaaggcagacacctactgcgcgtaggccgcccaccgcccgcttctctgccaaaaggacgcccacggggagatggccgcacccacagctgcctttcccaccaccagcctcggtgctctgccccatgctgggaggagggagggagggacaggtgcctggagcccccggaaccctgtttctggaaggccctagctcaggtggcttcagggcctccggaccccccctgggaggggtggccacgtgctggctgcggaacccagggcaggggtgggaggggcctccagcactttttatatttacgtattctccaaagcagtgttcacacgggagccagcctgtggcccccagcctcctggaaaacaggttggcgctggaggagccgggtcttggcatcctggaggtggccccactggtcctggtgctccaggcggggccgtggacccctcacctacattccatagtgggcccgtggggctcctggtgcatcttaataaagtgtgagcagcaaccttgcgtct

SEQ ID NO: 8695 - protein, 204 aa, Homo sapiens
MARACLQAVKYLMFAFNLLFWLGGCGVLGVGIWLAATQGSFATLSSSFPSLSAANLLIITGAFVMAIGFVGCLGAIKENKCLLLTFFLLLLLVFLLEATIAILFFAYTDKFRCCGVSNYTDWFEVYNATRVPDSCCLEFSESCGLHAPGTWWKAPCYETVKVWLQENLLAVGIFGLCTALVQILGLTFAMTMYCQVVKADTYCA

SEQ ID NO: 8696 - DNA, 533 bp, Homo sapiens
tctcgtgtccgcttgactgacagctgcgcggcgggagcgggcggcgcgagcgggaggcggcggcgcagagcttggggcttccttggtcgcacccaccacctgcctgcccactggtcagccttcagggaccctgagcaccgcctggtctctttcctgtggccagcccagaactgaagcgctgcggcatggcgcgcgcctgcctccaggccgtcaagtacctcatgttcgccttcaacctgctcttctggctgggaggctgtggcgtgctgggtgtcggcatctggctggccgccacacaggggagcttcgccacgctgtcctcttccttcccgtccctgtcggctgccaacttgctcatcatcaccggcgcctttgtcatggccatcggcttcgtgggctgcctgggtgccatcaaggagaacaagtgcctcctgctcactgtgagtgccggggcccaagcgatgctccgggtgggaccacgcagggtggggctccggtggcccccaggccttggctgccgcagtgacccccca

SEQ ID NO: 8697 - protein, 115 aa, Homo sapiens
MARACLQAVKYLMFAFNLLFWLGGCGVLGVGIWLAATQGSFATLSSSFPSLSAANLLIITGAFVMAIGFVGCLGAIKENKCLLLTVSAGAQAMLRVGPRRVGLRWPPGLGCRSDP

SEQ ID NO: 8698 - DNA, 337 bp, Homo sapiens
cgtgtccgcttgactgacagctgcgcggcgggagcgggcggcgcgagcgggaggcggcggcgcagaactgaagcgctgcggcatggcgcgcgcctgcctccaggccgtcaagtacctcatgttcgccttcaacctgctcttctggctgggaggctgtggcgtgctgggtgtcggcatctggctggccgccacacaggggagcttcgccacgctgtcctcttccttcccgtccctgtcggctgccaacttgctcatcatcaccggcgcctttgtcatggccatcggcttcgtgggctgcctgggtgccatcaaggagaacaagtgcctcctgctcact

SEQ ID NO: 8699 - protein, 84 aa, Homo sapiens
MARACLQAVKYLMFAFNLLFWLGGCGVLGVGIWLAATQGSFATLSSSFPSLSAANLLIITGAFVMAIGFVGCLGAIKENKCLLL

SEQ ID NO: 8700 - DNA, 548 bp, Homo sapiens
gtgtccgcttgactgacagctgcgcggcgggagcgggcggcgcgagcgggaggcggcggcgcagagcttggggcttccttggtcgcacccaccacctgcctgcccactggtcagccttcagggaccctgagcaccgcctggtctctttcctgtggccagcccagaactgaagcgctgcggcatggcgcgcgcctgcctccaggccgtcaagtacctcatgttcgccttcaacctgctcttctggctgggaggctgtggcgtgctgggtgtcggcatctggctggccgccacacaggggagcttcgccacgctgtcctcttccttcccgtccctgtcggctgccaacttgctcatcatcaccggcgcctttgtcatggccatcggcttcgtgggctgcctgggtgccatcaaggagaacaagtgcctcctgctcactttcttcctgctgctgctgctggtgttcctgctggaggccaccatcgccatcctcttcttcgcctacacggacaaggtacggctgccttggccgcaggcccaactgcagggct

SEQ ID NO: 8701 - protein, 121 aa, Homo sapiens
MARACLQAVKYLMFAFNLLFWLGGCGVLGVGIWLAATQGSFATLSSSFPSLSAANLLIITGAFVMAIGFVGCLGAIKENKCLLLTFFLLLLLVFLLEATIAILFFAYTDKVRLPWPQAQLQ

SEQ ID NO: 8702 - DNA, 1459 bp, Homo sapiens
gcaggtactgcgcctgggggttgtgggggcgtgcggccagggtcccgtggccggaggtgtccgaccgggagcggctggagccggacgcgagcggggcgcgcgagttcgagcccagagccgacacgcagcaacaaagcttggggcttccttggtcgcacccaccacctgcctgcccactggtcagccttcagggaccctgagcaccgcctggtctctttcctgtggccagcccagaactgaagcgctgcggcatggcgcgcgcctgcctccaggccgtcaagtacctcatgttcgccttcaacctgctcttctggctgggaggctgtggcgtgctgggtgtcggcatctggctggccgccacacaggggagcttcgccacgctgtcctcttccttcccgtccctgtcggctgccaacttgctcatcatcaccggcgcctttgtcatggccatcggcttcgtgggctgcctgggtgccatcaaggagaacaagtgcctcctgctcactttcttcctgctgctgctgctggtgttcctgctggaggccaccatcgccatcctcttcttcgcctacacggacaagattgacaggtatgcccagcaagacctgaagaaaggcttgcacctgtacggcacgcagggcaacgtgggcctcaccaacgcctggagcatcatccagaccgacttccgctgctgtggcgtctccaactacactgactggttcgaggtgtacaacgccacgcgggtacctgactcctgctgcttggagttcagtgagagctgtgggctgcacgcccccggcacctggtggaaggcgccgtgctacgagacggtgaaggtgtggcttcaggagaacctgctggctgtgggcatctttgggctgtgcacggcgctggtgcagatcctgggcctgaccttcgccatgaccatgtactgccaagtggtcaaggcagacacctactgcgcgtaggccgcccaccgcccgcttctctgccaaaaggacgcccacggggagatggccgcacccacagctgcctttcccaccaccagcctcggtgctctgccccatgctgggaggagggagggagggacaggtgcctggagcccccggaaccctgtttctggaaggccctagctcaggtggcttcagggcctccggaccccccctgggaggggtggccacgtgctggctgcggaacccagggcaggggtgggaggggcctccagcactttttatatttacgtattctccaaagcagtgttcacacgggagccagcctgtggcccccagcctcctggaaaacaggttggcgctggaggagccgggtcttggcatcctggaggtggccccactggtcctggtgctccaggcggggccgtggacccctcacctacattccatagtgggcccgtggggctcctggtgcatcttaataaagtgtgagcagcaaccttgcgtct

SEQ ID NO: 8703 - protein, 238 aa, Homo sapiens; identical to SEQ ID NO: 1248

SEQ ID NO: 8704 - DNA, 1351 bp, Homo sapiens
actgcgcctgggggttgtgggggcgtgcggccagggtcccgtggccggaggtgtccgaccgggagcggctggagccggacgcgagcggggcgcgcgagttcgagcccagagccgacacgcagcaacaaagcttggggcttccttggtcgcacccaccacctgcctgcccactggtcagccttcagggaccctgagcaccgcctggtctctttcctgtggccagcccagaactgaagcgctgcggcatggcgcgcgcctgcctccaggccgtcaagtacctcatgttcgccttcaacctgctcttctggctgggaggctgtggcgtgctgggtgtcggcatctggctggccgccacacaggggagcttcgccacgctgtcctcttccttcccgtccctgtcggctgccaacttgctcatcatcaccggcgcctttgtcatggccatcggcttcgtgggctgcctgggtgccatcaaggagaacaagtgcctcctgctcactttcttcctgctgctgctgctggtgttcctgctggaggccaccatcgccatcctcttcttcgcctacacggacaagttccgctgctgtggcgtctccaactacactgactggttcgaggtgtacaacgccacgcgggtacctgactcctgctgcttggagttcagtgagagctgtgggctgcacgcccccggcacctggtggaaggcgccgtgctacgagacggtgaaggtgtggcttcaggagaacctgctggctgtgggcatctttgggctgtgcacggcgctggtgcagatcctgggcctgaccttcgccatgaccatgtactgccaagtggtcaaggcagacacctactgcgcgtaggccgcccaccgcccgcttctctgccaaaaggacgcccacggggagatggccgcacccacagctgcctttcccaccaccagcctcggtgctctgccccatgctgggaggagggagggagggacaggtgcctggagcccccggaaccctgtttctggaaggccctagctcaggtggcttcagggcctccggaccccccctgggaggggtggccacgtgctggctgcggaacccagggcaggggtgggaggggcctccagcactttttatatttacgtattctccaaagcagtgttcacacgggagccagcctgtggcccccagcctcctggaaaacaggttggcgctggaggagccgggtcttggcatcctggaggtggccccactggtcctggtgctccaggcggggccgtggacccctcacctacattccatagtgggcccgtggggctcctggtgcatcttaataaagtgtgagcagcaaccttgcgtct

SEQ ID NO: 8705 - protein, 204 aa, Homo sapiens; identical to SEQ ID NO: 8695

SEQ ID NO: 8706 - DNA, 969 bp, Homo sapiens
gagtagtgggttcctccgcctcggcctctgcccgcggggtgtccggggctctcggcgctgagttcgggggtcccattctggacgcggcccagcccctaggggcgccgccctggcctcagctgcgcaattacagcccccgccggcagctccccgccccgggctcctgtccgcgttctttccgctctttcccgggaatggggtcggggtgcgccctcccgggtcccggctctgctggctgctcgccgtcccgagctcccgacgctcagacgcgcctctgagcacggggagaggggacccgggagggaggtcggggagggagtcgtggaagaggtgctttttgagctgaacctggaagaccccggcacaggggatccctgggcagactcccggaggctgcactggcaggaccccctgaaggcctcagctctggcttgccctggagctcagggcctacggacgacgagggacgaggagcccgtgtctctcggatggagtgcgggggggctggcaccagcacccttcttgctgtgcccctggggtgggggtgaggaaatggggggtcggtgtgcagtgagaggcaaagaaggctccttggaggtgcgaggagagcttggggcttccttggtcgcacccaccacctgcctgcccactggtcagccttcagggaccctgagcaccgcctggtctctttcctgtggccagcccagaactgaagcgctgcggcatggcgcgcgcctgcctccaggccgtcaagtacctcatgttcgccttcaacctgctcttctggctgggaggctgtggcgtgctgggtgtcggcatctggctggccgccacacaggggagcttcgccacgctgtcctcttccttcccgtccctgtcggctgccaacttgctcatcatcaccggcgcctttgtcatggccatcggcttcgtgggctgcctgggtgccatcaaggagaacaagtgcct

SEQ ID NO: 8707 - protein, 138 aa, Homo sapiens
MGGRCAVRGKEGSLEVRGELGASLVAPTTCLPTGQPSGTLSTAWSLSCGQPRTEALRHGARLPPGRQVPHVRLQPALLAGRLWRAGCRHLAGRHTGELRHAVLFLPVPVGCQLAHHHRRLCHGHRLRGLPGCHQGEQV

SEQ ID NO: 8708 - DNA, 1439 bp, Homo sapiens
aggatgagtggacgcacatcctgctctgggcagaagggcaggacaggggccctgagtaacggtggcctggggtcagagccaggttcagctgcgaggctgctggtggctgtggagagcttggggcttccttggtcgcacccaccacctgcctgcccactggtcagccttcagggaccctgagcaccgcctggtctctttcctgtggccagcccagaactgaagcgctgcggcatggcgcgcgcctgcctccaggccgtcaagtacctcatgttcgccttcaacctgctcttctggctgggaggctgtggcgtgctgggtgtcggcatctggctggccgccacacaggggagcttcgccacgctgtcctcttccttcccgtccctgtcggctgccaacttgctcatcatcaccggcgcctttgtcatggccatcggcttcgtgggctgcctgggtgccatcaaggagaacaagtgcctcctgctcactttcttcctgctgctgctgctggtgttcctgctggaggccaccatcgccatcctcttcttcgcctacacggacaagattgacaggtatgcccagcaagacctgaagaaaggcttgcacctgtacggcacgcagggcaacgtgggcctcaccaacgcctggagcatcatccagaccgacttccgctgctgtggcgtctccaactacactgactggttcgaggtgtacaacgccacgcgggtacctgactcctgctgcttggagttcagtgagagctgtgggctgcacgcccccggcacctggtggaaggcgccgtgctacgagacggtgaaggtgtggcttcaggagaacctgctggctgtgggcatctttgggctgtgcacggcgctggtgcagatcctgggcctgaccttcgccatgaccatgtactgccaagtggtcaaggcagacacctactgcgcgtaggccgcccaccgcccgcttctctgccaaaaggacgcccacggggagatggccgcacccacagctgcctttcccaccaccagcctcggtgctctgccccatgctgggaggagggagggagggacaggtgcctggagcccccggaaccctgtttctggaaggccctagctcaggtggcttcagggcctccggaccccccctgggaggggtggccacgtgctggctgcggaacccagggcaggggtgggaggggcctccagcactttttatatttacgtattctccaaagcagtgttcacacgggagccagcctgtggcccccagcctcctggaaaacaggttggcgctggaggagccgggtcttggcatcctggaggtggccccactggtcctggtgctccaggcggggccgtggacccctcacctacattccatagtgggcccgtggggctcctggtgcatcttaataaagtgtgagcagcaaccttgcgtct

SEQ ID NO: 8709 - protein, 238 aa, Homo sapiens; identical to SEQ ID NO: 1248

SEQ ID NO: 8710 - DNA, 373 bp, Homo sapiens
atgagtggacgcacatcctgctctgggcagaagggcaggacaggggccctgagtaacggtggcctggggtcagagccaggttcagctgcgaggctgctggtggctgtggagaactgaagcgctgcggcatggcgcgcgcctgcctccaggccgtcaagtacctcatgttcgccttcaacctgctcttctggctgggaggctgtggcgtgctgggtgtcggcatctggctggccgccacacaggggagcttcgccacgctgtcctcttccttcccgtccctgtcggctgccaacttgctcatcatcaccggcgcctttgtcatggccatcggcttcgtgggctgcctgggtgccatcaaggagaacaagtgcct

SEQ ID NO: 8711 - protein, 80 aa, Homo sapiens
MARACLQAVKYLMFAFNLLFWLGGCGVLGVGIWLAATQGSFATLSSSFPSLSAANLLIITGAFVMAIGFVGCLGAIKENK

SEQ ID NO: 8712 - DNA, 483 bp, Homo sapiens
atgagtggacgcacatcctgctctgggcagaagggcaggacaggggccctgagtaacggtggcctggggtcagagccaggttcagctgcgaggctgctggtggctgtggagagcttggggcttccttggtcgcacccaccacctgcctgcccactggtcagccttcagggaccctgagcaccgcctggtctctttcctgtggccagcccagaactgaagcgctgcggcatggcgcgcgcctgcctccaggccgtcaagtacctcatgttcgccttcaacctgctcttctggctgggaggctgtggcgtgctgggtgtcggcatctggctggccgccacacaggggagcttcgccacgctgtcctcttccttcccgtccctgtcggctgccaacttgctcatcatcaccggcgcctttgtcatggccatcggcttcgtgggctgcctgggtgccatcaaggagaacaagtgcctcctgctcact

SEQ ID NO: 8713 - protein, 84 aa, Homo sapiens; identical to SEQ ID NO: 8699

SEQ ID NO: 8714 - DNA, 1324 bp, Homo sapiens
acatcctgctctgggcagaagggcaggacaggggccctgagtaacggtggcctggggtcagagccaggttcagctgcgaggctgctggtggctgtggagaactgaagcgctgcggcatggcgcgcgcctgcctccaggccgtcaagtacctcatgttcgccttcaacctgctcttctggctgggaggctgtggcgtgctgggtgtcggcatctggctggccgccacacaggggagcttcgccacgctgtcctcttccttcccgtccctgtcggctgccaacttgctcatcatcaccggcgcctttgtcatggccatcggcttcgtgggctgcctgggtgccatcaaggagaacaagtgcctcctgctcactttcttcctgctgctgctgctggtgttcctgctggaggccaccatcgccatcctcttcttcgcctacacggacaagattgacaggtatgcccagcaagacctgaagaaaggcttgcacctgtacggcacgcagggcaacgtgggcctcaccaacgcctggagcatcatccagaccgacttccgctgctgtggcgtctccaactacactgactggttcgaggtgtacaacgccacgcgggtacctgactcctgctgcttggagttcagtgagagctgtgggctgcacgcccccggcacctggtggaaggcgccgtgctacgagacggtgaaggtgtggcttcaggagaacctgctggctgtgggcatctttgggctgtgcacggcgctggtgcagatcctgggcctgaccttcgccatgaccatgtactgccaagtggtcaaggcagacacctactgcgcgtaggccgcccaccgcccgcttctctgccaaaaggacgcccacggggagatggccgcacccacagctgcctttcccaccaccagcctcggtgctctgccccatgctgggaggagggagggagggacaggtgcctggagcccccggaaccctgtttctggaaggccctagctcaggtggcttcagggcctccggaccccccctgggaggggtggccacgtgctggctgcggaacccagggcaggggtgggaggggcctccagcactttttatatttacgtattctccaaagcagtgttcacacgggagccagcctgtggcccccagcctcctggaaaacaggttggcgctggaggagccgggtcttggcatcctggaggtggccccactggtcctggtgctccaggcggggccgtggacccctcacctacattccatagtgggcccgtggggctcctggtgcatcttaataaagtgtgagcagcaaccttgcgtct

SEQ ID NO: 8715 - protein, 238 aa, Homo sapiens; identical to SEQ ID NO: 1248

SEQ ID NO: 8716 - DNA, 644 bp, Homo sapiens
agagcaaggggtggtggggagtgagctgctctccaaatcctggcttgggccaagctgacattcttggaattccgagtgtgtgcgcttcctatccctccatttcccagcagagcccctgagatctggagactgccccagcctcaggctctgtgcatctcccccgagcccccaccacatatgtgcggaggcccctgggggcccaggcctgtcctcagtcccgactgggctctacctgaggaccctggggagcctgggcctggccctcctcagagcttggggcttccttggtcgcacccaccacctgcctgcccactggtcagccttcagggaccctgagcaccgcctggtctctttcctgtggccagcccagaactgaagcgctgcggcatggcgcgcgcctgcctccaggccgtcaagtacctcatgttcgccttcaacctgctcttctggctgggaggctgtggcgtgctgggtgtcggcatctggctggccgccacacaggggagcttcgccacgctgtcctcttccttcccgtccctgtcggctgccaacttgctcatcatcaccggcgcctttgtcatggccatcggcttcgtgggctgcctgggtgccatcaaggagaacaagtgcctcctgctcactgt

SEQ ID NO: 8717 - protein, 84 aa, Homo sapiens; identical to SEQ ID NO: 8699

SEQ ID NO: 8718 - DNA, 1539 bp, Homo sapiens
gacattcttggaattccgagtgtgtgcgcttcctatccctccatttcccagcagagcccctgagatctggagactgccccagcctcaggctctgtgcatctcccccgagcccccaccacatatgtgcggaggcccctgggggcccaggcctgtcctcagtcccgactgggctctacctgaggaccctggggagcctgggcctggccctcctcagagcttggggcttccttggtcgcacccaccacctgcctgcccactggtcagccttcagggaccctgagcaccgcctggtctctttcctgtggccagcccagaactgaagcgctgcggcatggcgcgcgcctgcctccaggccgtcaagtacctcatgttcgccttcaacctgctcttctggctgggaggctgtggcgtgctgggtgtcggcatctggctggccgccacacaggggagcttcgccacgctgtcctcttccttcccgtccctgtcggctgccaacttgctcatcatcaccggcgcctttgtcatggccatcggcttcgtgggctgcctgggtgccatcaaggagaacaagtgcctcctgctcactttcttcctgctgctgctgctggtgttcctgctggaggccaccatcgccatcctcttcttcgcctacacggacaagattgacaggtatgcccagcaagacctgaagaaaggcttgcacctgtacggcacgcagggcaacgtgggcctcaccaacgcctggagcatcatccagaccgacttccgctgctgtggcgtctccaactacactgactggttcgaggtgtacaacgccacgcgggtacctgactcctgctgcttggagttcagtgagagctgtgggctgcacgcccccggcacctggtggaaggcgccgtgctacgagacggtgaaggtgtggcttcaggagaacctgctggctgtgggcatctttgggctgtgcacggcgctggtgcagatcctgggcctgaccttcgccatgaccatgtactgccaagtggtcaaggcagacacctactgcgcgtaggccgcccaccgcccgcttctctgccaaaaggacgcccacggggagatggccgcacccacagctgcctttcccaccaccagcctcggtgctctgccccatgctgggaggagggagggagggacaggtgcctggagcccccggaaccctgtttctggaaggccctagctcaggtggcttcagggcctccggaccccccctgggaggggtggccacgtgctggctgcggaacccagggcaggggtgggaggggcctccagcactttttatatttacgtattctccaaagcagtgttcacacgggagccagcctgtggcccccagcctcctggaaaacaggttggcgctggaggagccgggtcttggcatcctggaggtggccccactggtcctggtgctccaggcggggccgtggacccctcacctacattccatagtgggcccgtggggctcctggtgcatcttaataaagtgtgagcagcaaccttgcgtct

SEQ ID NO: 8719 - protein, 238 aa, Homo sapiens; identical to SEQ ID NO: 1248

SEQ ID NO: 8720 - DNA, 401 bp, Homo sapiens
gcagagcttggggcttccttggtcgcacccaccacctgcctgcccactggtcagccttcagggaccctgagcaccgcctggtctctttcctgtggccagcccagaactgaagcgctgcggcatggcgcgcgcctgcctccaggccgtcaagtacctcatgttcgccttcaacctgctcttctggttcttcctgctgctgctgctggtgttcctgctggaggccaccatcgccatcctcttcttcgcctacacggacaaggtacggctgccttggccgcaggcccaactgcagggctgggggctccatcctcactcccagggagcactgtgggcccggtgtggacagagtggccctgcatgtgccctcacgggcagccaggacagcgggtgtggatttacca

SEQ ID NO: 8721 - protein, 92 aa, Homo sapiens
MARACLQAVKYLMFAFNLLFWFFLLLLLVFLLEATIAILFFAYTDKVRLPWPQAQLQGWGLHPHSQGALWARCGQSGPACALTGSQDSGCGF

SEQ ID NO: 8722 - DNA, 1260 bp, Homo sapiens
gcagagcttggggcttccttggtcgcacccaccacctgcctgcccactggtcagccttcagggaccctgagcaccgcctggtctctttcctgtggccagcccagaactgaagcgctgcggcatggcgcgcgcctgcctccaggccgtcaagtacctcatgttcgccttcaacctgctcttctggctgggaggctgtggcgtgctgggtgtcggcatctggctggccgccacacaggggagcttcgccacgctgtcctcttccttcccgtccctgtcggctgccaacttgctcatcatcaccggcgcctttgtcatggccatcggcttcgtgggctgcctgggtgccaccatcgccatcctcttcttcgcctacacggacaagattgacaggtatgcccagcaagacctgaagaaaggcttgcacctgtacggcacgcagggcaacgtgggcctcaccaacgcctggagcatcatccagaccgacttccgctgctgtggcgtctccaactacactgactggttcgaggtgtacaacgccacgcgggtacctgactcctgctgcttggagttcagtgagagctgtgggctgcacgcccccggcacctggtggaaggcgccgtgctacgagacggtgaaggtgtggcttcaggagaacctgctggctgtgggcatctttgggctgtgcacggcgctggtgcagatcctgggcctgaccttcgccatgaccatgtactgccaagtggtcaaggcagacacctactgcgcgtaggccgcccaccgcccgcttctctgccaaaaggacgcccacggggagatggccgcacccacagctgcctttcccaccaccagcctcggtgctctgccccatgctgggaggagggagggagggacaggtgcctggagcccccggaaccctgtttctggaaggccctagctcaggtggcttcagggcctccggaccccccctgggaggggtggccacgtgctggctgcggaacccagggcaggggtgggaggggcctccagcactttttatatttacgtattctccaaagcagtgttcacacgggagccagcctgtggcccccagcctcctggaaaacaggttggcgctggaggagccgggtcttggcatcctggaggtggccccactggtcctggtgctccaggcggggccgtggacccctcacctacattccatagtgggcccgtggggctcctggtgcatcttaataaagtgtgagcagcaaccttgcgtct

SEQ ID NO: 8723 - protein, 215 aa, Homo sapiens
MARACLQAVKYLMFAFNLLFWLGGCGVLGVGIWLAATQGSFATLSSSFPSLSAANLLIITGAFVMAIGFVGCLGATIAILFFAYTDKIDRYAQQDLKKGLHLYGTQGNVGLTNAWSIIQTDFRCCGVSNYTDWFEVYNATRVPDSCCLEFSESCGLHAPGTWWKAPCYETVKVWLQENLLAVGIFGLCTALVQILGLTFAMTMYCQVVKADTYCA

SEQ ID NO: 8724 - DNA, 1227 bp, Homo sapiens
gcagagcttggggcttccttggtcgcacccaccacctgcctgcccactggtcagccttcagggaccctgagcaccgcctggtctctttcctgtggccagcccagaactgaagcgctgcggcatggcgcgcgcctgcctccaggccgtcaagtacctcatgttcgccttcaacctgctcttctggctgggaggctgtggcgtgctgggtgtcggcatctggctggccgccacacaggggagcttcgccacgctgtcctcttccttcccgtccctgtcggctgccaacttgctcatcatcaccggcgcctttgtcatggccatcggcttcgtgggctgcctgggtgccatcaaggagaacaagtgcctcctgctcactttcttcctgctgctgctgctggtgttcctgctggaggccaccatcgccatcctcttcttcgcctacacggacaagttccgctgctgtggcgtctccaactacactgactggttcgaggtgtacaacgccacgcgggtacctgactcctgctgcttggagttcagtgagagctgtgggctgcacgcccccggcacctggtggaaggcgccgtgctacgagacggtgaaggtgtggcttcaggagaacctgctggctgtgggcatctttgggctgtgcacggcgctggtgcagatcctgggcctgaccttcgccatgaccatgtactgccaagtggtcaaggcagacacctactgcgcgtaggccgcccaccgcccgcttctctgccaaaaggacgcccacggggagatggccgcacccacagctgcctttcccaccaccagcctcggtgctctgccccatgctgggaggagggagggagggacaggtgcctggagcccccggaaccctgtttctggaaggccctagctcaggtggcttcagggcctccggaccccccctgggaggggtggccacgtgctggctgcggaacccagggcaggggtgggaggggcctccagcactttttatatttacgtattctccaaagcagtgttcacacgggagccagcctgtggcccccagcctcctggaaaacaggttggcgctggaggagccgggtcttggcatcctggaggtggccccactggtcctggtgctccaggcggggccgtggacccctcacctacattccatagtgggcccgtggggctcctggtgcatcttaataaagtgtgagcagcaaccttgcgtct

SEQ ID NO: 8725 - protein, 204 aa, Homo sapiens; identical to SEQ ID NO: 8695

SEQ ID NO: 8726 - DNA, 1329 bp, Homo sapiens
gcagagcttggggcttccttggtcgcacccaccacctgcctgcccactggtcagccttcagggaccctgagcaccgcctggtctctttcctgtggccagcccagaactgaagcgctgcggcatggcgcgcgcctgcctccaggccgtcaagtacctcatgttcgccttcaacctgctcttctggctgggaggctgtggcgtgctgggtgtcggcatctggctggccgccacacaggggagcttcgccacgctgtcctcttccttcccgtccctgtcggctgccaacttgctcatcatcaccggcgcctttgtcatggccatcggcttcgtgggctgcctgggtgccatcaaggagaacaagtgcctcctgctcactttcttcctgctgctgctgctggtgttcctgctggaggccaccatcgccatcctcttcttcgcctacacggacaagattgacaggtatgcccagcaagacctgaagaaaggcttgcacctgtacggcacgcagggcaacgtgggcctcaccaacgcctggagcatcatccagaccgacttccgctgctgtggcgtctccaactacactgactggttcgaggtgtacaacgccacgcgggtacctgactcctgctgcttggagttcagtgagagctgtgggctgcacgcccccggcacctggtggaaggcgccgtgctacgagacggtgaaggtgtggcttcaggagaacctgctggctgtgggcatctttgggctgtgcacggcgctggtgcagatcctgggcctgaccttcgccatgaccatgtactgccaagtggtcaaggcagacacctactgcgcgtaggccgcccaccgcccgcttctctgccaaaaggacgcccacggggagatggccgcacccacagctgcctttcccaccaccagcctcggtgctctgccccatgctgggaggagggagggagggacaggtgcctggagcccccggaaccctgtttctggaaggccctagctcaggtggcttcagggcctccggaccccccctgggaggggtggccacgtgctggctgcggaacccagggcaggggtgggaggggcctccagcactttttatatttacgtattctccaaagcagtgttcacacgggagccagcctgtggcccccagcctcctggaaaacaggttggcgctggaggagccgggtcttggcatcctggaggtggccccactggtcctggtgctccaggcggggccgtggacccctcacctacattccatagtgggcccgtggggctcctggtgcatcttaataaagtgtgagcagcaaccttgcgtct

SEQ ID NO: 8727 - protein, 238 aa, Homo sapiens; identical to SEQ ID NO: 1248

SEQ ID NO: 8728 - DNA, 1249 bp, Homo sapiens
gcagagcttggggcttccttggtcgcacccaccacctgcctgcccactggtcagccttcagggaccctgagcaccgcctggtctctttcctgtggccagcccagctgggaggctgtggcgtgctgggtgtcggcatctggctggccgccacacaggggagcttcgccacgctgtcctcttccttcccgtccctgtcggctgccaacttgctcatcatcaccggcgcctttgtcatggccatcggcttcgtgggctgcctgggtgccatcaaggagaacaagtgcctcctgctcactttcttcctgctgctgctgctggtgttcctgctggaggccaccatcgccatcctcttcttcgcctacacggacaagattgacaggtatgcccagcaagacctgaagaaaggcttgcacctgtacggcacgcagggcaacgtgggcctcaccaacgcctggagcatcatccagaccgacttccgctgctgtggcgtctccaactacactgactggttcgaggtgtacaacgccacgcgggtacctgactcctgctgcttggagttcagtgagagctgtgggctgcacgcccccggcacctggtggaaggcgccgtgctacgagacggtgaaggtgtggcttcaggagaacctgctggctgtgggcatctttgggctgtgcacggcgctggtgcagatcctgggcctgaccttcgccatgaccatgtactgccaagtggtcaaggcagacacctactgcgcgtaggccgcccaccgcccgcttctctgccaaaaggacgcccacggggagatggccgcacccacagctgcctttcccaccaccagcctcggtgctctgccccatgctgggaggagggagggagggacaggtgcctggagcccccggaaccctgtttctggaaggccctagctcaggtggcttcagggcctccggaccccccctgggaggggtggccacgtgctggctgcggaacccagggcaggggtgggaggggcctccagcactttttatatttacgtattctccaaagcagtgttcacacgggagccagcctgtggcccccagcctcctggaaaacaggttggcgctggaggagccgggtcttggcatcctggaggtggccccactggtcctggtgctccaggcggggccgtggacccctcacctacattccatagtgggcccgtggggctcctggtgcatcttaataaagtgtgagcagcaaccttgcgtct

SEQ ID NO: 8729 - protein, 174 aa, Homo sapiens; identical to SEQ ID NO: 1258

SEQ ID NO: 8730 - DNA, 1146 bp, Homo sapiens
cagagcttggggcttccttggtcgcacccaccacctgcctgcccactggtcagccttcagggaccctgagcaccgcctggtctctttcctgtggccagcccagctgggaggctgtggcgtgctgggtgtcggcatctggctggccgccacacaggggagcttcgccacgctgtcctcttccttcccgtccctgtcggctgccaacttgctcatcatcaccggcgcctttgtcatggccatcggcttcgtgggctgcctgggtgccatcaaggagaacaagtgcctcctgctcactttcttcctgctgctgctgctggtgttcctgctggaggccaccatcgccatcctcttcttcgcctacacggacaagttccgctgctgtggcgtctccaactacactgactggttcgaggtgtacaacgccacgcgggtacctgactcctgctgcttggagttcagtgagagctgtgggctgcacgcccccggcacctggtggaaggcgccgtgctacgagacggtgaaggtgtggcttcaggagaacctgctggctgtgggcatctttgggctgtgcacggcgctggtgcagatcctgggcctgaccttcgccatgaccatgtactgccaagtggtcaaggcagacacctactgcgcgtaggccgcccaccgcccgcttctctgccaaaaggacgcccacggggagatggccgcacccacagctgcctttcccaccaccagcctcggtgctctgccccatgctgggaggagggagggagggacaggtgcctggagcccccggaaccctgtttctggaaggccctagctcaggtggcttcagggcctccggaccccccctgggaggggtggccacgtgctggctgcggaacccagggcaggggtgggaggggcctccagcactttttatatttacgtattctccaaagcagtgttcacacgggagccagcctgtggcccccagcctcctggaaaacaggttggcgctggaggagccgggtcttggcatcctggaggtggccccactggtcctggtgctccaggcggggccgtggacccctcacctacattccatagtgggcccgtggggctcctggtgcatcttaataaagtgtgagcagcaaccttgcgtct

SEQ ID NO: 8731 - protein, 140 aa, Homo sapiens
MAIGFVGCLGAIKENKCLLLTFFLLLLLVFLLEATIAILFFAYTDKFRCCGVSNYTDWFEVYNATRVPDSCCLEFSESCGLHAPGTWWKAPCYETVKVWLQENLLAVGIFGLCTALVQILGLTFAMTMYCQVVKADTYCA

SEQ ID NO: 8732 - DNA, 683 bp, Homo sapiens
ttccgccgccggggtccgagcggatccgcgcgacccgctgccaccgcgggggccagagcgggagcaggagcggggccggagcaggcgccggccggcgggatggggcgttccggggcggcgggtgcggggcgctgagcggcggccccggcacacccgggcgcgatgcgccgctccagcacggacgagtccacgtaccggcgcagcccctctccggagggcaaggagccggacttcgcgcgcggcggccccttccggcgctacagcagcctatacgggcgcgcgggcggcggggacgccgggggctccttcttcggcctgcacgcgaaccccggccccaaggcggcccaggcgcgctacacgtcgcccaagggcaacaagtacgtggttttctacctggacctctccttcatcttcctcctagaactgaagcgctgcggcatggcgcgcgcctgcctccaggccgtcaagtacctcatgttcgccttcaacctgctcttctggctgggaggctgtggcgtgctgggtgtcggcatctggctggccgccacacaggggagcttcgccacgctgtcctcttccttcccgtccctgtcggctgccaacttgctcatcatcaccggcgcctttgtcatggccatcggcttcgtgggctgcctgggtgccatcaaggagaacaagtgcct

SEQ ID NO: 8733 - protein, 172 aa, Homo sapiens
MRRSSTDESTYRRSPSPEGKEPDFARGGPFRRYSSLYGRAGGGDAGGSFFGLHANPGPKAAQARYTSPKGNKYVVFYLDLSFIFLLELKRCGMARACLQAVKYLMFAFNLLFWLGGCGVLGVGIWLAATQGSFATLSSSFPSLSAANLLIITGAFVMAIGFVGCLGAIKENK

SEQ ID NO: 8734 - DNA, 1760 bp, Homo sapiens
agcagcttagggtgataggggaggcttcccaggagaccaggaagaggcttgggggtggcagccagcacagcccggtggagggcggcccggagacgcaccaggggacggatgcatgaacctgagacgtgtgagtcaagttgtgtgtgagcccgggatgcatgggagctggggtgcatgtgagcaggggtacatgggagctggggtgcgtgtgggcccggggtgcatgagtgagggttgcatgtgagcggaggtccgtgggagcctggggtgcgtgggaactgggtgagcagggtgtgtgagcggggtgcgtgtgggccggagtgcgtgtgagccgaagtgcgtgtgagcaggggtgcgtgtgagccgggagtgcatgtgagcctggggtgcatgggaaccggggtgagtgtcagcgggggtgggatccggggtgcatgtgagccagggtgtgtgtgagccagggtggatgtgtctggagtgtgcaggaccagaggccagctccgtggcagaagtgccaggggacatccctaattaagagaatctgtcctcactgggagcactgggcttggggcacagccccagggtgggcaggggtctgccagctctacaaagatgcccccacttcccgggggacctggccctgctatgggatgcaccagcagctgggggatgggctgtccagggtgctgactgtgaacgcggcgcccccacccacccctttggagaggtgtccctcgtaacattctggagcacaggagaggcctggacaggcaatggcccactcaatggtccctccagaccgtcgggcacaaggtcacacacaccatgtacagacaaggccatgcggaactgaggggcattcccgagcacacaggaaccccagcctgcccctgggctgtccccatatcctcccgcagttcccaggtcttgtggaggggcagacagggcaccagggggacccacaaacggcctgacaccatcactgccccaagaactgggcagagaagggatatggccctgggtccagatcaccaggtgatgagggcaggaggtcagagggaaacgaggccccaggagaggagatggccatcagcagctcagagtacatcctggcctcaagcgccaagcaaccccacaagtctcattccagacgaaatgcccaggctgggggtgaaggtccctgaactgaggggaggtgctagcacaacagagaaaactgtcatttaaaacccaaactggcccaaactgcctgctccatctgcctctgccttccaaggacgcagacctctcctgtcatcaggaaaatgagctgttccaagctcccctcgccccatggggatgtgtcgaaggacacagggaggacatgtgcagagtgactggtgccatgccaggtgtgggaaaccccgttccatgggggctgggcaggaaggaaccctacacctccagccctgggcccctcccacaactgccccagccctggtgggaactgatttccctaattaacactccacgaaacatcctcacctccaccggagacggcaggaaagagacacccactgtcaccagacgggctcggtcacacacactgtgacagacaacagcccacgttgccacagacgcctcacaccatcacacgtggccacacgcgcgcgttaccgccctgcaacctggcgtcccccgggccccgaggccccagcgtgctggcagacccacacagataaaatgcgtgcacgtggttaataaaattacctgcaattttg

SEQ ID NO: 8735 - protein, 43 aa, Homo sapiens [sequence omitted]

SEQ ID NO: 8736 - DNA, 3551 bp, Homo sapiens
gccctgaagccacctgagctagggccttccagaaacagggttccgggggctccaggcacctgtccctccctccctcctcccagcatggggcagagcaccgaggctggtggtgggaaaggcagctgtgggtgcggccatctccccgtgggcgtccttttggcagagaagcgggcggtgggcggcctacgcgcagtaggtgtctgccttgaccacttggcagtacatggtcatggcgaaggtcaggcccaggatctgtaggtaggggaggaggactgggcatggcagctccacaggctcaggcctcaagcccagagcagtccctgtcctcagcaggtgccctggccctgaccccgaccccagggtgggcgacacagtggcagagcccttcagcttcctggtggcttgcacgccccacccaacccctgtggctcgagccacagcaccctcccctgagccttgcaggcatgaggacacccagaacttcctgagggctgtggagtttggaaaccaggggccactggcaccagggccccagctgccaccctctgtgcactggccagtcctgggccaccgaccaacatggacgaccaccggcctccaccccacaccagcctctgcctctgtccactaagagggagcccactgtccccacaggccgtccctgcccatccccctgaactcgccctcctgcttttgccccggcctcccccgatcgtgggttcctgggggcaaggtctttgctactttgttccctgggctcagaaggtcctaacaaagtgggggcagggagcccgcaggcccccaggccatacctgcaccagcgccgtgcacagcccaaagatgcccacagccagcaggttctcctgaagccacaccttcaccgtctcgtagcacggctgcagggagggatgtcatgcgtgtcacggcagggcctgctggtcccgccctctaggcccctaccagcccccagggtgggggtctcactcaccgccttccaccaggtgccgggggcgtgcagcccacagctctcactgaactccaagcagcaggagtcaggtacccgcgtggcgttgtacacctcgaaccagtcagtgtagttggagacgccacagcagcggaactggggggcaagctcaggtcgggctgaggcaggaggggagggggcacccgccgaccccgcccacctgcccacgcctcacgtcggtctggatgatgctccaggcgttggtgaggcccacgttgccctgcgtgccgtacaggtgcaagcctttcttcaggtcttgctgggcatacctgtcaatctgggggtgcggggggggtcagcagggcccctcccactgtaccccgcctccctcatccagaccccctcgccggcccctaagctgggcccctcctgcgcctggtcttgtgtcccccgcgcctcctagcccaccaagctgcagacacaccggccccatgtcctcccagcagccctgaggcccagggcccccacctctgggcttcctccccaggctgggggaggaccatgggtcctggggggacagaggacagggacacaggtgcctccacgtatcgggacacgtgcagcggtgcgcggcccggatggggcgctgggagcagacggctcaggacgctgcgtcagagggcgggggacaacctggggcgcaccctccgggtggggtagcagtgcccttgtgccccagtcgctatagagccacagcacagcctcccagggtcgctggcgctgcccctccaggcctggtaaatccacacccgctgtcctggctgcccgtgagggcacatgcagggccactctgtccacaccgggcccacagtgctccctgggagtgaggatggagcccccagccctgcagttgggcctgcggccaaggcagccgtaccttgtccgtgtaggcgaagaagaggatggcgatggtggcctccagcaggaacaccagcagcagcagcaggaagaactgtggagggggcaggctcagacagggacccgaaaggccgcacagcctccgccccacagcatgccaggggccagggccacgtacctcatggatacctggtgctgccaggaaacctctgccaggcccccactcccagagagcccagaacgccgcccccacctcagaacccttggccccaggtccagggactgtggctgttgtgtcctgctcagcccctgagtgtggggccctgggctggcctgggctcccctcccctgcccccatccctggggcaacccagacacccccaagtgggcacaaatccctgttcctgaggccccagcccctgtcagctgccttcaggacacctccatccaggggcctctgagtgtctggcaggtgcctcgctgggtgcctgtcttcatggtgggaagatgtcccagcaggggccacagctgggctgcagaggccccttctgcccacacgtcacagtcctcagggcagccagcgtggctgatgccccctccagcaagaccacaggctgcaagccccacctctgaccatgcaagcttcccccgcctggcggcagccccaaagctcagcctgaccccagccctgctgctcctccatgcgggggtcagtgacacccacaaaagaggagggcaggcatggacagcatgtgtccaggagctggggggcccaggcagagtgggcgtgagtggggcagacagggtgctgggctaaggacacaggagtccttcacccccaggaggtacccagggttctggtcccaagtcacccatgggaaagggggttgggcttcggtccctgcaggcctggtggggcccacacacagcagcttcctcaactgaggagctccaagccccagtagggctgccacagacccccaccgactgcctccaggggtctctgggccccaacctgatgccagggaggctgatagacttggggcttgcccccaggaaggggtacggaggggagtggactggctgaggcgacctaagggaggccccaacccatccagggcttcccagacaaaggagtgatcggaagcctcgtgatttaggacctcagcaggctgcacaccctccgcagggcccacggcctcggccaggcatgttaatcagtagcaagcctgtgtttccatctaggagcccttttcctttttaattatctgtgattaacatttctaaggaggataaacatatccctgcctgtaagtccatccccgaggcgaggtgggggctgggatcgtcccagcagccggtcccagggagctgagagaccaggcccccaacaagaagctggggaaggggccacagtgggggtggggtggtcaggaatgagtcacggagaccgcaagcccgtgaaaggctgcgcatgcgtgtgagcgggggtgggaggcgaggtgcatgcaagcgggggtgcatgtgagccggggtgcgtgtgagcgggcgtgaatgtgagccaggtgcatgggagcctggggtgtgtgggaaccccgaggccccagcgtgctggcagacccacacagataaaatgcgtgcacgtggttaataaaattacctgcaattt

SEQ ID NO: 8737 - protein, 52 aa, Homo sapiens
MGPGGTEDRDTGASTYRDTCSGARPGWGAGSRRLRTLRQRAGDNLGRTLRVG

SEQ ID NO: 8738 - DNA, 2789 bp, Homo sapiens
acaagggagcctccccgactgtggccatggagtctgggaggctgtggcgtgctgggtgtcggcatctggctggccgccacacaggggagcttcgccacgctgtcctcttccttcccgtccctgtcggctgccaacttgctcatcatcaccggcgcctttgtcatggccatcggcttcgtgggctgcctgggtgccatcaaggagaacaagtgcctcctgctcactgtgagtgccggggcccaagcgatgctccgggtgggaccacgcagggtggggctccggtggcccccaggccttggctgccgcagtgaccccccagacgtgggcaccacctctggggccggacctccaggctggcagtgtggcccggggccctggccactgttgggtcttccaggccacactggggctggggggtgatttgcagagcggtgtgggggtcactcaagagaacgtgctgtaccttgtcaggggcctcccctgacgggacactggccctggtgagtgcaggcacagccccgcacacacgtacacacgcatgcgcagcctttcacgggcttgcggtctccgtgactcattcctgaccaccccacccccactgtggccccttccccagcttcttgttgggggcctggtctctcagctccctgggaccggctgctgggacgatcccagcccccacctcgcctcggggatggacttacaggcagggatatgtttatcctccttagaaatgttaatcacagataattaaaaaggaaaagggctcctagatggaaacacaggcttgctactgattaacatgcctggccgaggccgtgggccctgcggagggtgtgcagcctgctgaggtcctaaatcacgaggcttccgatcactcctttgtctgggaagccctggatgggttggggcctcccttaggtcgcctcagccagtccactcccctccgtaccccttcctgggggcaagccccaagtctatcagcctccctggcatcaggttggggcccagagacccctggaggcagtcggtgggggtctgtggcagccctactggggcttggagctcctcagttgaggaagctgctgtgtgtgggccccaccaggcctgcagggaccgaagcccaaccccctttcccatgggtgacttgggaccagaaccctgggtacctcctgggggtgaaggactcctgtgtccttagcccagcaccctgtctgccccactcacgcccactctgcctgggccccccagctcctggacacatgctgtccatgcctgccctcctcttttgtgggtgtcactgacccccgcatggaggagcagcagggctggggtcaggctgagctttggggctgccgccaggcgggggaagcttgcatggtcagaggtggggcttgcagcctgtggtcttgctggagggggcatcagccacgctggctgccctgaggactgtgacgtgtgggcagaaggggcctctgcagcccagctgtggcccctgctgggacatcttcccaccatgaagacaggcacccagcgaggcacctgccagacactcagaggcccctggatggaggtgtcctgaaggcagctgacaggggctggggcctcaggaacagggatttgtgcccacttgggggtgtctgggttgccccagggatgggggcaggggaggggagcccaggccagcccagggccccacactcaggggctgagcaggacacaacagccacagtccctggacctggggccaagggttctgaggtgggggcggcgttctgggctctctgggagtgggggcctggcagaggtttcctggcagcaccaggtatccatgagttcttcctgctgctgctgctggtgttcctgctggaggccaccatcgccatcctcttcttcgcctacacggacaagattgacaggtatgcccagcaagacctgaagaaaggcttgcacctgtacggcacgcagggcaacgtgggcctcaccaacgcctggagcatcatccagaccgacttccgctgctgtggcgtctccaactacactgactggttcgaggtgtacaacgccacgcgggtacctgactcctgctgcttggagttcagtgagagctgtgggctgcacgcccccggcacctggtggaaggcgccgtgctacgagacggtgaaggtgtggcttcaggagaacctgctggctgtgggcatctttgggctgtgcacggcgctggtgcagatcctgggcctgaccttcgccatgaccatgtactgccaagtggtcaaggcagacacctactgcgcgtaggccgcccaccgcccgcttctctgccaaaaggacgcccacggggagatggccgcacccacagctgcctttcccaccaccagcctcggtgctctgccccatgctgggaggagggagggagggacaggtgcctggagcccccggaaccctgtttctggaaggccctagctcaggtggcttcagggcctccggaccccccctgggaggggtggccacgtgctggctgcggaacccagggcaggggtgggaggggcctccagcactttttatatttacgtattctccaaagcagtgttcacacgggagccagcctgtggcccccagcctcctggaaaacaggttggcgctggaggagccgggtcttggcatcctggaggtggccccactggtcctggtgctccaggcggggccgtggacccctcacctacattccatagtgggcccgtggggctcctggtgcatcttaataaagtgtgagcagcaaccttgcgtct

SEQ ID NO: 8739 - protein, 213 aa, Homo sapiens
MGAGEGSPGQPRAPHSGAEQDTTATVPGPGAKGSEVGAAFWALWEWGPGRGFLAAPGIHEFFLLLLLVFLLEATIAILFFAYTDKIDRYAQQDLKKGLHLYGTQGNVGLTNAWSIIQTDFRCCGVSNYTDWFEVYNATRVPDSCCLEFSESCGLHAPGTWWKAPCYETVKVWLQENLLAVGIFGLCTALVQILGLTFAMTMYCQVVKADTYCA

SEQ ID NO: 8740 - DNA, 2249 bp, Homo sapiens
caggcagggatatgtttatcctccttagaaatgttaatcacagataattaaaaaggaaaagggctcctagatggaaacacaggcttgctactgattaacatgcctggccgaggccgtgggccctgcggagggtgtgcagcctgctgaggtcctaaatcacgaggcttccgatcactcctttgtctgggaagccctggatgggttggggcctcccttaggtcgcctcagccagtccactcccctccgtaccccttcctgggggcaagccccaagtctatcagcctccctggcatcaggttggggcccagagacccctggaggcagtcggtgggggtctgtggcagccctactggggcttggagctcctcagttgaggaagctgctgtgtgtgggccccaccaggcctgcagggaccgaagcccaaccccctttcccatgggtgacttgggaccagaaccctgggtacctcctgggggtgaaggactcctgtgtccttagcccagcaccctgtctgccccactcacgcccactctgcctgggccccccagctcctggacacatgctgtccatgcctgccctcctcttttgtgggtgtcactgacccccgcatggaggagcagcagggctggggtcaggctgagctttggggctgccgccaggcgggggaagcttgcatggtcagaggtggggcttgcagcctgtggtcttgctggagggggcatcagccacgctggctgccctgaggactgtgacgtgtgggcagaaggggcctctgcagcccagctgtggcccctgctgggacatcttcccaccatgaagacaggcacccagcgaggcacctgccagacactcagaggcccctggatggaggtgtcctgaaggcagctgacaggggctggggcctcaggaacagggatttgtgcccacttgggggtgtctgggttgccccagggatgggggcaggggaggggagcccaggccagcccagggccccacactcaggggctgagcaggacacaacagccacagtccctggacctggggccaagggttctgaggtgggggcggcgttctgggctctctgggagtgggggcctggcagaggtttcctggcagcaccaggtatccatgaggtacgtggccctggcccctggcatgctgtggggcggaggctgtgcggcctttcgggtccctgtctgagcctgccccctccacagttcttcctgctgctgctgctggtgttcctgctggaggccaccatcgccatcctcttcttcgcctacacggacaagattgacaggtatgcccagcaagacctgaagaaaggcttgcacctgtacggcacgcagggcaacgtgggcctcaccaacgcctggagcatcatccagaccgacgtgaggcgtgggcaggtgggcggggtcggcgggtgccccctcccctcctgcctcagcccgacctgagcttgccccccagttccgctgctgtggcgtctccaactacactgactggttcgaggtgtacaacgccacgcgggtacctgactcctgctgcttggagttcagtgagagctgtgggctgcacgcccccggcacctggtggaaggcgccgtgctacgagacggtgaaggtgtggcttcaggagaacctgctggctgtgggcatctttgggctgtgcacggcgctggtgcagatcctgggcctgaccttcgccatgaccatgtactgccaagtggtcaaggcagacacctactgcgcgtaggccgcccaccgcccgcttctctgccaaaaggacgcccacggggagatggccgcacccacagctgcctttcccaccaccagcctcggtgctctgccccatgctgggaggagggagggagggacaggtgcctggagcccccggaaccctgtttctggaaggccctagctcaggtggcttcagggcctccggaccccccctgggaggggtggccacgtgctggctgcggaacccagggcaggggtgggaggggcctccagcactttttatatttacgtattctccaaagcagtgttcacacgggagccagcctgtggcccccagcctcctggaaaacaggttggcgctggaggagccgggtcttggcatcctggaggtggccccactggtcctggtgctccaggcggggccgtggacccctcacctacattccatagtgggcccgtggggctcctggtgcatcttaataaagtgtgagcagcaaccttgcgtct

SEQ ID NO: 8741 - protein, 168 aa, Homo sapiens
MGAGEGSPGQPRAPHSGAEQDTTATVPGPGAKGSEVGAAFWALWEWGPGRGFLAAPGIHEVRGPGPWHAVGRRLCGLSGPCLSLPPPQFFLLLLLVFLLEATIAILFFAYTDKIDRYAQQDLKKGLHLYGTQGNVGLTNAWSIIQTDVRRGQVGGVGGCPLPSCLSPT

SEQ ID NO: 8742 - DNA, 975 bp, Homo sapiens
tgcagcccagctgtggcccctgctgggacatcttcccaccatgaagacaggcacccagcgaggcacctgccagacactcagaggcccctggatggaggtgtcctgaaggcagctgacaggggctggggcctcaggaacagggatttgtgcccacttgggggtgtctgggttgccccagggatgggggcaggggaggggagcccaggccagcccagggccccacactcaggggctgagcaggacacaacagccacagtccctggacctggggccaagggttctgaggtgggggcggcgttctgggctctctgggagtgggggcctggcagaggtttcctggcagcaccaggtatccatgaggtacgtggccctggcccctggcatgctgtggggcggaggctgtgcggcctttcgggtccctgtctgagcctgccccctccacagttcttcctgctgctgctgctggtgttcctgctggaggccaccatcgccatcctcttcttcgcctacacggacaagattgacaggtatgcccagcaagacctgaagaaaggcttgcacctgtacggcacgcagggcaacgtgggcctcaccaacgcctggagcatcatccagaccgacgtgaggcgtgggcaggtgggcggggtcggcgggtgccccctcccctcctgcctcagcccgacctgagcttgccccccagttccgctgctgtggcgtctccaactacactgactggttcgaggtgtacaacgccacgcgggtacctgactcctgctgcttggagttcagtgagagctgtgggctgcacgcccccggcacctggtggaaggcgccgtgctacgagacggtgaaggtgtggcttcaggagaacctgctggctgtgggcatctttgggctgtgcacggcgctggtgcaggtatggcctgggggcctgcgggctccctgcccccactttgttaggaccttctgagccca

SEQ ID NO: 8743 - protein, 168 aa, Homo sapiens; identical to SEQ ID NO: 8741

SEQ ID NO: 8744 - DNA, 604 bp, Homo sapiens
cccgaagtccaagtggcgaagcaaaatcctcctggggctcaacttctatggtatggactacgcgacctccaaggatgcccgtgagcctgttgtcggggccaggtacatccagacactgaaggaccacaggccccggatggtgtgggacagccaggcctcagagcacttcttcgagtacaagaagagccgcagtgggaggcacgtcgtcttctacccaaccctgaagtccctgcaggtgcggctggagctggcccgggagctgggcgttggggtctctatctgggagctgggccagggcctggactacttctacgacctgctctaggacgggagctggggagggggtcctgggtcggacccaaggcacccacacttgagaaagcctccgcctggacgtcagggaggcctgcgagctgccacagtgcaggtgcagccgttcccaccgccctgctgctgcttgacacgggcataggagatacaagtggtgtgtgcggcggttcatgcctgtaatcccagtactttggaaagccgtggcgggaggaacgctgggcaacatggtgaaaccccgtctctaccccctaaaaatagaaaaattagcaagaca

SEQ ID NO: 8745 - protein, 90 aa, Homo sapiens
MDYATSKDAREPVVGARYIQTLKDHRPRMVWDSQASEHFFEYKKSRSGRHVVFYPTLKSLQVRLELARELGVGVSIWELGQGLDYFYDLL

SEQ ID NO: 8746 - DNA, 3377 bp, Homo sapiens
gaatgcgcggtgactcaaaagtgctggccacgcgctcgttcatccaagcgcgaggggctgagttgggaacttggtttgcctcctggggctccggctcgtgcaatgtgcaaggcgggggtgcggaccgagagagcgcgcgtttcgggcagtccccgctggagacagcgcagtgggcgccatcggcctggggatggagatggtccactcaggcgggggtcggggggacgccaggagtggtgactccgggtccccgggggagcgtgccggggcggagcccaccgcgcggttctcccggcaccgccgagccgggcagaggccctggagcccaaggccccgcgcggccccacgccaagggcgccaggcctgcctaagagccgtggcgctgggaacccggctacccctgggccgggaacctgataaccagctccagcgcgagcaccaggggcgctcaaggtgaacgcgccgggcccggggtccgcccccggcgcggccccgccccggccccggccccggccccggccccgactttcgggcagccctgcccagtcccctgtcctggcccagcccctctccatcccagcgtgccgtgcgcggcggcggcgcgcgggcgcctggggcgggacttccggcgcgctggagcgttttccggccgtgcgtttgtggccgtccggcctccctgacatgcagccctctggaccccgaggttggaccctactgtgacacacctaccatgcggacactcttcaacctcctctggcttgccctggcctgcagccctgttcacactaccctgtcaaagtcagatgccaaaaaagccgcctcaaagacgctgctggagaagagtcagttttcagataagccggtgcaagaccggggtttggtcgtgacggacctcaaagctgagagtgtggttcttgagcatcgcagctactgctcggcaaaggcccgggacagacactttgctggggatgtactgggctatgtcactccatggaacagccatggctacgatgtcaccaaggtctttgggagcaagttcacacagatctcacccgtctggctgcagctgaagagacgtggccgtgagatgtttgaggtcacgggcctccacgacgtggaccaagggtggatgcgagctgtcaggaagcatgccaagggcctgcacatagtgcctcggctcctgtttgaggactggacttacgatgatttccggaacgtcttagacagtgaggatgagatagaggagctgagcaagaccgtggtccaggtggcaaagaaccagcatttcgatggcttcgtggtggaggtctggaaccagctgctaagccagaagcgcgtgggcctcatccacatgctcacccacttggccgaggctctgcaccaggcccggctgctggccctcctggtcatcccgcctgccatcacccccgggaccgaccagctgggcatgttcacgcacaaggagtttgagcagctggcccccgtgctggatggtttcagcctcatgacctacgactactctacagcgcatcagcctggccctaatgcacccctgtcctgggttcgagcctgcgtccaggtcctggacccgaagtccaagtggcgaagcaaaatcctcctggggctcaacttctatggtatggactacgcgacctccaaggatgcccgtgagcctgttgtcggggccaggtacatccagacactgaaggaccacaggccccggatggtgtgggacagccaggcctcagagcacttcttcgagtacaagaagagccgcagtgggaggcacgtcgtcttctacccaaccctgaagtccctgcaggtgcggctggagctggcccgggagctgggcgttggggtctctatctgggagctgggccagggcctggactacttctacgacctgctctaggtgggcattgcggcctccgcggtggacgtgttcttttctaagccatggagtgagtgagcaggtgtgaaatacaggcctccactccgtttgctgtgacgggtctgctgcagtcctcagtcgggggtcctgggcaccatgtgactccccatcctcccatgaggggtccctgccctggatgagtcctagctgggggacaccctgagagctcgagcccctcccacccgggcatccgctggctgcctcctgtcagctgggcaggcggggcccacagtacctgccccaccaggacagcctggctcaggcctttctgggctgcttctcacatcctgggctggatgtgggtttggaagctctggaaccatcccggactcgcccactcctggattcgagggccctcgcagggacagctctgcccagcatcaccccagggcctggcagtgatagagctgagagctccacccccacatacctgccacccacctggccagccacagcacgtgtgtcacctgcagagagccacccagacgtccccaccgagtccagcacggcaagggtgcaggggctgccctagaaatgggctcagaggagcctggcccaccctcttgaaactggtcctggaccttggctcagctctgccgcctcaggtagcacgacccccaggccagcctggacacatcagggagcatggtgaggggcaacggcaggacccgtgggccatatcgggacaggcatttccagcgaggggtggggcagaggacatgtggctggcaggctacacccaccctgccatgcagcggtgtccaggctctggggaggccctggggaatttggaggcatcatgagccaaggcctggtggccctcgttcccctgcccctcgtcaccatcctgtccttggctggccgtgaggactcccctcctcaccactgggtcccacagggctgaggtgggcagtagagggcataggtgggtacatgtcccgggcaaggtctctcggggggacagaagtgagtccagggagtgggtgggcctgggcgtccctcactcagaatgccgtggggtgaggacggtgaggacagggtgggcactgggttctggtttagagtcagtaatgttagggcgcagtgggcagggggtcaggacatctccagccggtggtgaggaagcatggtggggtctcctccacaggacgggagctggggagggggtcctgggtcggacccaaggcacccacacttgagaaagcctccgcctggacgtcagggaggcctgcgagctgccacagtgcaggtgcagccgttcccaccgccctgctgctgcttgacacgggcataggagatacaagtggtgtgtgcggcggttcatgcctgtaatcccagtactttggaaagccgtggcgggaggaacgctgggcaacatggtgaaaccccgtctctaccccctaaaaatagaaaaattagcaagaca

SEQ ID NO: 8747 - protein, 393 aa, Homo sapiens
MRTLFNLLWLALACSPVHTTLSKSDAKKAASKTLLEKSQFSDKPVQDRGLVVTDLKAESVVLEHRSYCSAKARDRHFAGDVLGYVTPWNSHGYDVTKVFGSKFTQISPVWLQLKRRGREMFEVTGLHDVDQGWMRAVRKHAKGLHIVPRLLFEDWTYDDFRNVLDSEDEIEELSKTVVQVAKNQHFDGFVVEVWNQLLSQKRVGLIHMLTHLAEALHQARLLALLVIPPAITPGTDQLGMFTHKEFEQLAPVLDGFSLMTYDYSTAHQPGPNAPLSWVRACVQVLDPKSKWRSKILLGLNFYGMDYATSKDAREPVVGARYIQTLKDHRPRMVWDSQASEHFFEYKKSRSGRHVVFYPTLKSLQVRLELARELGVGVSIWELGQGLDYFYDLL

SEQ ID NO: 8748 - DNA, 570 bp, Homo sapiens
ctgaaaggacttggtggggtggcttcttccgaggaagctcctggaagatgtttttcctgaggtttcctctaatacagggttcacacggcctggggctctggccaccccaccaggtgttgtcccccagaccactggggacagtggctgccccgagtggccctgcccctgctgagagccacagcctttgggggtacagggtggggctgtgggggagctgggtgggctcccaaatccatatcctggtctccccaggtacatccagacactgaaggaccacaggccccggatggtgtgggacagccaggcctcagagcacttcttcgagtacaagaagagccgcagtgggaggcacgtcgtcttctacccaaccctgaagtccctgcaggtgcggctggagctggcccgggagctgggcgttggggtctctatctgggagctgggccagggcctggactacttctacgacctgctctaggtgggcattgcggcctccgcggtggacgtgttcttttctaagccatggagtgagtgagcaggtgtgaaatacaggcctccactccgtttgctgtg

SEQ ID NO: 8749 - protein, 62 aa, Homo sapiens [sequence omitted]

SEQ ID NO: 8750 - DNA, 1431 bp, Homo sapiens
gtgcgtttgtggccgtccggcctccctgacatgcagccctctggaccccgaggttggaccctactgtgacacacctaccatgcggacactcttcaacctcctctggcttgccctggcctgcagccctgttcacactaccctgtcaaagtcagatgccaaaaaagccgcctcaaagacgctgctggagaaggtgaagttttgctcttgttgcccaggctggagcgcaatggcgcgatcttggctcaccgcaacctctgccacccagagtcagttttcagataagccggtgcaagaccggggtttggtcgtgacggacctcaaagctgagagtgtggttcttgagcatcgcagctactgctcggcaaaggcccgggacagacactttgctggggatgtactgggctatgtcactccatggaacagccatggctacgatgtcaccaaggtctttgggagcaagttcacacagatctcacccgtctggctgcagctgaagagacgtggccgtgagatgtttgaggtcacgggcctccacgacgtggaccaagggtggatgcgagctgtcaggaagcatgccaagggcctgcacatagtgcctcggctcctgtttgaggactggacttacgatgatttccggaacgtcttagacagtgaggatgagatagaggagctgagcaagaccgtggtccaggtggcaaagaaccagcatttcgatggcttcgtggtggaggtctggaaccagctgctaagccagaagcgcgtgggcctcatccacatgctcacccacttggccgaggctctgcaccaggcccggctgctggccctcctggtcatcccgcctgccatcacccccgggaccgaccagctgggcatgttcacgcacaaggagtttgagcagctggcccccgtgctggatggtttcagcctcatgacctacgactactctacagcgcatcagcctggccctaatgcacccctgtcctgggttcgagcctgcgtccaggtcctggacccgaagtccaagtggcgaagcaaaatcctcctggggctcaacttctatggtatggactacgcgacctccaaggatgcccgtgagcctgttgtcggggccaggtacatccagacactgaaggaccacaggccccggatggtgtgggacagccaggcctcagagcacttcttcgagtacaagaagagccgcagtgggaggcacgtcgtcttctacccaaccctgaagtccctgcaggtgcggctggagctggcccgggagctgggcgttggggtctctatctgggagctgggccagggcctggactacttctacgacctgctctaggtgggcattgcggcctccgcggtggacgtgttcttttctaagccatggagtgagtgagcaggtgtgaaatacaggcctccactccgtttgctgtg

SEQ ID NO: 8751 - protein, 418 aa, Homo sapiens
MRTLFNLLWLALACSPVHTTLSKSDAKKAASKTLLEKVKFCSCCPGWSAMARSWLTATSATQSQFSDKPVQDRGLVVTDLKAESVVLEHRSYCSAKARDRHFAGDVLGYVTPWNSHGYDVTKVFGSKFTQISPVWLQLKRRGREMFEVTGLHDVDQGWMRAVRKHAKGLHIVPRLLFEDWTYDDFRNVLDSEDEIEELSKTVVQVAKNQHFDGFVVEVWNQLLSQKRVGLIHMLTHLAEALHQARLLALLVIPPAITPGTDQLGMFTHKEFEQLAPVLDGFSLMTYDYSTAHQPGPNAPLSWVRACVQVLDPKSKWRSKILLGLNFYGMDYATSKDAREPVVGARYIQTLKDHRPRMVWDSQASEHFFEYKKSRSGRHVVFYPTLKSLQVRLELARELGVGVSIWELGQGLDYFYDLL

SEQ ID NO: 8752 - DNA, 900 bp, Homo sapiens
gcctcccaaagtgctgggattacaggggtgagccccgtgcctggcctggtcatttctcttgctgtgcccaacctgccattaatcccatccatcctgagcccgacgtggtcatttctctcaccacccaacctaccgcccgacgtggtcctttccctcaccacccaacctaccgcccgacgtggtcctttccctcaccacccaacctaccgcccgacgtggtcctttccctcaccacccagcctaccgcccgacgtggtcctttccctcaccacccagcctaccgcccgacgtcctttccctcaccacccagcctaccgcccgacgtggtcctttccctcaccacccagcctaccgcccgacgtggtcctttccctcaccacccagcctaccgcccgacgtggtcctttccctcaccacccagcctaccgttaatctcatccagtgcttttgtcacctcgtgttgtaattcaattttttttattttttatgagatgggggtctcactatgtggtccaggctggtcttgaactcctgggctcaagcgatcctcctgcctcagcctcccaaagtgctgcgatgacacgcgtgagccaccaagcccagccaacatgttataattctctagaggcttgcttggggtcccctttacgtcttccatgtctctactaaacttttgcagattgggattcagttgtaagaactgctgagtgcccatgtctgctggttctgatatcagggtcggtttcaggaggctgcttttcctccttgtttggggtcctattatgctgccttcctgtgggcctggtactctcgggttgatgcctgaggcattgcgaattttaccatgttgcgtgctgggtgttttagcatttttataaatcatcttaatctttgttctgg

SEQ ID NO: 8753 - protein, 60 aa, Homo sapiens
MRWGSHYVVQAGLELLGSSDPPASASQSAAMTRVSHQAQPTCYNSLEACLGSPLRLPCLY

SEQ ID NO: 8754 - DNA, 1143 bp, Homo sapiens
acttccggcgcgctggagcgttttccggccgtgcgtttgtggccgtccggcctccctgacatgcagccctctggaccccgaggttggaccctactgtgacacacctaccatgcggacactcttcaacctcctctggcttgccctggcctgcagccctgttcacactaccctgtcaaagtcagatgccaaaaaagccgcctcaaagacgctgctggagaagagtcagttttcagataagccggtgcaagaccggggtttggtcgtgacggacctcaaagctgagagtgtggttcttgagcatcgcagctactgctcggcaaaggcccgggacagacactttgctggggatgtactgggctatgtcactccatggaacagccatggctacgatgtcaccaaggtctttgggagcaagttcacacagatctcacccgtctggctgcagctgaagagacgtggccgtgagatgtttgaggtcacgggcctccacgacgtggaccaagggtggatgcgagctgtcaggaagcatgccaagggcctgcacatagtgcctcggctcctgtttgaggactggacttacgatgatttccggaacgtcttagacagtgaggatgagatagaggagctgagcaagaccgtggtccaggtggcaaagaaccagcatttcgatggcttcgtggtggaggtctggaaccagctgctaagccagaagcgcgtgaccgaccagctgggcatgttcacgcacaaggagtttgagcagctggcccccgtgctggatggtttcagcctcatgacctacgactactctacagcgcatcagcctggccctaatgcacccctgtcctgggttcgagcctgcgtccaggtcctggacccgaagtccaagtggcgaagcaaaatcctcctggggctcaacttctatggtatggactacgcgacctccaaggatgcccgtgagcctgttgtcggggccaggtgagccaagggctctccctgccgtgctgaaggtgtcactgggcgcgggtgggtgtgggtgtaaggagacagagtgatggggagggtctcggtcccctggggcttctgccccacagagtcagagataggggctgggccaggagccggtcctgcttggtgcccacccca

SEQ ID NO: 8755 - protein, 289 aa, Homo sapiens
MRTLFNLLWLALACSPVHTTLSKSDAKKAASKTLLEKSQFSDKPVQDRGLVVTDLKAESVVLEHRSYCSAKARDRHFAGDVLGYVTPWNSHGYDVTKVFGSKFTQISPVWLQLKRRGREMFEVTGLHDVDQGWMRAVRKHAKGLHIVPRLLFEDWTYDDFRNVLDSEDEIEELSKTVVQVAKNQHFDGFVVEVWNQLLSQKRVTDQLGMFTHKEFEQLAPVLDGFSLMTYDYSTAHQPGPNAPLSWVRACVQVLDPKSKWRSKILLGLNFYGMDYATSKDAREPVVGAR

SEQ ID NO: 8756 - DNA, 820 bp, Homo sapiens
acttccggcgcgctggagcgttttccggccgtgcgtttgtggccgtccggcctccctgacatgcagccctctggaccccgaggttggaccctactgtgacacacctaccatgcggacactcttcaacctcctctggcttgccctggcctgcagccctgttcacactaccctgtcaaagtcagatgccaaaaaagccgcctcaaagacgctgctggagaagagtcagttttcagataagccggtgcaagaccggggtttggtcgtgacggacctcaaagctgagagtgtggttcttgagcatcgcagctactgctcggcaaaggcccgggacagacactttgctggggatgtactgggctatgtcactccatggaacagccatggctacgatgtcaccaaggtctttgggagcaagttcacacagatctcacccgtctggctgcagctgaagagacgtggccgtgagatgtttgaggtcacgggcctccacgacgtggaccaagggtggatgcgagctgtcaggaagcatgccaagggcctgcacatagtgcctcggctcctgtttgaggactggacttacgatgatttccggaacgtcttagacagtgaggatgagatagaggagctgagcaagaccgtggtccaggtggcaaagaaccagcatttcgatggcttcgtggtggaggtctggaaccagctgctaagccagaagcgcgtgaccgaccagctgggcatgttcacgcacaaggagtttgagcagctggcccccgtgctggatggtttcagcctcatgacctacgactactctacagcgcatcag

SEQ ID NO: 8757 - protein, 236 aa, Homo sapiens
MRTLFNLLWLALACSPVHTTLSKSDAKKAASKTLLEKSQFSDKPVQDRGLVVTDLKAESVVLEHRSYCSAKARDRHFAGDVLGYVTPWNSHGYDVTKVFGSKFTQISPVWLQLKRRGREMFEVTGLHDVDQGWMRAVRKHAKGLHIVPRLLFEDWTYDDFRNVLDSEDEIEELSKTVVQVAKNQHFDGFVVEVWNQLLSQKRVTDQLGMFTHKEFEQLAPVLDGFSLMTYDYSTAH

SEQ ID NO: 8758 - DNA, 554 bp, Homo sapiens
acttccggcgcgctggagcgttttccggccgtgcgtttgtggccgtccggcctccctgacatgcagccctctggaccccgaggttggaccctactgtgacacacctaccatgcggacactcttcaacctcctctggcttgccctggcctgcagccctgttcacactaccctgtcaaagtcagatgccaaaaaagccgcctcaaagacgctgctggagaagagtcagttttcagataagccggtgcaagaccggggtttggtcgtgacggacctcaaagctgagagtgtggttcttgagcatcgcagctactgctcggcaaaggcccgggacagacactttgctggggatgtactgggctatgtcactccatggaacagccatggctacgatgtcaccaaggtctttgggagcaagttcacacagatctcacccgtctggctgcagctgaagagacgtggccgtgagatgtttgaggtcacgggcctccacgacgtggaccaaggttctcatccttcctgcttgactgtgcttgccccacaggctgaaaagagtg

SEQ ID NO: 8759 - protein, 147 aa, Homo sapiens
MRTLFNLLWLALACSPVHTTLSKSDAKKAASKTLLEKSQFSDKPVQDRGLVVTDLKAESVVLEHRSYCSAKARDRHFAGDVLGYVTPWNSHGYDVTKVFGSKFTQISPVWLQLKRRGREMFEVTGLHDVDQGSHPSCLTVLAPQAEK

SEQ ID NO: 8760 - DNA, 594 bp, Homo sapiens
acagccaccaggcacctccaacaaccaggtgtgagtaatttttttttttttttgagacagggtcctatctgtcgcccaggctggagtgcagcagtgcaatcacagctcactgcagccttgatgtcctgggctcaagtgatcagcctcccgaagtgctgggattacggcgtgagccaccactcccagccttcgagtgcttttgaggatgtctgtgagaggcatcctcaggctggggacccaggaatatcccaggtaaggcatggggtctcctaaagcagggatccagtcagcagcagaaacactcatctctgcaggcctcctcaccccaccggcctgcccctgccctactctgtcccccccatgcccacggcagacaggcagtgggcaagcaggagggcctcagggcaggtcagacctgggcctacagggcagagcctggacctccgccagggcactccacacccaccccggccctctggaccccgaggttggaccctactgtgacacacctaccatgcggacactcttcaacctcctctggcttgccctggcctgcagccctgttcacactaccctgtcaaagtcagatgccaa

SEQ ID NO: 8761 - protein, 110 aa, Homo sapiens
MGSPKAGIQSAAETLISAGLLTPPACPCPTLSPPCPRQTGSGQAGGPQGRSDLGLQGRAWTSARALHTHPGPLDPEVGPYCDTPTMRTLFNLLWLALACSPVHTTLSKSD

SEQ ID NO: 8762 - DNA, 4532 bp, Homo sapiens
gcggcccagaaagcggcgctgggaccctgaggcggccgtggttaggcggctccccggcggctcctccgcggcggtgacggcgaccgcactccccgcttcccgctccccgcgctcctccgcccgggtccgccagccgaggccgctcccgagcgtcggaagatgccggccgtgtccaagggggacgggatgcggggcctggcggtcttcatctcggatatccgcaactgtaggtgacaaggctcttgatggctatagtaaaaaaaagtacgtctgcaagttgctcttcatctttctccttggtcatgacattgactttggacacatggaggctgtgaacctgctgagttcaaacagatacacggaaaagcagatcggctaccttttcatctctgtgttggtgaactcaaacagtgagctgatccgcctgatcaacaacgccatcaagaatgacctggccagccgcaaccccaccttcatgggcctggccctgcactgcatcgccagcgtgggcagccgggagatggccgaggccttcgccggggagatccctaaggtcctcgtagccggagacactatggacagcgtgaagcagagcgcggccctgtgcttgctgcgcctgtacaggacgtcccccgatcttgtccccatgggcgactggacatcccgagtggtgcacctgctcaatgaccagcacttgggtgtggtaactgcagccacaagtctgatcaccactttagcacagaagaacccagaagagtttaaaacctccgtgtctctggctgtctctaggctaagcagaatcgtgacgtctgcatccacagatctccaggattacacttactattttgtcccggctccctggctgtctgtcaaactgctgagactgctgcagtgctacccacccccagaccctgcagtgcgaggccgcctgactgagtgcctggagaccatcctgaacaaagcccaagaaccgcccaagtcgaagaaggtccagcactccaacgcgaagaatgccgtgctcttcgaggccatcagcttaatcattcaccatgacagtgagccgaacctgctcgtccgtgcctgcaaccagttgggccagtttctgcagcaccgcgagaccaacctgcgctacctggccctggagagcatgtgcacgctggccagctctgagttctcccatgaggctgtcaagacgcacatcgagacggtcatcaacgccctgaaggcgacgggacgtgagcgtgcggcagcgggccgtggacctcctctacgccatgtgcgaccgcagcaacgccccacagatcgtggccgagatgctgagctatctggagacagctgactactccatccgagaagagattgtgctgaaggtcgccatcctggctgagaagtacgcggtggactacacctggtatgtggataccatcttgaacttgatccgaattgctggtgattacgtgagtgaagaggtgtggtaccgagtcattcagatcgtcatcaaccgggacgacgtgcagggctacgcggccaagactgtgttcgaggctcttcaggctcccgcgtgccacgagaacctggtcaaagtgggcggctacatcctgggggagtttggaaacttgatagctggagacccgagatccagcccgctgatccagttccacctgctgcactccaagttccacctgtgcagcgtccccacccgcgcgctgctcctgtccacctacatcaagttcgtgaacctcttcccggaggtgaagcccaccatccaggacgtgctgcgcagcgacagccagctcaggaacgcagacgtggagctgcagcagcgtgctgtggagtacctgcggctcagcaccgtggccagcaccgacattctggcgaccgtgctggaggagatgcccccattcccggagcgggagtcctccatcttggcaaagctcaagaagaagaagggccccagcacggtgacagacctggaggacaccaagcgggacaggagtgtggacgtgaacgggggtcctgagcctgccccagccagtaccagcgccgtgtctacgccttctccgtcggcagacctgctgggtctcggggctgccccccctgcccccgcgggccccccaccctcctccggcggcagcgggctgctcgtggacgtgttctcagactcggcctctgtggtcgcgcctctcgctcctggctccgaagacaactttgccaggtttgtttgtaaaaacaatggtgtgttgtttgaaaaccagctgcttcaaattggacttaagtctgaatttcggcagaatttaggtcggatgtttatcttttatggtaataagacctccacgcagttcctaaactttaccccaacactaatctgttcagacgaccttcagcctaatctgaacctgcagaccaagcccgtggacccgaccgtggaggggggcgcgcaggtgcagcaggtggtcaacatagagtgcgtgtccgacttcacggaggcgccagtcctcaacattcagttcaggtatgggggcaccttccagaacgtgtctgtgcagctgcccatcactctcaacaaattcttccagccgacagaaatggcttctcaggatttctttcaacgttggaagcagttgagcaatccacagcaggaagtgcagaacatcttcaaagcaaagcacccaatggacacagaagtcaccaaagccaagatcattggatttggttctgcacttcttgaagaagttgatcctaatcctgcgaatttcgtgggagctggaatcatccacacgaaaaccacccagattggatgcctgctgcgcttggagccgaacctgcaagcccagatgtaccggctcacgctgcgcacaagtaaggaagccgtttctcagagattatgtgaattgctctcagcgcagttttagtcctgaggatggaagaccaggctcgtgtgtcttgtgttgtcttcgtctgtgccgtttgtcttcgtggccatcctgcagatgagcaccgtgtccagtgccacagcacaaggcgcctccccgccccgccgccccacacctctcccctttgggctggacgggaacacacgtgtgtggctcaggaggaaaagctcagcctggactgtggcagccacggcagaaggtggatcttgggatcaatttttataaaaatcgagacagttctgtggttaaatctacaaattaaagggaaattagaagttggcgtgaacgtggcgtttgtgggagtgtcactgagatggcccgtgctgccgcccaccccgcctcggagcctctgggagcagcagtgccactgtgcatggcgtgggctgagccttggtgtgtggccgtcctggtggctgcacacctggcgtcgtcctgggcccttgggaggagcacagctgaccctggttttgctgcagtcccagctggactgttttcccaggcaggattttaatctagaatttagaaacatttgtatttgtaatgacttctggcaaaagcacgtgtcctggccggatgtaactgttctcctttcccagctcctgtttgtgaagggcgtctgttatgctcctgcagtcgccgaggccttggatgtgcagccaggggaggagcgtcctgccggccccgcagggcccccaggactccagggtaaagtgtgggccggtggcgcaagactcagaggtgtgctcgtctctttcctgtcagagtgggcgtccccaggccacggtgcaggcctgagtccttccaccggccccgtccagtcgtccctggaggggctgtggaggagggacgcctctgtgtggtcaggaagtgaaggggccattggccgcatgccatgtgccacctgcggcttgtgtctcacctgtcatctggactcagcacccaggctgcacgtctgacacctgagaggcgagagagtggggccggcctaggagccaaggctggggccttgcgctctgtccccaggatggtggccttgtttgtcctaaacacacccagcacaggttctggcttcctgacatgctgtggaggcagggagggtgggtggccacatgtgcttgagggttttcaccctggccctcagttgcctgctgtgcgggtccctggggcagctgcaggggctcatggacccatcagggtctccacagctcccctgcagtgtgtgcaccccacaatgtctgcggctcttcttccggcgtgtcgggctttgatcacagcatagccacgtcagtggcgtgcgcctctcgcacaggccattctgggtctggtggtgccaggtgccgtgacacgccgtgctgggcttgtgctgcagctgggtggtgtggccctcattctcatgttccagctgctgggcagtgctctgcctgtgtgctgcgcctgcaggctgcgtgtgctgccgtggatctcctgcatcccttgacccctcccgccatcagaggaaaggctgctccccgaggcaccgcttccctgtgcggcgctgcagaggggccctcagtgtggcactcctcgtcaaagaaaaataaaggctagaactgcaccccg

SEQ ID NO: 8763 - protein, 545 aa, Homo sapiens
MCDRSNAPQIVAEMLSYLETADYSIREEIVLKVAILAEKYAVDYTWYVDTILNLIRIAGDYVSEEVWYRVIQIVINRDDVQGYAAKTVFEALQAPACHENLVKVGGYILGEFGNLIAGDPRSSPLIQFHLLHSKFHLCSVPTRALLLSTYIKFVNLFPEVKPTIQDVLRSDSQLRNADVELQQRAVEYLRLSTVASTDILATVLEEMPPFPERESSILAKLKKKKGPSTVTDLEDTKRDRSVDVNGGPEPAPASTSAVSTPSPSADLLGLGAAPPAPAGPPPSSGGSGLLVDVFSDSASVVAPLAPGSEDNFARFVCKNNGVLFENQLLQIGLKSEFRQNLGRMFIFYGNKTSTQFLNFTPTLICSDDLQPNLNLQTKPVDPTVEGGAQVQQVVNIECVSDFTEAPVLNIQFRYGGTFQNVSVQLPITLNKFFQPTEMASQDFFQRWKQLSNPQQEVQNIFKAKHPMDTEVTKAKIIGFGSALLEEVDPNPANFVGAGIIHTKTTQIGCLLRLEPNLQAQMYRLTLRTSKEAVSQRLCELLSAQF

SEQ ID NO: 8764 - DNA, 1440 bp, Homo sapiens
gctgggaccctgaggcggccgtggttaggcggctccccggcggctcctccgcggcggtgacggcgaccgcactccccgcttcccgctccccgcgctcctccgcccgggtccgccagccgaggccgctcccgagcgtcggaagatgccggccgtgtccaagggggacgggatgcggggcctggcggtcttcatctcggatatccgcaactgtaggtgacaaggctcttgatggctatagtaaaaaaaagtacgtctgcaagttgctcttcatctttctccttggtcatgacattgactttggacacatggaggctgtgaacctgctgagttcaaacagatacacggaaaagcagatcggctaccttttcatctctgtgttggtgaactcaaacagtgagctgatccgcctgatcaacaacgccatcaagaatgacctggccagccgcaaccccaccttcatgggcctggccctgcactgcatcgccagcgtgggcagccgggagatggccgaggccttcgccggggagatccctaaggtcctcgtagccggagacactatggacagcgtgaagcagagcgcggccctgtgcttgctgcgcctgtacaggacgtcccccgatcttgtccccatgggcgactggacatcccgagtggtgcacctgctcaatgaccagcacttgggtgtggtaactgcagccacaagtctgatcaccactttagcacagaagaacccagaagagtttaaaacctccgtgtctctggctgtctctaggctaagcagaatcgtgacgtctgcatccacagatctccaggattacacttactattttgtcccggctccctggctgtctgtcaaactgctgagactgctgcagtgctacccacccccagaccctgcagtgcgaggccgcctgactgagtgcctggagaccatcctgaacaaagcccaagaaccgcccaagtcgaagaaggtccagcactccaacgcgaagaatgccgtgctcttcgaggccatcagcttaatcattcaccatgacaggtgtccgaacctgcaagcccagatgtaccggctcacgctgcgcacaagtaaggaagccgtttctcagagattatgtgaattgctctcagcgcagttttagtcctgaggatggaagaccaggctcgtgtgtcttgtgttgtcttcgtctgtgccgtttgtcttcgtggccatcctgcagatgagcaccgtgtccagtgccacagcacaaggcgcctccccgccccgccgccccacacctctcccctttgggctggacgggaacacacgtgtgtggctcaggaggaaaagctcagcctggactgtggcagccacggcagaaggtggatcttgggatcaatttttataaaaatcgagacagttctgtggttaaatctacaaattaaagggaaattagaagttgg

SEQ ID NO: 8765 - protein, 277 aa, Homo sapiens
MEAVNLLSSNRYTEKQIGYLFISVLVNSNSELIRLINNAIKNDLASRNPTFMGLALHCIASVGSREMAEAFAGEIPKVLVAGDTMDSVKQSAALCLLRLYRTSPDLVPMGDWTSRVVHLLNDQHLGVVTAATSLITTLAQKNPEEFKTSVSLAVSRLSRIVTSASTDLQDYTYYFVPAPWLSVKLLRLLQCYPPPDPAVRGRLTECLETILNKAQEPPKSKKVQHSNAKNAVLFEAISLIIHHDRCPNLQAQMYRLTLRTSKEAVSQRLCELLSAQF

SEQ ID NO: 8766 - DNA, 2759 bp, Homo sapiens
gctgggaccctgaggcggccgtggttaggcggctccccggcggctcctccgcggcggtgacggcgaccgcactccccgcttcccgctccccgcgctcctccgcccgggtccgccagccgaggccgctcccgagcgtcggaagatgccggccgtgtccaagggggacgggatgcggggcctggcggtcttcatctcggatatccgcaactgtaggtgacaaggctcttgatggctatagtaaaaaaaagtacgtctgcaagttgctcttcatctttctccttggtcatgacattgactttggacacatggaggctgtgaacctgctgagttcaaacagatacacggaaaagcagatcggctaccttttcatctctgtgttggtgaactcaaacagtgagctgatccgcctgatcaacaacgccatcaagaatgacctggccagccgcaaccccaccttcatgggcctggccctgcactgcatcgccagcgtgggcagccgggagatggccgaggccttcgccggggagatccctaaggtcctcgtagccggagacactatggacagcgtgaagcagagcgcggccctgtgcttgctgcgcctgtacaggacgtcccccgatcttgtccccatgggcgactggacatcccgagtggtgcacctgctcaatgaccagcacttgggtgtggtaactgcagccacaagtctgatcaccactttagcacagaagaacccagaagagtttaaaacctccgtgtctctggctgtctctaggctaagcagaatcgtgacgtctgcatccacagatctccaggattacacttactattttgtcccggctccctggctgtctgtcaaactgctgagactgctgcagtgctacccacccccagaccctgcagtgcgaggccgcctgactgagtgcctggagaccatcctgaacaaagcccaagaaccgcccaagtcgaagaaggtccagcactccaacgcgaagaatgccgtgctcttcgaggccatcagcttaatcattcaccatgacaggtgtccgaacctgcaagcccagatgtaccggctcacgctgcgcacaagtaaggaagccgtttctcagagattatgtgaattgctctcagcgcagttttagtcctgaggatggaagaccaggctcgtgtgtcttgtgttgtcttcgtctgtgccgtttgtcttcgtggccatcctgcagatgagcaccgtgtccagtgccacagcacaaggcgcctccccgccccgccgccccacacctctcccctttgggctggacgggaacacacgtgtgtggctcaggaggaaaagctcagcctggactgtggcagccacggcagaaggtggatcttgggatcaatttttataaaaatcgagacagttctgtggttaaatctacaaattaaagggaaattagaagttggcgtgaacgtggcgtttgtgggagtgtcactgagatggcccgtgctgccgcccaccccgcctcggagcctctgggagcagcagtgccactgtgcatggcgtgggctgagccttggtgtgtggccgtcctggtggctgcacacctggcgtcgtcctgggcccttgggaggagcacagctgaccctggttttgctgcagtcccagctggactgttttcccaggcaggattttaatctagaatttagaaacatttgtatttgtaatgacttctggcaaaagcacgtgtcctggccggatgtaactgttctcctttcccagctcctgtttgtgaagggcgtctgttatgctcctgcagtcgccgaggccttggatgtgcagccaggggaggagcgtcctgccggccccgcagggcccccaggactccagggtaaagtgtgggccggtggcgcaagactcagaggtgtgctcgtctctttcctgtcagagtgggcgtccccaggccacggtgcaggcctgagtccttccaccggccccgtccagtcgtccctggaggggctgtggaggagggacgcctctgtgtggtcaggaagtgaaggggccattggccgcatgccatgtgccacctgcggcttgtgtctcacctgtcatctggactcagcacccaggctgcacgtctgacacctgagaggcgagagagtggggccggcctaggagccaaggctggggccttgcgctctgtccccaggatggtggccttgtttgtcctaaacacacccagcacaggttctggcttcctgacatgctgtggaggcagggagggtgggtggccacatgtgcttgagggttttcaccctggccctcagttgcctgctgtgcgggtccctggggcagctgcaggggctcatggacccatcagggtctccacagctcccctgcagtgtgtgcaccccacaatgtctgcggctcttcttccggcgtgtcgggctttgatcacagcatagccacgtcagtggcgtgcgcctctcgcacaggccattctgggtctggtggtgccaggtgccgtgacacgccgtgctgggcttgtgctgcagctgggtggtgtggccctcattctcatgttccagctgctgggcagtgctctgcctgtgtgctgcgcctgcaggctgcgtgtgctgccgtggatctcctgcatcccttgacccctcccgccatcagaggaaaggctgctccccgaggcaccgcttccctgtgcggcgctgcagaggggccctcagtgtggcactcctcgtcaaagaaaaataaaggctagaactgcaccccg

SEQ ID NO: 8767 - protein, 277 aa, Homo sapiens; identical to SEQ ID NO: 8765

SEQ ID NO: 8768 - DNA, 3199 bp, Homo sapiens
ctgggaccctgaggcggccgtggttaggcggctccccggcggctcctccgcggcggtgacggcgaccgcactccccgcttcccgctccccgcgctcctccgcccgggtccgccagccgaggccgctcccgagcgtcggaagatgccggccgtgtccaagggggacgggatgcggggcctggcggtcttcatctcggatatccgcaactgtaggtgacaaggctcttgatggctatagtaaaaaaaagtacgtctgcaagttgctcttcatctttctccttggtcatgacattgactttggacacatggaggctgtgaacctgctgagttcaaacagatacacggaaaagcagatcggctaccttttcatctctgtgttggtgaactcaaacagtgagctgatccgcctgatcaacaacgccatcaagaatgacctggccagccgcaaccccaccttcatgggcctggccctgcactgcatcgccagcgtgggcagccgggagatggccgaggccttcgccggggagatccctaaggtcctcgtagccggagacactatggacagcgtgaagcagagcgcggccctgtgcttgctgcgcctgtacaggacgtcccccgatcttgtccccatgggcgactggacatcccgagtggtgcacctgctcaatgaccagcacttgggtgtggtaactgcagccacaagtctgatcaccactttagcacagaagaacccagaagagtttaaaacctccgtgtctctggctgtctctaggctaagcagaatcgtgacgtctgcatccacagatctccaggattacacttactattttgtcccggctccctggctgtctgtcaaactgctgagactgctgcagtgctacccacccccagaccctgcagtgcgaggccgcctgactgagtgcctggagaccatcctgaacaaagcccaagaaccgcccaagtcgaagaaggtccagcactccaacgcgaagaatgccgtgctcttcgaggccatcagcttaatcattcaccatgacagtgagccgaacctgctcgtccgtgcctgcaaccagttgggccagtttctgcagcaccgcgagaccaacctgcgctacctggccctggagagcatgtgcacgctggccagctctgagttctcccatgaggctgtcaagacgcacatcgagacggtcatcaacgccctgaaggcgacgggacgtgagcgtgcggcagcgggccgtggacctcctctacgccatgtgcgaccgcagcaacgccccacagatcgtggccgagatgctgagctatctggagacagctgactactccatccgagaagagattgtgctgaaggtcgccatcctggctgagaagtacgcggtggactacacctggtatgtggataccatcttgaacttgatccgaattgctggtgattacgtgagtgaagaggtgtggtaccgagtcattcagatcgtcatcaaccgggacgacgtgcagggctacgcggccaagactgtgttcgaggctcttcaggctcccgcgtgccacgagaacctggtcaaagtgggcggctacatcctgggggagtttggaaacttgatagctggagacccgagatccagcccgctgatccagttccacctgctgcactccaagttccacctgtgcagcgtccccacccgcgcgctgctcctgtccacctacatcaagttcgtgaacctcttcccggaggtgaagcccaccatccaggacgtgctgcgcagcgacagccagctcaggaacgcagacgtggagctgcagcagcgtgctgtggagtacctgcggctcagcaccgtggccagcaccgacattctggcgaccgtgctggaggagatgcccccattcccggagcgggagtcctccatcttggcaaagctcaagaagaagaagggccccagcacggtgacagacctggaggacaccaagcgggacaggagtgtggacgtgaacgggggtcctgagcctgccccagccagtaccagcgccgtgtctacgccttctccgtcggcagacctgctgggtctcggggctgccccccctgcccccgcgggccccccaccctcctccggcggcagcgggctgctcgtggacgtgttctcagactcggcctctgtggtcgcgcctctcgctcctggctccgaagacaactttgccaggtttgtttgtaaaaacaatggtgtgttgtttgaaaaccagctgcttcaaattggacttaagtctgaatttcggcagaatttaggtcggatgtttatcttttatggtaataagacctccacgcagttcctaaactttaccccaacactaatctgttcagacgaccttcagcctaatctgaacctgcagaccaagcccgtggacccgaccgtggaggggggcgcgcaggtgcagcaggtggtcaacatagagtgcgtgtccgacttcacggaggcgccagtcctcaacattcagttcaggtatgggggcaccttccagaacgtgtctgtgcagctgcccatcactctcaacaaattcttccagccgacagaaatggcttctcaggatttctttcaacgttggaagcagttgagcaatccacagcaggaagtgcagaacatcttcaaagcaaagcacccaatggacacagaagtcaccaaagccaagatcattggatttggttctgcacttcttgaagaagttgatcctaatcctgcgaatttcgtgggagctggaatcatccacacgaaaaccacccagattggatgcctgctgcgcttggagccgaacctgcaagcccagatgtaccggctcacgctgcgcacaagtaaggaagccgtttctcagagattatgtgaattgctctcagcgcagttttagtcctgaggatggaagaccaggctcgtgtgtcttgtgttgtcttcgtctgtgccgtttgtcttcgtggccatcctgcagatgagcaccgtgtccagtgccacagcacaaggcgcctccccgccccgccgccccacacctctcccctttgggctggacgggaacacacgtgtgtggctcaggaggaaaagctcagcctggactgtggcagccacggcagaaggtggatcttgggatcaatttttataaaaatcgagacagttctgtggttaaatctacaaattaaagggaaattagaagttggcgtg

SEQ ID NO: 8769 - protein, 545 aa, Homo sapiens; identical to SEQ ID NO: 8763

SEQ ID NO: 8770 - DNA, 3013 bp, Homo sapiens
gtggttaggcggctccccggcggctcctccgcggcggtgacggcgaccgcactccccgcttcccgctccccgcgctcctccgcccgggtccgccagccgaggccgctcccgagcgtcggaagatgccggccgtgtccaagggggacgggatgcggggcctggcggtcttcatctcggatatccgcaactgtaggtgacaaggctcttgatggctatagtaaaaaaaagtacgtctgcaagttgctcttcatctttctccttggtcatgacattgactttggacacatggaggctgtgaacctgctgagttcaaacagatacacggaaaagcagatcggctaccttttcatctctgtgttggtgaactcaaacagtgagctgatccgcctgatcaacaacgccatcaagaatgacctggccagccgcaaccccaccttcatgggcctggccctgcactgcatcgccagcgtgggcagccgggagatggccgaggccttcgccggggagatccctaaggtcctcgtagccggagacactatggacagcgtgaagcagagcgcggccctgtgcttgctgcgcctgtacaggacgtcccccgatcttgtccccatgggcgactggacatcccgagtggtgcacctgctcaatgaccagcacttgggtgtggtaactgcagccacaagtctgatcaccactttagcacagaagaacccagaagagtttaaaacctccgtgtctctggctgtctctaggctaagcagaatcgtgacgtctgcatccacagatctccaggattacacttactattttgtcccggctccctggctgtctgtcaaactgctgagactgctgcagtgctacccacccccagaccctgcagtgcgaggccgcctgactgagtgcctggagaccatcctgaacaaagcccaagaaccgcccaagtcgaagaaggtccagcactccaacgcgaagaatgccgtgctcttcgaggccatcagcttaatcattcaccatgacagtgagccgaacctgctcgtccgtgcctgcaaccagttgggccagtttctgcagcaccgcgagaccaacctgcgctacctggccctggagagcatgtgcacgctggccagctctgagttctcccatgaggctgtcaagacgcacatcgagacggtcatcaacgccctgaaggcgacgggacgtgagcgtgcggcagcgggccgtggacctcctctacgccatgtgcgaccgcagcaacgccccacagatcgtggccgagatgctgagctatctggagacagctgactactccatccgagaagagattgtgctgaaggtcgccatcctggctgagaagtacgcggtggactacacctggtatgtggataccatcttgaacttgatccgaattgctggtgattacgtgagtgaagaggtgtggtaccgagtcattcagatcgtcatcaaccgggacgacgtgcagggctacgcggccaagactgtgttcgaggctcttcaggctcccgcgtgccacgagaacctggtcaaagtgggcggctacatcctgggggagtttggaaacttgatagctggagacccgagatccagcccgctgatccagttccacctgctgcactccaagttccacctgtgcagcgtccccacccgcgcgctgctcctgtccacctacatcaagttcgtgaacctcttcccggaggtgaagcccaccatccaggacgtgctgcgcagcgacagccagctcaggaacgcagacgtggagctgcagcagcgtgctgtggagtacctgcggctcagcaccgtggccagcaccgacattctggcgaccgtgctggaggagatgcccccattcccggagcgggagtcctccatcttggcaaagctcaagaagaagaagggccccagcacggtgacagacctggaggacaccaagcgggacaggagtgtggacgtgaacgggggtcctgagcctgccccagccagtaccagcgccgtggtttgtttgtaaaaacaatggtgtgttgtttgaaaaccagctgcttcaaattggacttaagtctgaatttcggcagaatttaggtcggatgtttatcttttatggtaataagacctccacgcagttcctaaactttaccccaacactaatctgttcagacgaccttcagcctaatctgaacctgcagaccaagcccgtggacccgaccgtggaggggggcgcgcaggtgcagcaggtggtcaacatagagtgcgtgtccgacttcacggaggcgccagtcctcaacattcagttcaggtatgggggcaccttccagaacgtgtctgtgcagctgcccatcactctcaacaaattcttccagccgacagaaatggcttctcaggatttctttcaacgttggaagcagttgagcaatccacagcaggaagtgcagaacatcttcaaagcaaagcacccaatggacacagaagtcaccaaagccaagatcattggatttggttctgcacttcttgaagaagttgatcctaatcctgcgaatttcgtgggagctggaatcatccacacgaaaaccacccagattggatgcctgctgcgcttggagccgaacctgcaagcccagatgtaccggctcacgctgcgcacaagtaaggaagccgtttctcagagattatgtgaattgctctcagcgcagttttagtcctgaggatggaagaccaggctcgtgtgtcttgtgttgtcttcgtctgtgccgtttgtcttcgtggccatcctgcagatgagcaccgtgtccagtgccacagcacaaggcgcctccccgccccgccgccccacacctctcccctttgggctggacgggaacacacgtgtgtggctcaggaggaaaagctcagcctggactgtggcagccacggcagaaggtggatcttgggatcaatttttataaaaatcgagacagttctgtggttaaatctacaaattaaagggaaattagaagttggcgtg

SEQ ID NO: 8771 - protein, 338 aa, Homo sapiens
MEAVNLLSSNRYTEKQIGYLFISVLVNSNSELIRLINNAIKNDLASRNPTFMGLALHCIASVGSREMAEAFAGEIPKVLVAGDTMDSVKQSAALCLLRLYRTSPDLVPMGDWTSRVVHLLNDQHLGVVTAATSLITTLAQKNPEEFKTSVSLAVSRLSRIVTSASTDLQDYTYYFVPAPWLSVKLLRLLQCYPPPDPAVRGRLTECLETILNKAQEPPKSKKVQHSNAKNAVLFEAISLIIHHDSEPNLLVRACNQLGQFLQHRETNLRYLALESMCTLASSEFSHEAVKTHIETVINALKATGRERAAAGRGPPLRHVRPQQRPTDRGRDAELSGDS

SEQ ID NO: 8772 - DNA, 4328 bp, Homo sapiens
gtggttaggcggctccccggcggctcctccgcggcggtgacggcgaccgcactccccgcttcccgctccccgcgctcctccgcccgggtccgccagccgaggccgctcccgagcgtcggaagatgccggccgtgtccaagggggacgggatgcggggcctggcggtcttcatctcggatatccgcaactgtaggtgacaaggctcttgatggctatagtaaaaaaaagtacgtctgcaagttgctcttcatctttctccttggtcatgacattgactttggacacatggaggctgtgaacctgctgagttcaaacagatacacggaaaagcagatcggctaccttttcatctctgtgttggtgaactcaaacagtgagctgatccgcctgatcaacaacgccatcaagaatgacctggccagccgcaaccccaccttcatgggcctggccctgcactgcatcgccagcgtgggcagccgggagatggccgaggccttcgccggggagatccctaaggtcctcgtagccggagacactatggacagcgtgaagcagagcgcggccctgtgcttgctgcgcctgtacaggacgtcccccgatcttgtccccatgggcgactggacatcccgagtggtgcacctgctcaatgaccagcacttgggtgtggtaactgcagccacaagtctgatcaccactttagcacagaagaacccagaagagtttaaaacctccgtgtctctggctgtctctaggctaagcagaatcgtgacgtctgcatccacagatctccaggattacacttactattttgtcccggctccctggctgtctgtcaaactgctgagactgctgcagtgctacccacccccagaccctgcagtgcgaggccgcctgactgagtgcctggagaccatcctgaacaaagcccaagaaccgcccaagtcgaagaaggtccagcactccaacgcgaagaatgccgtgctcttcgaggccatcagcttaatcattcaccatgacagtgagccgaacctgctcgtccgtgcctgcaaccagttgggccagtttctgcagcaccgcgagaccaacctgcgctacctggccctggagagcatgtgcacgctggccagctctgagttctcccatgaggctgtcaagacgcacatcgagacggtcatcaacgccctgaaggcgacgggacgtgagcgtgcggcagcgggccgtggacctcctctacgccatgtgcgaccgcagcaacgccccacagatcgtggccgagatgctgagctatctggagacagctgactactccatccgagaagagattgtgctgaaggtcgccatcctggctgagaagtacgcggtggactacacctggtatgtggataccatcttgaacttgatccgaattgctggtgattacgtgagtgaagaggtgtggtaccgagtcattcagatcgtcatcaaccgggacgacgtgcagggctacgcggccaagactgtgttcgaggctcttcaggctcccgcgtgccacgagaacctggtcaaagtgggcggctacatcctgggggagtttggaaacttgatagctggagacccgagatccagcccgctgatccagttccacctgctgcactccaagttccacctgtgcagcgtccccacccgcgcgctgctcctgtccacctacatcaagttcgtgaacctcttcccggaggtgaagcccaccatccaggacgtgctgcgcagcgacagccagctcaggaacgcagacgtggagctgcagcagcgtgctgtggagtacctgcggctcagcaccgtggccagcaccgacattctggcgaccgtgctggaggagatgcccccattcccggagcgggagtcctccatcttggcaaagctcaagaagaagaagggccccagcacggtgacagacctggaggacaccaagcgggacaggagtgtggacgtgaacgggggtcctgagcctgccccagccagtaccagcgccgtggtttgtttgtaaaaacaatggtgtgttgtttgaaaaccagctgcttcaaattggacttaagtctgaatttcggcagaatttaggtcggatgtttatcttttatggtaataagacctccacgcagttcctaaactttaccccaacactaatctgttcagacgaccttcagcctaatctgaacctgcagaccaagcccgtggacccgaccgtggaggggggcgcgcaggtgcagcaggtggtcaacatagagtgcgtgtccgacttcacggaggcgccagtcctcaacattcagttcaggtatgggggcaccttccagaacgtgtctgtgcagctgcccatcactctcaacaaattcttccagccgacagaaatggcttctcaggatttctttcaacgttggaagcagttgagcaatccacagcaggaagtgcagaacatcttcaaagcaaagcacccaatggacacagaagtcaccaaagccaagatcattggatttggttctgcacttcttgaagaagttgatcctaatcctgcgaatttcgtgggagctggaatcatccacacgaaaaccacccagattggatgcctgctgcgcttggagccgaacctgcaagcccagatgtaccggctcacgctgcgcacaagtaaggaagccgtttctcagagattatgtgaattgctctcagcgcagttttagtcctgaggatggaagaccaggctcgtgtgtcttgtgttgtcttcgtctgtgccgtttgtcttcgtggccatcctgcagatgagcaccgtgtccagtgccacagcacaaggcgcctccccgccccgccgccccacacctctcccctttgggctggacgggaacacacgtgtgtggctcaggaggaaaagctcagcctggactgtggcagccacggcagaaggtggatcttgggatcaatttttataaaaatcgagacagttctgtggttaaatctacaaattaaagggaaattagaagttggcgtgaacgtggcgtttgtgggagtgtcactgagatggcccgtgctgccgcccaccccgcctcggagcctctgggagcagcagtgccactgtgcatggcgtgggctgagccttggtgtgtggccgtcctggtggctgcacacctggcgtcgtcctgggcccttgggaggagcacagctgaccctggttttgctgcagtcccagctggactgttttcccaggcaggattttaatctagaatttagaaacatttgtatttgtaatgacttctggcaaaagcacgtgtcctggccggatgtaactgttctcctttcccagctcctgtttgtgaagggcgtctgttatgctcctgcagtcgccgaggccttggatgtgcagccaggggaggagcgtcctgccggccccgcagggcccccaggactccagggtaaagtgtgggccggtggcgcaagactcagaggtgtgctcgtctctttcctgtcagagtgggcgtccccaggccacggtgcaggcctgagtccttccaccggccccgtccagtcgtccctggaggggctgtggaggagggacgcctctgtgtggtcaggaagtgaaggggccattggccgcatgccatgtgccacctgcggcttgtgtctcacctgtcatctggactcagcacccaggctgcacgtctgacacctgagaggcgagagagtggggccggcctaggagccaaggctggggccttgcgctctgtccccaggatggtggccttgtttgtcctaaacacacccagcacaggttctggcttcctgacatgctgtggaggcagggagggtgggtggccacatgtgcttgagggttttcaccctggccctcagttgcctgctgtgcgggtccctggggcagctgcaggggctcatggacccatcagggtctccacagctcccctgcagtgtgtgcaccccacaatgtctgcggctcttcttccggcgtgtcgggctttgatcacagcatagccacgtcagtggcgtgcgcctctcgcacaggccattctgggtctggtggtgccaggtgccgtgacacgccgtgctgggcttgtgctgcagctgggtggtgtggccctcattctcatgttccagctgctgggcagtgctctgcctgtgtgctgcgcctgcaggctgcgtgtgctgccgtggatctcctgcatcccttgacccctcccgccatcagaggaaaggctgctccccgaggcaccgcttccctgtgcggcgctgcagaggggccctcagtgtggcactcctcgtcaaagaaaaataaaggctagaactgcaccccg

SEQ ID NO: 8773 - protein, 338 aa, Homo sapiens; identical to SEQ ID NO: 8771

SEQ ID NO: 8774 - DNA, 10669 bp, Homo sapiens
tctcatgatgccggcagcagtcaccctcattgcaaaggcagtggtgccgagtgaggttcccgagtggattttaagaagacaggaagacctttgaagaggtggtgctgatttccttggctggcgggaactctgtctggctgttgcatgcatcacttttgtgtgggttattttgttcctctgtggatttggaagcatcgctgaaggagagagaggattttatttctgggaaatggaatcggtttctgagtccagccaacagcagaagagaaagccagttatccacggactggaagatcaaaagaggatctacacagactgggccaatcattacctagccaaatccggccacaagcgtctcatcagggatctccagcaagatgtgacagatggcgtcctcctggcccagattatccaggttgtggcaaatgaaaagattgaagacatcaatggctgtccgaagaacagatcccaaatgattgaaaacatagatgcctgcttgaatttcctggcagctaagggaataaacatccaggggctgtctgcagaagagatcaggaatggaaacctcaaggccattctaggcctcttcttcagcctctcccgatacaagcagcagcagcagcagccccagaagcagcacctctcctcacctctgccgcccgccgtatcccaggtggccggggccccctcccagtgccaggctggcacccctcagcagcaggtgccagtcactccccaagccccgtgccagcctcaccagccagcgccacatcagcagtcaaaagcacaagctgaaatgcagtccagacttccaggtcctaccgcgagggtatccgctgcaggcagcgaggccaaaacacgcggagggtcaactactgctaacaaccgacgcagccagagctttaacaactatgataaatccaaaccagtcacctccccacccccaccgccaagcagccacgagaaagagcctttggcaagttcagcctcctcccaccccggaatgagtgacaatgcacctgcttccttggagagcggcagcagctccacccctactaattgcagtacctcctcggccatcccgcagcccggtgcagccaccaagccttggcgcagcaaatccctcagcgtgaagcacagtgccacggtatccatgctctcggtcaagcctcctgggcctgaggcccccaggcccacacctgaagccatgaagccggcccccaacaatcagaagtccatgctggaaaagctgaaacttttcaacagtaaagggggctcaaaggcaggtgaggggccggggtcccgggacacaagctgtgagcggctggagactctgcccagcttcgaagagagcgaggagctggaggccgccagtcgcatgctcaccaccgtgggccctgcttccagcagccccaagattgcactcaagggcattgcccagaggacttttagccgggcactgaccaacaagaagagttctctgaaaggcaatgagaaagagaaggagaaacaacagcgggagaaggataaggagaaaagcaaggaccttgccaagagagcctctgtgacggagaggctggacctcaaggaggagccaaaagaagaccccagtggagcagctgtgcccgagatgccaaaaaagtcctccaagattgccagcttcatccccaaaggggggaagctcaacagtgccaagaaggagcccatggccccttcccacagtggaataccaaaaccaggaatgaaaagcatgcccgggaaatccccaagtgccccagcgccttccaaggaaggggagcggagccggagtgggaagctgagctcaggactcccccagcagaagccccagctggacggcagacactccagttcctcttccagcctggcgtcctcagaaggaaaaggcccaggagggaccaccctgaaccacagcatcagcagccagactgtcagtgggtctgtcgggaccacccagaccacaggaagcaataccgtcagtgttcagctacctcagccccagcagcaatacaaccatcccaacactgccacggttgcacctttcctgtacaggtctcagacggacactgaagggaatgttactgccgagtcaagctcaacaggtgtgagcgtggagcccagccacttcaccaagactggacagcctgctctggaagaactcactggggaagatcctgaggctcggcggctgcggacagtgaagaacatcgctgatctgcggcagaatttggaggaaaccatgtccagtttaaggggaactcaggttacacacagcacattggaaaccacgtttgacaccaatgtcaccacggagatgagtggccgtagcatactcagcttgacagggaggcccacacctctgtcctggagactgggccagtccagccctcggctccaagcaggagacgccccctcaatgggcaatgggtatccccctcgagccaacgccagcaggttcatcaacactgagtcaggtcgctatgtgtactccgcccctctgagaaggcagctggcctcccggggcagtagtgtctgccatgtggacgtctcagacaaggcaggagatgagatggacctggaaggcatcagcatggatgcccccggctacatgagcgacggggatgttctgagcaagaacatccggaccgatgacattacaagcggatacatgactgatggtggacttggcctctatacccgtcgcctgaaccggctccctgatgggatggctgtggtacgggagaccctgcaacgaaatacctccctgggcctcggagacgctgacagctgggacgacagcagctccgtcagcagcggcatcagcgacaccatagacaacctcagcactgatgacatcaacaccagctcctccatcagctcttatgccaacacacctgcctcctctcgaaaaaacctggatgtgcagactgatgctgagaagcactcacaggtggagaggaattccctgtggtctggtgatgatgtcaagaaatcagacggaggctcagacagcggcataaaaatggagccaggttccaagtggaggcggaatccttctgatgtgtctgacgagtccgacaaaagcacgtcgggcaagaagaatcctgtcatctcccagacaggctcatggcggcgaggcatgacagctcaggtgggcatcaccatgccaaggacgaagccttcagccccggcaggcgcactgaagaccccaggaactggaaaaacagacgacgcaaaggtgtctgagaaaggaaggctttctcctaaagcctcccaggtgaagcgctccccatcagatgcaggccggagcagtggtgacgaatccaaaaagcccctccccagcagctctaggacacctactgccaatgccaacagctttgggttcaagaagcagagtggttccgccgccggcctggccatgatcacagccagcggggtgactgtcaccagcaggtcagccacactgggcaaaatcccaaagtcatctgcactcgtcagtcggtctgctggtcggaagtcaagtatggatggggctcagaatcaggatgacgggtatctagccctaagctcccggacaaaccttcagtaccggagtttgccgaggcccagtaagtccaacagccggaacggggctgggaacaggtctagcaccagcagcatagattccaacattagcagcaagtccgcaggcctgccagtgcccaaactgagggagccttccaaaacagccctaggcagctctctaccaggtctggtcaaccaaacagacaaggagaaaggcatctcatcagacaacgagagtgtggcttcctgtaactcggtgaaagtgaatccggcagcccagcctgtgtccagtccggctcagaccagtctccagcctggagccaagtacccagatgtggcctctcccacactccgcagactctttggtgggaagcctaccaagcaagtgcccatcgccacagctgaaaacatgaaaaattcggtggtcatctccaatcctcatgccaccatgactcagcaaggtaacctagactccccgtcaggcagtggcgtcctgagcagtgggagcagcagtcctctctacagcaagaatgtggacctcaaccagtctccgctagcctccagccccagctcagcccactcggccccttccaacagcctcacctggggcaccaacgccagcagctcctccgcagttagcaaggatggcctgggctttcagtctgtcagcagcctccacaccagctgtgagtccatcgacatctccctcagcagtggaggggtccccagccacaattcttccactggcctcatcgcctcctccaaggacgactccttgactccctttgtcagaactaacagtgtgaagaccacactgtcagaaagccctctctcttcccctgctgctagccctaagttctgcagaagtactctgcccaggaaacaggacagtgacccgcaccttgataggaacactttgcctaagaaaggactcaggtatactcccacctcccagcttcgcacgcaagaagatgcaaaagaatggttacggtcccattctgcaggaggccttcaggacaccgctgccaattcccccttttcctctggctccagcgtgacttctccctccggaacaagattcaacttttcccagcttgcgagtcccaccactgtcacccagatgagcttgtccaacccgaccatgctgaggactcacagcctctccaatgctgatgggcagtatgatccatacactgacagccgcttccggaatagctccatgtccctggatgagaagagcagaaccatgagccgttcaggctcattccgggatgggtttgaagaagttcatggatcctcactctccttggtttccagcacatcgtcagtttattctacaccagaagaaaaatgccagtcagagattcgcaagctgcggcgggaactggatgcctcccaggagaaagtttcagctttgaccacccagctgacagcaaatgctcaccttgtggcagcctttgaacagagtcttggtaacatgacaatcaggctccagagtctgaccatgacagctgagcagaaggactcagaactgaatgagttaagaaaaaccattgagctgctaaagaaacagaacgcagctgcccaggctgccattaatggagtaattaacacacctgagctcaactgcaaaggaaacggcactgcccagtctgcagacctccgcatccgcaggcagcactcctcagacagcgtctccagcatcaacagtgccaccagccactccagcgtgggcagcaacatagagagtgactcaaagaagaagaagcggaagaactggttacgcagctccttcaagcaagctttcgggaagaagaagtccccaaaatctgcgtcctctcattcagatattgaggagatgacggattcttctttgccttcctcaccaaagttaccgcacaatgggtccacaggttccaccccactgctgaggaattctcactccaactctctaatttcagaatgcatggatagtgaagctgagaccgtcatgcagctccgaaatgagttaagagacaaggagatgaagctgacggatatccgcttagaagctctcagttctgcccaccagctggaccagctccgggaggccatgaacaggatgcagagtgaaatagagaagctgaaagctgagaatgatcggctgaagtcagagtctcaaggcagtggctgcagccgggctccttcccaagtgtccatctctgcctccccgaggcagtccatgggcctctcccagcacagcttgaacctcactgagtcaaccagcctggacatgttgctggatgacactggtgaatgctcggctcggaaggaaggaggcaggcatgttaagatagttgtcagctttcaggaggaaatgaagtggaaggaggattccagaccacatctctttcttattggctgcattggagttagtggcaagacgaagtgggatgtgctcgatggggtggttagacggctgttcaaagaatacatcattcatgtcgacccagtgagtcagctagggctgaattcagacagcgttcttggctacagcattggagaaatcaagcgcagcaacacttccgaaacaccggagctgcttccttgtggctatctggttggagagaacacgaccatctcagtgactgtgaaagggctcgcagaaaacagcctggactcactggtgtttgagtccttgattcccaagcccatcctgcagcgctacgtctccctcctgatagagcaccgtcggatcattctctctggccccagcggcactgggaaaacctacctggccaaccggctgtctgagtatatagtgcttcgagagggacgggagttgacagacggggttatcgccacctttaacgtggaccataagtccagcaaggaattgcgccagtacctgtccaaccttgctgaccagtgcaacagtgagaacaatgctgtggacatgcccctcgtcatcatcctggacaacctacaccacgtgagctctctgggagagatcttcaatgggctgctcaactgcaagtaccacaaatgcccttacataattggcacaatgaaccaggctacctcttcgactcccaacctgcagcttcaccataacttcagatgggtgctttgtgccaaccacacggagcctgtgaagggtttccttggccgattcctgaggaggaagctcatggaaacagagatcagtgggcgggtgcgcaatatggagctggtaaaaatcattgactggattcccaaggtctggcatcacctcaaccgcttcctggaggctcacagttcctcggacgtcaccatcggcccccggctcttcctgtcatgccccatcgatgtggacggctcgagagtgtggttcaccgacttgtggaactattccattatcccctatctcctggaagccgtcagagaaggactccagctctatggaaggcgcgccccctgggaggatcctgccaagtgggtgatggacacatatccatgggcagccagcccacaacagcacgagtggcctcccctgctgcagttacggcctgaggatgtcggcttcgacggctactccatgcctcgggagggatcgacaagcaagcagatgccccccagtgatgctgaaggtgacccgctgatgaacatgctgatgaggctgcaggaggcagccaactactccagcccccagagctatgacagcgactccaacagcaacagccatcacgatgacatcttggactcctctttggagtccactctgtgacaggggcccggagcccagcgccctcctcttctcctcaccgcattccacctgcatcccccacatcaccctgaagatgacttcctgagccagcccccagccacagccttagagctgcgggaacaccgagaccccccgtccttcagcctcgacctgggtgcaggcatcccgggccagctgcctgcggaccgcttccttccacagcgagaactgcactaccttctgttgtactttaattattgttttgccttgttgctgtgacctccctaagacactgaagatacttctcgggaaaggatcatcgccgttgaaatgaaaagagagacagagagaaaaaaaaaaagagaacccacatgaagctctgaaaccaaacagcatcctgccatgagcttcccagagacagaagagactggagcaaagtcggaaacacagagaagcacggcttcccctcagcacagaccctccagactgggtctcagagccgtgccacccaccctcccacacagccggccacagggagaactggtgctaaccagggtgcttgctttggtcacgttcaacgcactacagagctacgacacagggaaaccttaggagcaaataaaccgtgctttcatgttttttaaatggtgctttccttacccgagaggtattttgcctgttccaatcaaaccaccccattcaggtccatcagcctctgattaatatccgtgagagtgagtgacggagtgagagtgtgagcgagtggatgtggctgtcagtgcagaacagcatgtgtctctttccttctgatatatgaatgaatcaggtttttttttttttttttctgcaaacactgtgtatagtgagacttgttctactttggagaacaggttaccttttgaaaatgaggttgagtttcttcctttctgatgcattgatttttgaagatttttttttcccccttcccctcttggtcagaatcaatcctttggtgaaagtaagaaccgcaggagttgagttttggtttggtcctgctcagttttggtttttagttgtccatcctcacagtcctacacactcgcctcctcctgctagggctgggggtatctgtgtcctttaaaatggatgaggacctggtcctcgacatgtgggtgagccatggaccttgccttcccttctcgtccttgagggtttagaacacacaccaacacctccagcgtccccgccccagcttccggtggggtgatgcggtcaccctgcaaaagacttgcactttcctcagaaccaacatgacgcagctcaataagggtgagggtcactccctcccagaagccccgtctggacgagccttgcctgacctcttcggtgctgaccttcccaaagtgatgccttactggttttgtactaactgtgttcattttacataagtgtcgtgcctgcctggggtttgttttttttgtcattgttttccccattgaaacaaacagggctaaaaagtcatctgttcattaggagaactcaagttgctgtgacttttctcatccaaaagactcatttgtgtggatgcgtgaccatgggaaaaagaaaaaaaaaaagatccattttttaggttcttttcggtctccagctgacaacccaactggacaatgatctgtctggtgcaggagaaggcaaaagtttctacaagtctacatgaccttgctgatacttgttctaatagaaacccagtctgctgtgtcttcaacatactggtattttcattacaaagtatggtaaatttttgagttgtttgtttctgttttgtaaagagaatccttattggacaccagtgaaggtgtctctgttttaatgatcagggtttttattccatcttttgcatttcttctatttctgaaggtttgtctcttggcatctttttttagtttcttaccataagagtttgacccgaaactgctcacttcacattggatgacaccatgttcttcctctttgaaaagaaaaggggaatgtgtcccactagtgaaaggaaaacttttcaacactatccctgctttagtctcagcaaactcagactattctgcttagccttcattagtcatctgggtgtgagtgtgtcttgttctgtttttctttttaataaaacttttaaaccatatatttagcctgtgaccaggggggccaaaccctaagatttctggtaaacctgaagggtggccctcctcagacaatttatctcccagcaatgaccctactacactcgcgtactgtgaatttgggaggaggtaaagttgacttctcctcgtgggcagttttccaatcaccttgtgagtagacacctgccaatattgtttgaaacctttttttaatatgacatcctctcttgtcattctcttctcccctttcccacagacttccctcctgggtccaggttcagaaccaagacttctgtacctagtgctgcctgattggtgaacattgacttcaagtagcatagcccttgtgtgactcacaactccgtgtccttcctaaagtttcgggaagcagggttgtctaatatgcacatttcttattttggtcatatttttactttagtgtcactcaccttttacaaagtgactttgtactcatttagggctctatcggaaatgcttccattttgccttttctacagttaggccaattttgaaatatataaattctatgcaacatttatgttgagttaccaatggaagccaaaagttctcttcccaaactgccaagaatgatacaggccataattgaaatgggaataccttttaagtttcattaggggtggggtgggagtgggacaggaacaagacttgcctagatctttgttgtatcttggggacttttactttgttgtttgatgcttaaacttcaaaattctctgtattcaaatttgattgtggcgaatctacttcaaaaaggaaaaataatccaactttgtggatattaaatggaaggtttgctgttttgatctagttgtttccagtggagcagttttatgaaatatgttctataagatgtacattttttcattgtaacatagaaattgtaaataattgattaaagtgctgcattttgatgaattttttctagccatttttaaagagaaaactaggaattgagtattttgtgtacggtatgtttccatcctccctccccttcctcctcccctcctctctctctcttcctacctatttaattttcatttgtcatgaggtttttggatttgccaatgatctgctggacatcatgccccatgtcatagagaataaagctgatgattgtaccagtcttaaattattcatgattcaataaaattgatgcttatttattcag

SEQ ID NO: 8775 - protein, 2365 aa, Homo sapiens
MESVSESSQQQKRKPVIHGLEDQKRIYTDWANHYLAKSGHKRLIRDLQQDVTDGVLLAQIIQVVANEKIEDINGCPKNRSQMIENIDACLNFLAAKGINIQGLSAEEIRNGNLKAILGLFFSLSRYKQQQQQPQKQHLSSPLPPAVSQVAGAPSQCQAGTPQQQVPVTPQAPCQPHQPAPHQQSKAQAEMQSRLPGPTARVSAAGSEAKTRGGSTTANNRRSQSFNNYDKSKPVTSPPPPPSSHEKEPLASSASSHPGMSDNAPASLESGSSSTPTNCSTSSAIPQPGAATKPWRSKSLSVKHSATVSMLSVKPPGPEAPRPTPEAMKPAPNNQKSMLEKLKLFNSKGGSKAGEGPGSRDTSCERLETLPSFEESEELEAASRMLTTVGPASSSPKIALKGIAQRTFSRALTNKKSSLKGNEKEKEKQQREKDKEKSKDLAKRASVTERLDLKEEPKEDPSGAAVPEMPKKSSKIASFIPKGGKLNSAKKEPMAPSHSGIPKPGMKSMPGKSPSAPAPSKEGERSRSGKLSSGLPQQKPQLDGRHSSSSSSLASSEGKGPGGTTLNHSISSQTVSGSVGTTQTTGSNTVSVQLPQPQQQYNHPNTATVAPFLYRSQTDTEGNVTAESSSTGVSVEPSHFTKTGQPALEELTGEDPEARRLRTVKNIADLRQNLEETMSSLRGTQVTHSTLETTFDTNVTTEMSGRSILSLTGRPTPLSWRLGQSSPRLQAGDAPSMGNGYPPRANASRFINTESGRYVYSAPLRRQLASRGSSVCHVDVSDKAGDEMDLEGISMDAPGYMSDGDVLSKNIRTDDITSGYMTDGGLGLYTRRLNRLPDGMAVVRETLQRNTSLGLGDADSWDDSSSVSSGISDTIDNLSTDDINTSSSISSYANTPASSRKNLDVQTDAEKHSQVERNSLWSGDDVKKSDGGSDSGIKMEPGSKWRRNPSDVSDESDKSTSGKKNPVISQTGSWRRGMTAQVGITMPRTKPSAPAGALKTPGTGKTDDAKVSEKGRLSPKASQVKRSPSDAGRSSGDESKKPLPSSSRTPTANANSFGFKKQSGSAAGLAMITASGVTVTSRSATLGKIPKSSALVSRSAGRKSSMDGAQNQDDGYLALSSRTNLQYRSLPRPSKSNSRNGAGNRSSTSSIDSNISSKSAGLPVPKLREPSKTALGSSLPGLVNQTDKEKGISSDNESVASCNSVKVNPAAQPVSSPAQTSLQPGAKYPDVASPTLRRLFGGKPTKQVPIATAENMKNSVVISNPHATMTQQGNLDSPSGSGVLSSGSSSPLYSKNVDLNQSPLASSPSSAHSAPSNSLTWGTNASSSSAVSKDGLGFQSVSSLHTSCESIDISLSSGGVPSHNSSTGLIASSKDDSLTPFVRTNSVKTTLSESPLSSPAASPKFCRSTLPRKQDSDPHLDRNTLPKKGLRYTPTSQLRTQEDAKEWLRSHSAGGLQDTAANSPFSSGSSVTSPSGTRFNFSQLASPTTVTQMSLSNPTMLRTHSLSNADGQYDPYTDSRFRNSSMSLDEKSRTMSRSGSFRDGFEEVHGSSLSLVSSTSSVYSTPEEKCQSEIRKLRRELDASQEKVSALTTQLTANAHLVAAFEQSLGNMTIRLQSLTMTAEQKDSELNELRKTIELLKKQNAAAQAAINGVINTPELNCKGNGTAQSADLRIRRQHSSDSVSSINSATSHSSVGSNIESDSKKKKRKNWLRSSFKQAFGKKKSPKSASSHSDIEEMTDSSLPSSPKLPHNGSTGSTPLLRNSHSNSLISECMDSEAETVMQLRNELRDKEMKLTDIRLEALSSAHQLDQLREAMNRMQSEIEKLKAENDRLKSESQGSGCSRAPSQVSISASPRQSMGLSQHSLNLTESTSLDMLLDDTGECSARKEGGRHVKIVVSFQEEMKWKEDSRPHLFLIGCIGVSGKTKWDVLDGVVRRLFKEYIIHVDPVSQLGLNSDSVLGYSIGEIKRSNTSETPELLPCGYLVGENTTISVTVKGLAENSLDSLVFESLIPKPILQRYVSLLIEHRRIILSGPSGTGKTYLANRLSEYIVLREGRELTDGVIATFNVDHKSSKELRQYLSNLADQCNSENNAVDMPLVIILDNLHHVSSLGEIFNGLLNCKYHKCPYIIGTMNQATSSTPNLQLHHNFRWVLCANHTEPVKGFLGRFLRRKLMETEISGRVRNMELVKIIDWIPKVWHHLNRFLEAHSSSDVTIGPRLFLSCPIDVDGSRVWFTDLWNYSIIPYLLEAVREGLQLYGRRAPWEDPAKWVMDTYPWAASPQQHEWPPLLQLRPEDVGFDGYSMPREGSTSKQMPPSDAEGDPLMNMLMRLQEAANYSSPQSYDSDSNSNSHHDDILDSSLESTL

SEQ ID NO: 8776 - DNA, 11157 bp, Homo sapiens
tctcatgatgccggcagcagtcaccctcattgcaaaggcagtggtgccgagtgaggttcccgagtggattttaagaagacaggaagacctttgaagaggtggtgctgatttccttggctggcgggaactctgtctggctgttgcatgcatcacttttgtgtgggttattttgttcctctgtggatttggaagcatcgctgaaggagagagaggattttatttctgggaaatggaatcggtttctgagtccagccaacagcagaagagaaagccagttatccacggactggaagatcaaaagaggatctacacagactgggccaatcattacctagccaaatccggccacaagcgtctcatcagggatctccagcaagatgtgacagatggcgtcctcctggcccagattatccaggttgtggcaaatgaaaagattgaagacatcaatggctgtccgaagaacagatcccaaatgattgaaaacatagatgcctgcttgaatttcctggcagctaagggaataaacatccaggggctgtctgcagaagagatcaggaatggaaacctcaaggccattctaggcctcttcttcagcctctcccgatacaagcagcagcagcagcagccccagaagcagcacctctcctcacctctgccgcccgccgtatcccaggtggccggggccccctcccagtgccaggctggcacccctcagcagcaggtgccagtcactccccaagccccgtgccagcctcaccagccagcgccacatcagcagtcaaaagcacaagctgaaatgcagtccagacttccaggtcctaccgcgagggtatccgctgcaggcagcgaggccaaaacacgcggagggtcaactactgctaacaaccgacgcagccagagctttaacaactatgataaatccaaaccagtcacctccccacccccaccgccaagcagccacgagaaagagcctttggcaagttcagcctcctcccaccccggaatgagtgacaatgcacctgcttccttggagagcggcagcagctccacccctactaattgcagtacctcctcggccatcccgcagcccggtgcagccaccaagccttggcgcagcaaatccctcagcgtgaagcacagtgccacggtatccatgctctcggtcaagcctcctgggcctgaggcccccaggcccacacctgaagccatgaagccggcccccaacaatcagaagtccatgctggaaaagctgaaacttttcaacagtaaagggggctcaaaggcaggtgaggggccggggtcccgggacacaagctgtgagcggctggagactctgcccagcttcgaagagagcgaggagctggaggccgccagtcgcatgctcaccaccgtgggccctgcttccagcagccccaagattgcactcaagggcattgcccagaggacttttagccgggcactgaccaacaagaagagttctctgaaaggcaatgagaaagagaaggagaaacaacagcgggagaaggataaggagaaaagcaaggaccttgccaagagagcctctgtgacggagaggctggacctcaaggaggagccaaaagaagaccccagtggagcagctgtgcccgagatgccaaaaaagtcctccaagattgccagcttcatccccaaaggggggaagctcaacagtgccaagaaggagcccatggccccttcccacagtggaataccaaaaccaggaatgaaaagcatgcccgggaaatccccaagtgccccagcgccttccaaggaaggggagcggagccggagtgggaagctgagctcaggactcccccagcagaagccccagctggacggcagacactccagttcctcttccagcctggcgtcctcagaaggaaaaggcccaggagggaccaccctgaaccacagcatcagcagccagactgtcagtgggtctgtcgggaccacccagaccacaggaagcaataccgtcagtgttcagctacctcagccccagcagcaatacaaccatcccaacactgccacggttgcacctttcctgtacaggtctcagacggacactgaagggaatgttactgccgagtcaagctcaacaggtgtgagcgtggagcccagccacttcaccaagactggacagcctgctctggaagaactcactggggaagatcctgaggctcggcggctgcggacagtgaagaacatcgctgatctgcggcagaatttggaggaaaccatgtccagtttaaggggaactcaggttacacacagcacattggaaaccacgtttgacaccaatgtcaccacggagatgagtggccgtagcatactcagcttgacagggaggcccacacctctgtcctggagactgggccagtccagccctcggctccaagcaggagacgccccctcaatgggcaatgggtatccccctcgagccaacgccagcaggttcatcaacactgagtcaggtcgctatgtgtactccgcccctctgagaaggcagctggcctcccggggcagtagtgtctgccatgtggacgtctcagacaaggcaggagatgagatggacctggaaggcatcagcatggatgcccccggctacatgagcgacggggatgttctgagcaagaacatccggaccgatgacattacaagcggatacatgactgatggtggacttggcctctatacccgtcgcctgaaccggctccctgatgggatggctgtggtacgggagaccctgcaacgaaatacctccctgggcctcggagacgctgacagctgggacgacagcagctccgtcagcagcggcatcagcgacaccatagacaacctcagcactgatgacatcaacaccagctcctccatcagctcttatgccaacacacctgcctcctctcgaaaaaacctggatgtgcagactgatgctgagaagcactcacaggtggagaggaattccctgtggtctggtgatgatgtcaagaaatcagacggaggctcagacagcggcataaaaatggagccaggttccaagtggaggcggaatccttctgatgtgtctgacgagtccgacaaaagcacgtcgggcaagaagaatcctgtcatctcccagacaggctcatggcggcgaggcatgacagctcaggtgggcatcaccatgccaaggacgaagccttcagccccggcaggcgcactgaagaccccaggaactggaaaaacagacgacgcaaaggtgtctgagaaaggaaggctttctcctaaagcctcccaggtgaagcgctccccatcagatgcaggccggagcagtggtgacgaatccaaaaagcccctccccagcagctctaggacacctactgccaatgccaacagctttgggttcaagaagcagagtggttccgccgccggcctggccatgatcacagccagcggggtgactgtcaccagcaggtcagccacactgggcaaaatcccaaagtcatctgcactcgtcagtcggtctgctggtcggaagtcaagtatggatggggctcagaatcaggatgacgggtatctagccctaagctcccggacaaaccttcagtaccggagtttgccgaggcccagtaagtccaacagccggaacggggctgggaacaggtctagcaccagcagcatagattccaacattagcagcaagtccgcaggcctgccagtgcccaaactgagggagccttccaaaacagccctaggcagctctctaccaggtctggtcaaccaaacagacaaggagaaaggcatctcatcagacaacgagagtgtggcttcctgtaactcggtgaaagtgaatccggcagcccagcctgtgtccagtccggctcagaccagtctccagcctggagccaagtacccagatgtggcctctcccacactccgcagactctttggtgggaagcctaccaagcaagtgcccatcgccacagctgaaaacatgaaaaattcggtggtcatctccaatcctcatgccaccatgactcagcaaggtaacctagactccccgtcaggcagtggcgtcctgagcagtgggagcagcagtcctctctacagcaagaatgtggacctcaaccagtctccgctagcctccagccccagctcagcccactcggccccttccaacagcctcacctggggcaccaacgccagcagctcctccgcagttagcaaggatggcctgggctttcagtctgtcagcagcctccacaccagctgtgagtccatcgacatctccctcagcagtggaggggtccccagccacaattcttccactggcctcatcgcctcctccaaggacgactccttgactccctttgtcagaactaacagtgtgaagaccacactgtcagaaagccctctctcttcccctgctgctagccctaagttctgcagaagtactctgcccaggaaacaggacagtgacccgcaccttgataggaacactttgcctaagaaaggactcaggtatactcccacctcccagcttcgcacgcaagaagatgcaaaagaatggttacggtcccattctgcaggaggccttcaggacaccgctgccaattcccccttttcctctggctccagcgtgacttctccctccggaacaagattcaacttttcccagcttgcgagtcccaccactgtcacccagatgagcttgtccaacccgaccatgctgaggactcacagcctctccaatgctgatgggcagtatgatccatacactgacagccgcttccggaatagctccatgtccctggatgagaagagcagaaccatgagccgttcaggctcattccgggatgggtttgaagaagttcatggatcctcactctccttggtttccagcacatcgtcagtttattctacaccagaagaaaaatgccagtcagagattcgcaagctgcggcgggaactggatgcctcccaggagaaagtttcagctttgaccacccagctgacagcaaatgctcaccttgtggcagcctttgaacagagtcttggtaacatgacaatcaggctccagagtctgaccatgacagctgagcagaaggactcagaactgaatgagttaagaaaaaccattgagctgctaaagaaacagaacgcagctgcccaggctgccattaatggagtaattaacacacctgagctcaactgcaaaggaaacggcactgcccagtctgcagacctccgcatccgcaggcagcactcctcagacagcgtctccagcatcaacagtgccaccagccactccagcgtgggcagcaacatagagagtgactcaaagaagaagaagcggaagaactggttacgcagctccttcaagcaagctttcgggaagaagaagtccccaaaatctgcgtcctctcattcagatattgaggagatgacggattcttctttgccttcctcaccaaagttaccgcacaatgggtccacaggttccaccccactgctgaggaattctcactccaactctctaatttcagaatgcatggatagtgaagctgagaccgtcatgcagctccgaaatgagttaagagacaaggagatgaagctgacggatatccgcttagaagctctcagttctgcccaccagctggaccagctccgggaggccatgaacaggatgcagagtgaaatagagaagctgaaagctgagaatgatcggctgaagtcagagtctcaaggcagtggctgcagccgggctccttcccaagtgtccatctctgcctccccgaggcagtccatgggcctctcccagcacagcttgaacctcactgagtcaaccagcctggacatgttgctggatgacactggtgaatgctcggctcggaaggaaggaggcaggcatgttaagatagttgtcagctttcaggaggaaatgaagtggaaggaggattccagaccacatctctttcttattggctgcattggagttagtggcaagacgaagtgggatgtgctcgatggggtggttagacggctgttcaaagaatacatcattcatgtcgacccagtgagtcagctagggctgaattcagacagcgttcttggctacagcattggagaaatcaagcgcagcaacacttccgaaacaccggagctgcttccttgtggctatctggttggagagaacacgaccatctcagtgactgtgaaagggctcgcagaaaacagcctggactcactggtgtttgagtccttgattcccaagcccatcctgcagcgctacgtctccctcctgatagagcaccgtcggatcattctctctggccccagcggcactgggaaaacctacctggccaaccggctgtctgagtatatagtgcttcgagagggacgggagttgacagacggggttatcgccacctttaacgtggaccataagtccagcaaggaattgcgccagtacctgtccaaccttgctgaccagtgcaacagtgagaacaatgctgtggacatgcccctcgtcatcatcctggacaacctacaccacgtgagctctctgggagagatcttcaatgggctgctcaactgcaagtaccacaaatgcccttacataattggcacaatgaaccaggctacctcttcgactcccaacctgcagcttcaccataacttcagatgggtgctttgtgccaaccacacggagcctgtgaagggtttccttggccgattcctgaggaggaagctcatggaaacagagatcagtgggcgggtgcgcaatatggagctggtaaaaatcattgactggattcccaaggtctggcatcacctcaaccgcttcctggaggctcacagttcctcggacgtcaccatcggcccccggctcttcctgtcatgccccatcgatgtggacggctcgagagtgtggttcaccgacttgtggaactattccattatcccctatctcctggaagccgtcagagaaggactccagctctatggaaggcgcgccccctgggaggatcctgccaagtgggtgatggacacatatccatgggcagccagcccacaacagcacgagtggcctcccctgctgcagttacggcctgaggatgtcggcttcgacggctactccatgcctcgggagggatcgacaagcaagcagatgccccccagtgatgctgaaggtgacccgctgatgaacatgctgatgaggctgcaggaggcagccaactactccagcccccagagctatgacagcgactccaacagcaacagccatcacgatgacatcttggactcctctttggagtccactctgtgacaggggcccggagcccagcgccctcctcttctcctcaccgcattccacctgcatcccccacatcaccctgaagatgacttcctgagccagcccccagccacagccttagagctgcgggaacaccgagaccccccgtccttcagcctcgacctgggtgcaggcatcccgggccagctgcctgcggaccgcttccttccacagcgagaactgcactaccttctgttgtactttaattattgttttgccttgttgctgtgacctccctaagacactgaagatacttctcgggaaaggatcatcgccgttgaaatgaaaagagagacagagagaaaaaaaaaaagagaacccacatgaagctctgaaaccaaacagcatcctgccatgagcttcccagagacagaagagactggagcaaagtcggaaacacagagaagcacggcttcccctcagcacagaccctccagactgggtctcagagccgtgccacccaccctcccacacagccggccacagggagaactggtgctaaccagggtgcttgctttggtcacgttcaacgcactacagagctacgacacagggaaaccttaggagcaaataaaccgtgctttcatgttttttaaatggtgctttccttacccgagaggtattttgcctgttccaatcaaaccaccccattcaggtccatcagcctctgattaatatccgtgagagtgagtgacggagtgagagtgtgagcgagtggatgtggctgtcagtgcagaacagcatgtgtctctttccttctgatatatgaatgaatcaggtttttttttttttttttctgcaaacactgtgtatagtgagacttgttctactttggagaacaggttaccttttgaaaatgaggttgagtttcttcctttctgatgcattgatttttgaagatttttttttcccccttcccctcttggtcagaatcaatcctttggtgaaagtaagaaccgcaggagttgagttttggtttggtcctgctcagttttggtttttagttgtccatcctcacagtcctacacactcgcctcctcctgctagggctgggggtatctgtgtcctttaaaatggatgaggacctggtcctcgacatgtgggtgagccatggaccttgccttcccttctcgtccttgagggtttagaacacacaccaacacctccagcgtccccgccccagcttccggtggggtgatgcggtcaccctgcaaaagacttgcactttcctcagaaccaacatgacgcagctcaataagggtgagggtcactccctcccagaagccccgtctggacgagccttgcctgacctcttcggtgctgaccttcccaaagtgatgccttactggttttgtactaactgtgttcattttacataagtgtcgtgcctgcctggggtttgttttttttgtcattgttttccccattgaaacaaacagggctaaaaagtcatctgttcattaggagaactcaagttgctgtgacttttctcatccaaaagactcatttgtgtggatgcgtgaccatgggaaaaagaaaaaaaaaaagatccattttttaggttcttttcggtctccagctgacaacccaactggacaatgatctgtctggtgcaggagaaggcaaaagtttctacaagtctacatgaccttgctgatacttgttctaatagaaacccagtctgctgtgtcttcaacatactggtattttcattacaaagtatggtaaatttttgagttgtttgtttctgttttgtaaagagaatccttattggacaccagtgaaggtgtctctgttttaatgatcagggtttttattccatcttttgcatttcttctatttctgaaggtttgtctcttggcatctttttttagtttcttaccataagagtttgacccgaaactgctcacttcacattggatgacaccatgttcttcctctttgaaaagaaaaggggaatgtgtcccactagtgaaaggaaaacttttcaacactatccctgctttagtctcagcaaactcagactattctgcttagccttcattagtcatctgggtgtgagtgtgtcttgttctgtttttctttttaataaaacttttaaaccatatatttagcctgtgaccaggggggccaaaccctaagatttctggtaaacctgaagggtggccctcctcagacaatttatctcccagcaatgaccctactacactcgcgtactgtgaatttgggaggaggtaaagttgacttctcctcgtgggcagttttccaatcaccttgtgagtagacacctgccaatattgtttgaaacctttttttaatatgacatcctctcttgtcattctcttctcccctttcccacagacttccctcctgggtccaggttcagaaccaagacttctgtacctagtgctgcctgattggtgaacattgacttcaagtagcatagcccttgtgtgactcacaactccgtgtccttcctaaagtttcgggaagcagggttgtctaatatgcacatttcttattttggtcatatttttactttagtgtcactcaccttttacaaagtgactttgtactcatttagggctctatcggaaatgcttccattttgccttttctacagttaggccaattttgaaatatataaattctatgcaacatttatgttgagttaccaatggaagccaaaagttctcttcccaaactgccaagaatgatacaggccataattgaaatgggaataccttttaagtttcattaggggtggggtgggagtgggacaggaacaagacttgcctagatctttgttgtatcttggggacttttactttgttgtttgatgcttaaacttcaaaattctctgtattcaaatttgattgtggcgaatctacttcaaaaaggaaaaataatccaactttgtggatattaaatggaaggtttgctgttttgatctagttgtttccagtggagcagttttatgaaatatgttctataagatgtacattttttcattgtaacatagaaattgtaaataattgattaaagtgctgcattttgatgaattttttctagccatttttaaagagaaaactaggaattgagtattttgtgtacggtatgtttccatcctccctccccttcctcctcccctcctctctctctcttcctacctatttaattttcatttgtcatgaggtttttggatttgccaatgatctgctggacatcatgccccatgtcatagagaataaagctgatgattgtaccagtcttaaattattcatgattcaataaaattgatgcttatttattcagattagtggtttggcttgtctgtgctagagcaagtcctcataggagttttatttcatgctaagagcaagtcagtcttatctggatgcagcaaatgcagggaaaaccccaaacctttgcaaacccatcttggctagtatgccatcaatatcccacatcttctcagtttctcaggtcttcttgccactcctgtggagcttgttagaactgtagaatttcagatcctctcagactttatgaatcaccagggatctagtggatcctcaatttctaacaaactcctaggcaataccagtgctctagtgcctggaccacacattgagtggcaagcaacatcagtgtccagccagccccctaagtcgatcccttggcatgaaaaggatttttttttaatgtattgagtacctactaatttccaaatgctttcccaaatactcagtataatgcaaaatgatgccagagaggtattcttactcccattttacaagtgg

SEQ ID NO: 8777 - protein, 2365 aa, Homo sapiens; identical to SEQ ID NO: 8775

SEQ ID NO: 8778 - DNA, 11659 bp, Homo sapiens
gtcctcccctgcgctgagccccgcagccagcgcagccttcccgggaagcgcggcggccgctcccgagcgcagccctgcccggcccgccagccgcgcgtcccggcgcccgcgccccacggccacagccttgcctctatctagctcacggagcatgtgcagacccgcaggcgctaaggtgctctcagtccgggggccttctgggcagcggtgactgtcaccccaagagagacctttcgggggctcttgccgcacctctgctgcgtcgcgggtgacactgcggtgctcgcgagcagggtggcagctgcctctcggtggagacgtcttgggacccttgcgcccttcttctctccttccttcgctgctgtctcctttccttccttggctgctcgctctttctctcgccggctcagacccgtagcctccggaacgggactcgtgggtcgccgccgcctctgtctcttccaaaggggcctcctcacttcggagatgcagtgacaagttaatatgggcgtccaagcctctgtttcccaggaggaaatttgcaagaggcggcagcccctgagcgcccagagctcttgaaaggccacccaggagaggtgtgagacccggcggcagcatccgtccaggtgggacccgctgagcgccgtggccagtcccccattcccatcccggcaccccaaaggcgcgctcgcccgattgcttcgagttccccgacctggggattttttttttagccgctggtggtgggcgcctcgtgggctaaggcccggcgcctgctctgctacccgcgctgcctttagcggtcgcccccgccgccgctgccagggacgtgctgggaaagcccaagccccgggagaagatgccggccatcctggtcgcctccaaaatgaagtcgggactgcccaaacccgtgcacagcgccgcgcccatcctgcacgtgcccccggcccgggcgggcccccagccctgctacctgaagttgggaagcaaggtggaggtgagcaagaccacctatcctagccagatccccctgaaatcgcaggtgctgcaggggctgcaggagccagcgggggaggggctcccgctgcggaagagcggctcggtggaaaacgggttcgatacccagatctacacagactgggccaatcattacctagccaaatccggccacaagcgtctcatcagggatctccagcaagatgtgacagatggcgtcctcctggcccagattatccaggttgtggcaaatgaaaagattgaagacatcaatggctgtccgaagaacagatcccaaatgattgaaaacatagatgcctgcttgaatttcctggcagctaagggaataaacatccaggggctgtctgcagaagagatcaggaatggaaacctcaaggccattctaggcctcttcttcagcctctcccgatacaagcagcagcagcagcagccccagaagcagcacctctcctcacctctgccgcccgccgtatcccaggtggccggggccccctcccagtgccaggctggcacccctcagcagcaggtgccagtcactccccaagccccgtgccagcctcaccagccagcgccacatcagcagtcaaaagcacaagctgaaatgcagtccagtgcatcatccaaggactcatctcaaagcaaaatcatccgcttcactctgggtcagaaaaagatctctagacttccaggtcctaccgcgagggtatccgctgcaggcagcgaggccaaaacacgcggagggtcaactactgctaacaaccgacgcagccagagctttaacaactatgataaatccaaaccagtcacctccccacccccaccgccaagcagccacgagaaagagcctttggcaagttcagcctcctcccaccccggaatgagtgacaatgcacctgcttccttggagagcggcagcagctccacccctactaattgcagtacctcctcggccatcccgcagcccggtgcagccaccaagccttggcgcagcaaatccctcagcgtgaagcacagtgccacggtatccatgctctcggtcaagcctcctgggcctgaggcccccaggcccacacctgaagccatgaagccggcccccaacaatcagaagtccatgctggaaaagctgaaacttttcaacagtaaagggggctcaaaggcaggtgaggggccggggtcccgggacacaagctgtgagcggctggagactctgcccagcttcgaagagagcgaggagctggaggccgccagtcgcatgctcaccaccgtgggccctgcttccagcagccccaagattgcactcaagggcattgcccagaggacttttagccgggcactgaccaacaagaagagttctctgaaaggcaatgagaaagagaaggagaaacaacagcgggagaaggataaggagaaaagcaaggaccttgccaagagagcctctgtgacggagaggctggacctcaaggaggagccaaaagaagaccccagtggagcagctgtgcccgagatgccaaaaaagtcctccaagattgccagcttcatccccaaaggggggaagctcaacagtgccaagaaggagcccatggccccttcccacagtggaataccaaaaccaggaatgaaaagcatgcccgggaaatccccaagtgccccagcgccttccaaggaaggggagcggagccggagtgggaagctgagctcaggactcccccagcagaagccccagctggacggcagacactccagttcctcttccagcctggcgtcctcagaaggaaaaggcccaggagggaccaccctgaaccacagcatcagcagccagactgtcagtgggtctgtcgggaccacccagaccacaggaagcaataccgtcagtgttcagctacctcagccccagcagcaatacaaccatcccaacactgccacggttgcacctttcctgtacaggtctcagacggacactgaagggaatgttactgccgagtcaagctcaacaggtgtgagcgtggagcccagccacttcaccaagactggacagcctgctctggaagaactcactggggaagatcctgaggctcggcggctgcggacagtgaagaacatcgctgatctgcggcagaatttggaggaaaccatgtccagtttaaggggaactcaggttacacacagcacattggaaaccacgtttgacaccaatgtcaccacggagatgagtggccgtagcatactcagcttgacagggaggcccacacctctgtcctggagactgggccagtccagccctcggctccaagcaggagacgccccctcaatgggcaatgggtatccccctcgagccaacgccagcaggttcatcaacactgagtcaggtcgctatgtgtactccgcccctctgagaaggcagctggcctcccggggcagtagtgtctgccatgtggacgtctcagacaaggcaggagatgagatggacctggaaggcatcagcatggatgcccccggctacatgagcgacggggatgttctgagcaagaacatccggaccgatgacattacaagcggatacatgactgatggtggacttggcctctatacccgtcgcctgaaccggctccctgatgggatggctgtggtacgggagaccctgcaacgaaatacctccctgggcctcggagacgctgacagctgggacgacagcagctccgtcagcagcggcatcagcgacaccatagacaacctcagcactgatgacatcaacaccagctcctccatcagctcttatgccaacacacctgcctcctctcgaaaaaacctggatgtgcagactgatgctgagaagcactcacaggtggagaggaattccctgtggtctggtgatgatgtcaagaaatcagacggaggctcagacagcggcataaaaatggagccaggttccaagtggaggcggaatccttctgatgtgtctgacgagtccgacaaaagcacgtcgggcaagaagaatcctgtcatctcccagacaggctcatggcggcgaggcatgacagctcaggtgggcatcaccatgccaaggacgaagccttcagccccggcaggcgcactgaagaccccaggaactggaaaaacagacgacgcaaaggtgtctgagaaaggaaggctttctcctaaagcctcccaggtgaagcgctccccatcagatgcaggccggagcagtggtgacgaatccaaaaagcccctccccagcagctctaggacacctactgccaatgccaacagctttgggttcaagaagcagagtggttccgccgccggcctggccatgatcacagccagcggggtgactgtcaccagcaggtcagccacactgggcaaaatcccaaagtcatctgcactcgtcagtcggtctgctggtcggaagtcaagtatggatggggctcagaatcaggatgacgggtatctagccctaagctcccggacaaaccttcagtaccggagtttgccgaggcccagtaagtccaacagccggaacggggctgggaacaggtctagcaccagcagcatagattccaacattagcagcaagtccgcaggcctgccagtgcccaaactgagggagccttccaaaacagccctaggcagctctctaccaggtctggtcaaccaaacagacaaggagaaaggcatctcatcagacaacgagagtgtggcttcctgtaactcggtgaaagtgaatccggcagcccagcctgtgtccagtccggctcagaccagtctccagcctggagccaagtacccagatgtggcctctcccacactccgcagactctttggtgggaagcctaccaagcaagtgcccatcgccacagctgaaaacatgaaaaattcggtggtcatctccaatcctcatgccaccatgactcagcaaggtaacctagactccccgtcaggcagtggcgtcctgagcagtgggagcagcagtcctctctacagcaagaatgtggacctcaaccagtctccgctagcctccagccccagctcagcccactcggccccttccaacagcctcacctggggcaccaacgccagcagctcctccgcagttagcaaggatggcctgggctttcagtctgtcagcagcctccacaccagctgtgagtccatcgacatctccctcagcagtggaggggtccccagccacaattcttccactggcctcatcgcctcctccaaggacgactccttgactccctttgtcagaactaacagtgtgaagaccacactgtcagaaagccctctctcttcccctgctgctagccctaagttctgcagaagtactctgcccaggaaacaggacagtgacccgcaccttgataggaacactttgcctaagaaaggactcaggtatactcccacctcccagcttcgcacgcaagaagatgcaaaagaatggttacggtcccattctgcaggaggccttcaggacaccgctgccaattcccccttttcctctggctccagcgtgacttctccctccggaacaagattcaacttttcccagcttgcgagtcccaccactgtcacccagatgagcttgtccaacccgaccatgctgaggactcacagcctctccaatgctgatgggcagtatgatccatacactgacagccgcttccggaatagctccatgtccctggatgagaagagcagaaccatgagccgttcaggctcattccgggatgggtttgaagaagaatcatgggagaaaagttctgtggacaactttgtcagccgtcttcacagctcacttcatttctctcttcctttgttccatcacgcaaggtatgagttagttcatggatcctcactctccttggtttccagcacatcgtcagtttattctacaccagaagaaaaatgccagtcagagattcgcaagctgcggcgggaactggatgcctcccaggagaaagtttcagctttgaccacccagctgacagcaaatgctcaccttgtggcagcctttgaacagagtcttggtaacatgacaatcaggctccagagtctgaccatgacagctgagcagaaggactcagaactgaatgagttaagaaaaaccattgagctgctaaagaaacagaacgcagctgcccaggctgccattaatggagtaattaacacacctgagctcaactgcaaaggaaacggcactgcccagtctgcagacctccgcatccgcaggcagcactcctcagacagcgtctccagcatcaacagtgccaccagccactccagcgtgggcagcaacatagagagtgactcaaagaagaagaagcggaagaactggttacgcagctccttcaagcaagctttcgggaagaagaagtccccaaaatctgcgtcctctcattcagatattgaggagatgacggattcttctttgccttcctcaccaaagttaccgcacaatgggtccacaggttccaccccactgctgaggaattctcactccaactctctaatttcagaatgcatggatagtgaagctgagaccgtcatgcagctccgaaatgagttaagagacaaggagatgaagctgacggatatccgcttagaagctctcagttctgcccaccagctggaccagctccgggaggccatgaacaggatgcagagtgaaatagagaagctgaaagctgagaatgatcggctgaagtcagagtctcaaggcagtggctgcagccgggctccttcccaagtgtccatctctgcctccccgaggcagtccatgggcctctcccagcacagcttgaacctcactgagtcaaccagcctggacatgttgctggatgacactggtgaatgctcggctcggaaggaaggaggcaggcatgttaagatagttgtcagctttcaggaggaaatgaagtggaaggaggattccagaccacatctctttcttattggctgcattggagttagtggcaagacgaagtgggatgtgctcgatggggtggttagacggctgttcaaagaatacatcattcatgtcgacccagtgagtcagctagggctgaattcagacagcgttcttggctacagcattggagaaatcaagcgcagcaacacttccgaaacaccggagctgcttccttgtggctatctggttggagagaacacgaccatctcagtgactgtgaaagggctcgcagaaaacagcctggactcactggtgtttgagtccttgattcccaagcccatcctgcagcgctacgtctccctcctgatagagcaccgtcggatcattctctctggccccagcggcactgggaaaacctacctggccaaccggctgtctgagtatatagtgcttcgagagggacgggagttgacagacggggttatcgccacctttaacgtggaccataagtccagcaaggaattgcgccagtacctgtccaaccttgctgaccagtgcaacagtgagaacaatgctgtggacatgcccctcgtcatcatcctggacaacctacaccacgtgagctctctgggagagatcttcaatgggctgctcaactgcaagtaccacaaatgcccttacataattggcacaatgaaccaggctacctcttcgactcccaacctgcagcttcaccataacttcagatgggtgctttgtgccaaccacacggagcctgtgaagggtttccttggccgattcctgaggaggaagctcatggaaacagagatcagtgggcgggtgcgcaatatggagctggtaaaaatcattgactggattcccaaggtctggcatcacctcaaccgcttcctggaggctcacagttcctcggacgtcaccatcggcccccggctcttcctgtcatgccccatcgatgtggacggctcgagagtgtggttcaccgacttgtggaactattccattatcccctatctcctggaagccgtcagagaaggactccagctctatggaaggcgcgccccctgggaggatcctgccaagtgggtgatggacacatatccatgggcagccagcccacaacagcacgagtggcctcccctgctgcagttacggcctgaggatgtcggcttcgacggctactccatgcctcgggagggatcgacaagcaagcagatgccccccagtgatgctgaaggtgacccgctgatgaacatgctgatgaggctgcaggaggcagccaactactccagcccccagagctatgacagcgactccaacagcaacagccatcacgatgacatcttggactcctctttggagtccactctgtgacaggggcccggagcccagcgccctcctcttctcctcaccgcattccacctgcatcccccacatcaccctgaagatgacttcctgagccagcccccagccacagccttagagctgcgggaacaccgagaccccccgtccttcagcctcgacctgggtgcaggcatcccgggccagctgcctgcggaccgcttccttccacagcgagaactgcactaccttctgttgtactttaattattgttttgccttgttgctgtgacctccctaagacactgaagatacttctcgggaaaggatcatcgccgttgaaatgaaaagagagacagagagaaaaaaaaaaagagaacccacatgaagctctgaaaccaaacagcatcctgccatgagcttcccagagacagaagagactggagcaaagtcggaaacacagagaagcacggcttcccctcagcacagaccctccagactgggtctcagagccgtgccacccaccctcccacacagccggccacagggagaactggtgctaaccagggtgcttgctttggtcacgttcaacgcactacagagctacgacacagggaaaccttaggagcaaataaaccgtgctttcatgttttttaaatggtgctttccttacccgagaggtattttgcctgttccaatcaaaccaccccattcaggtccatcagcctctgattaatatccgtgagagtgagtgacggagtgagagtgtgagcgagtggatgtggctgtcagtgcagaacagcatgtgtctctttccttctgatatatgaatgaatcaggtttttttttttttttttctgcaaacactgtgtatagtgagacttgttctactttggagaacaggttaccttttgaaaatgaggttgagtttcttcctttctgatgcattgatttttgaagatttttttttcccccttcccctcttggtcagaatcaatcctttggtgaaagtaagaaccgcaggagttgagttttggtttggtcctgctcagttttggtttttagttgtccatcctcacagtcctacacactcgcctcctcctgctagggctgggggtatctgtgtcctttaaaatggatgaggacctggtcctcgacatgtgggtgagccatggaccttgccttcccttctcgtccttgagggtttagaacacacaccaacacctccagcgtccccgccccagcttccggtggggtgatgcggtcaccctgcaaaagacttgcactttcctcagaaccaacatgacgcagctcaataagggtgagggtcactccctcccagaagccccgtctggacgagccttgcctgacctcttcggtgctgaccttcccaaagtgatgccttactggttttgtactaactgtgttcattttacataagtgtcgtgcctgcctggggtttgttttttttgtcattgttttccccattgaaacaaacagggctaaaaagtcatctgttcattaggagaactcaagttgctgtgacttttctcatccaaaagactcatttgtgtggatgcgtgaccatgggaaaaagaaaaaaaaaaagatccattttttaggttcttttcggtctccagctgacaacccaactggacaatgatctgtctggtgcaggagaaggcaaaagtttctacaagtctacatgaccttgctgatacttgttctaatagaaacccagtctgctgtgtcttcaacatactggtattttcattacaaagtatggtaaatttttgagttgtttgtttctgttttgtaaagagaatccttattggacaccagtgaaggtgtctctgttttaatgatcagggtttttattccatcttttgcatttcttctatttctgaaggtttgtctcttggcatctttttttagtttcttaccataagagtttgacccgaaactgctcacttcacattggatgacaccatgttcttcctctttgaaaagaaaaggggaatgtgtcccactagtgaaaggaaaacttttcaacactatccctgctttagtctcagcaaactcagactattctgcttagccttcattagtcatctgggtgtgagtgtgtcttgttctgtttttctttttaataaaacttttaaaccatatatttagcctgtgaccaggggggccaaaccctaagatttctggtaaacctgaagggtggccctcctcagacaatttatctcccagcaatgaccctactacactcgcgtactgtgaatttgggaggaggtaaagttgacttctcctcgtgggcagttttccaatcaccttgtgagtagacacctgccaatattgtttgaaacctttttttaatatgacatcctctcttgtcattctcttctcccctttcccacagacttccctcctgggtccaggttcagaaccaagacttctgtacctagtgctgcctgattggtgaacattgacttcaagtagcatagcccttgtgtgactcacaactccgtgtccttcctaaagtttcgggaagcagggttgtctaatatgcacatttcttattttggtcatatttttactttagtgtcactcaccttttacaaagtgactttgtactcatttagggctctatcggaaatgcttccattttgccttttctacagttaggccaattttgaaatatataaattctatgcaacatttatgttgagttaccaatggaagccaaaagttctcttcccaaactgccaagaatgatacaggccataattgaaatgggaataccttttaagtttcattaggggtggggtgggagtgggacaggaacaagacttgcctagatctttgttgtatcttggggacttttactttgttgtttgatgcttaaacttcaaaattctctgtattcaaatttgattgtggcgaatctacttcaaaaaggaaaaataatccaactttgtggatattaaatggaaggtttgctgttttgatctagttgtttccagtggagcagttttatgaaatatgttctataagatgtacattttttcattgtaacatagaaattgtaaataattgattaaagtgctgcattttgatgaattttttctagccatttttaaagagaaaactaggaattgagtattttgtgtacggtatgtttccatcctccctccccttcctcctcccctcctctctctctcttcctacctatttaattttcatttgtcatgaggtttttggatttgccaatgatctgctggacatcatgccccatgtcatagagaataaagctgatgattgtaccagtcttaaattattcatgattcaataaaattgatgcttatttattcag

SEQ ID NO: 8779 - protein, 2485 aa, Homo sapiens
MPAILVASKMKSGLPKPVHSAAPILHVPPARAGPQPCYLKLGSKVEVSKTTYPSQIPLKSQVLQGLQEPAGEGLPLRKSGSVENGFDTQIYTDWANHYLAKSGHKRLIRDLQQDVTDGVLLAQIIQVVANEKIEDINGCPKNRSQMIENIDACLNFLAAKGINIQGLSAEEIRNGNLKAILGLFFSLSRYKQQQQQPQKQHLSSPLPPAVSQVAGAPSQCQAGTPQQQVPVTPQAPCQPHQPAPHQQSKAQAEMQSSASSKDSSQSKIIRFTLGQKKISRLPGPTARVSAAGSEAKTRGGSTTANNRRSQSFNNYDKSKPVTSPPPPPSSHEKEPLASSASSHPGMSDNAPASLESGSSSTPTNCSTSSAIPQPGAATKPWRSKSLSVKHSATVSMLSVKPPGPEAPRPTPEAMKPAPNNQKSMLEKLKLFNSKGGSKAGEGPGSRDTSCERLETLPSFEESEELEAASRMLTTVGPASSSPKIALKGIAQRTFSRALTNKKSSLKGNEKEKEKQQREKDKEKSKDLAKRASVTERLDLKEEPKEDPSGAAVPEMPKKSSKIASFIPKGGKLNSAKKEPMAPSHSGIPKPGMKSMPGKSPSAPAPSKEGERSRSGKLSSGLPQQKPQLDGRHSSSSSSLASSEGKGPGGTTLNHSISSQTVSGSVGTTQTTGSNTVSVQLPQPQQQYNHPNTATVAPFLYRSQTDTEGNVTAESSSTGVSVEPSHFTKTGQPALEELTGEDPEARRLRTVKNIADLRQNLEETMSSLRGTQVTHSTLETTFDTNVTTEMSGRSILSLTGRPTPLSWRLGQSSPRLQAGDAPSMGNGYPPRANASRFINTESGRYVYSAPLRRQLASRGSSVCHVDVSDKAGDEMDLEGISMDAPGYMSDGDVLSKNIRTDDITSGYMTDGGLGLYTRRLNRLPDGMAVVRETLQRNTSLGLGDADSWDDSSSVSSGISDTIDNLSTDDINTSSSISSYANTPASSRKNLDVQTDAEKHSQVERNSLWSGDDVKKSDGGSDSGIKMEPGSKWRRNPSDVSDESDKSTSGKKNPVISQTGSWRRGMTAQVGITMPRTKPSAPAGALKTPGTGKTDDAKVSEKGRLSPKASQVKRSPSDAGRSSGDESKKPLPSSSRTPTANANSFGFKKQSGSAAGLAMITASGVTVTSRSATLGKIPKSSALVSRSAGRKSSMDGAQNQDDGYLALSSRTNLQYRSLPRPSKSNSRNGAGNRSSTSSIDSNISSKSAGLPVPKLREPSKTALGSSLPGLVNQTDKEKGISSDNESVASCNSVKVNPAAQPVSSPAQTSLQPGAKYPDVASPTLRRLFGGKPTKQVPIATAENMKNSVVISNPHATMTQQGNLDSPSGSGVLSSGSSSPLYSKNVDLNQSPLASSPSSAHSAPSNSLTWGTNASSSSAVSKDGLGFQSVSSLHTSCESIDISLSSGGVPSHNSSTGLIASSKDDSLTPFVRTNSVKTTLSESPLSSPAASPKFCRSTLPRKQDSDPHLDRNTLPKKGLRYTPTSQLRTQEDAKEWLRSHSAGGLQDTAANSPFSSGSSVTSPSGTRFNFSQLASPTTVTQMSLSNPTMLRTHSLSNADGQYDPYTDSRFRNSSMSLDEKSRTMSRSGSFRDGFEEESWEKSSVDNFVSRLHSSLHFSLPLFHHARYELVHGSSLSLVSSTSSVYSTPEEKCQSEIRKLRRELDASQEKVSALTTQLTANAHLVAAFEQSLGNMTIRLQSLTMTAEQKDSELNELRKTIELLKKQNAAAQAAINGVINTPELNCKGNGTAQSADLRIRRQHSSDSVSSINSATSHSSVGSNIESDSKKKKRKNWLRSSFKQAFGKKKSPKSASSHSDIEEMTDSSLPSSPKLPHNGSTGSTPLLRNSHSNSLISECMDSEAETVMQLRNELRDKEMKLTDIRLEALSSAHQLDQLREAMNRMQSEIEKLKAENDRLKSESQGSGCSRAPSQVSISASPRQSMGLSQHSLNLTESTSLDMLLDDTGECSARKEGGRHVKIVVSFQEEMKWKEDSRPHLFLIGCIGVSGKTKWDVLDGVVRRLFKEYIIHVDPVSQLGLNSDSVLGYSIGEIKRSNTSETPELLPCGYLVGENTTISVTVKGLAENSLDSLVFESLIPKPILQRYVSLLIEHRRIILSGPSGTGKTYLANRLSEYIVLREGRELTDGVIATFNVDHKSSKELRQYLSNLADQCNSENNAVDMPLVIILDNLHHVSSLGEIFNGLLNCKYHKCPYIIGTMNQATSSTPNLQLHHNFRWVLCANHTEPVKGFLGRFLRRKLMETEISGRVRNMELVKIIDWIPKVWHHLNRFLEAHSSSDVTIGPRLFLSCPIDVDGSRVWFTDLWNYSIIPYLLEAVREGLQLYGRRAPWEDPAKWVMDTYPWAASPQQHEWPPLLQLRPEDVGFDGYSMPREGSTSKQMPPSDAEGDPLMNMLMRLQEAANYSSPQSYDSDSNSNSHHDDILDSSLESTL

SEQ ID NO: 8780 - DNA, 11491 bp, Homo sapiens
gtcctcccctgcgctgagccccgcagccagcgcagccttcccgggaagcgcggcggccgctcccgagcgcagccctgcccggcccgccagccgcgcgtcccggcgcccgcgccccacggccacagccttgcctctatctagctcacggagcatgtgcagacccgcaggcgctaaggtgctctcagtccgggggccttctgggcagcggtgactgtcaccccaagagagacctttcgggggctcttgccgcacctctgctgcgtcgcgggtgacactgcggtgctcgcgagcagggtggcagctgcctctcggtggagacgtcttgggacccttgcgcccttcttctctccttccttcgctgctgtctcctttccttccttggctgctcgctctttctctcgccggctcagacccgtagcctccggaacgggactcgtgggtcgccgccgcctctgtctcttccaaaggggcctcctcacttcggagatgcagtgacaagttaatatgggcgtccaagcctctgtttcccaggaggaaatttgcaagaggcggcagcccctgagcgcccagagctcttgaaaggccacccaggagaggtgtgagacccggcggcagcatccgtccaggtgggacccgctgagcgccgtggccagtcccccattcccatcccggcaccccaaaggcgcgctcgcccgattgcttcgagttccccgacctggggattttttttttagccgctggtggtgggcgcctcgtgggctaaggcccggcgcctgctctgctacccgcgctgcctttagcggtcgcccccgccgccgctgccagggacgtgctgggaaagcccaagccccgggagaagatgccggccatcctggtcgcctccaaaatgaagtcgggactgcccaaacccgtgcacagcgccgcgcccatcctgcacgtgcccccggcccgggcgggcccccagccctgctacctgaagttgggaagcaaggtggaggtgagcaagaccacctatcctagccagatccccctgaaatcgcaggtgctgcaggggctgcaggagccagcgggggaggggctcccgctgcggaagagcggctcggtggaaaacgggttcgatacccagatctacacagactgggccaatcattacctagccaaatccggccacaagcgtctcatcagggatctccagcaagatgtgacagatggcgtcctcctggcccagattatccaggttgtggcaaatgaaaagattgaagacatcaatggctgtccgaagaacagatcccaaatgattgaaaacatagatgcctgcttgaatttcctggcagctaagggaataaacatccaggggctgtctgcagaagagatcaggaatggaaacctcaaggccattctaggcctcttcttcagcctctcccgatacaagcagcagcagcagcagccccagaagcagcacctctcctcacctctgccgcccgccgtatcccaggtggccggggccccctcccagtgccaggctggcacccctcagcagcaggtgccagtcactccccaagccccgtgccagcctcaccagccagcgccacatcagcagtcaaaagcacaagctgaaatgcagtccagacttccaggtcctaccgcgagggtatccgctgcaggcagcgaggccaaaacacgcggagggtcaactactgctaacaaccgacgcagccagagctttaacaactatgataaatccaaaccagtcacctccccacccccaccgccaagcagccacgagaaagagcctttggcaagttcagcctcctcccaccccggaatgagtgacaatgcacctgcttccttggagagcggcagcagctccacccctactaattgcagtacctcctcggccatcccgcagcccggtgcagccaccaagccttggcgcagcaaatccctcagcgtgaagcacagtgccacggtatccatgctctcggtcaagcctcctgggcctgaggcccccaggcccacacctgaagccatgaagccggcccccaacaatcagaagtccatgctggaaaagctgaaacttttcaacagtaaagggggctcaaaggcaggtgaggggccggggtcccgggacacaagctgtgagcggctggagactctgcccagcttcgaagagagcgaggagctggaggccgccagtcgcatgctcaccaccgtgggccctgcttccagcagccccaagattgcactcaagggcattgcccagaggacttttagccgggcactgaccaacaagaagagttctctgaaaggcaatgagaaagagaaggagaaacaacagcgggagaaggataaggagaaaagcaaggaccttgccaagagagcctctgtgacggagaggctggacctcaaggaggagccaaaagaagaccccagtggagcagctgtgcccgagatgccaaaaaagtcctccaagattgccagcttcatccccaaaggggggaagctcaacagtgccaagaaggagcccatggccccttcccacagtggaataccaaaaccaggaatgaaaagcatgcccgggaaatccccaagtgccccagcgccttccaaggaaggggagcggagccggagtgggaagctgagctcaggactcccccagcagaagccccagctggacggcagacactccagttcctcttccagcctggcgtcctcagaaggaaaaggcccaggagggaccaccctgaaccacagcatcagcagccagactgtcagtgggtctgtcgggaccacccagaccacaggaagcaataccgtcagtgttcagctacctcagccccagcagcaatacaaccatcccaacactgccacggttgcacctttcctgtacaggtctcagacggacactgaagggaatgttactgccgagtcaagctcaacaggtgtgagcgtggagcccagccacttcaccaagactggacagcctgctctggaagaactcactggggaagatcctgaggctcggcggctgcggacagtgaagaacatcgctgatctgcggcagaatttggaggaaaccatgtccagtttaaggggaactcaggttacacacagcacattggaaaccacgtttgacaccaatgtcaccacggagatgagtggccgtagcatactcagcttgacagggaggcccacacctctgtcctggagactgggccagtccagccctcggctccaagcaggagacgccccctcaatgggcaatgggtatccccctcgagccaacgccagcaggttcatcaacactgagtcaggtcgctatgtgtactccgcccctctgagaaggcagctggcctcccggggcagtagtgtctgccatgtggacgtctcagacaaggcaggagatgagatggacctggaaggcatcagcatggatgcccccggctacatgagcgacggggatgttctgagcaagaacatccggaccgatgacattacaagcggatacatgactgatggtggacttggcctctatacccgtcgcctgaaccggctccctgatgggatggctgtggtacgggagaccctgcaacgaaatacctccctgggcctcggagacgctgacagctgggacgacagcagctccgtcagcagcggcatcagcgacaccatagacaacctcagcactgatgacatcaacaccagctcctccatcagctcttatgccaacacacctgcctcctctcgaaaaaacctggatgtgcagactgatgctgagaagcactcacaggtggagaggaattccctgtggtctggtgatgatgtcaagaaatcagacggaggctcagacagcggcataaaaatggagccaggttccaagtggaggcggaatccttctgatgtgtctgacgagtccgacaaaagcacgtcgggcaagaagaatcctgtcatctcccagacaggctcatggcggcgaggcatgacagctcaggtgggcatcaccatgccaaggacgaagccttcagccccggcaggcgcactgaagaccccaggaactggaaaaacagacgacgcaaaggtgtctgagaaaggaaggctttctcctaaagcctcccaggtgaagcgctccccatcagatgcaggccggagcagtggtgacgaatccaaaaagcccctccccagcagctctaggacacctactgccaatgccaacagctttgggttcaagaagcagagtggttccgccgccggcctggccatgatcacagccagcggggtgactgtcaccagcaggtcagccacactgggcaaaatcccaaagtcatctgcactcgtcagtcggtctgctggtcggaagtcaagtatggatggggctcagaatcaggatgacgggtatctagccctaagctcccggacaaaccttcagtaccggagtttgccgaggcccagtaagtccaacagccggaacggggctgggaacaggtctagcaccagcagcatagattccaacattagcagcaagtccgcaggcctgccagtgcccaaactgagggagccttccaaaacagccctaggcagctctctaccaggtctggtcaaccaaacagacaaggagaaaggcatctcatcagacaacgagagtgtggcttcctgtaactcggtgaaagtgaatccggcagcccagcctgtgtccagtccggctcagaccagtctccagcctggagccaagtacccagatgtggcctctcccacactccgcagactctttggtgggaagcctaccaagcaagtgcccatcgccacagctgaaaacatgaaaaattcggtggtcatctccaatcctcatgccaccatgactcagcaaggtaacctagactccccgtcaggcagtggcgtcctgagcagtgggagcagcagtcctctctacagcaagaatgtggacctcaaccagtctccgctagcctccagccccagctcagcccactcggccccttccaacagcctcacctggggcaccaacgccagcagctcctccgcagttagcaaggatggcctgggctttcagtctgtcagcagcctccacaccagctgtgagtccatcgacatctccctcagcagtggaggggtccccagccacaattcttccactggcctcatcgcctcctccaaggacgactccttgactccctttgtcagaactaacagtgtgaagaccacactgtcagaaagccctctctcttcccctgctgctagccctaagttctgcagaagtactctgcccaggaaacaggacagtgacccgcaccttgataggaacactttgcctaagaaaggactcaggtatactcccacctcccagcttcgcacgcaagaagatgcaaaagaatggttacggtcccattctgcaggaggccttcaggacaccgctgccaattcccccttttcctctggctccagcgtgacttctccctccggaacaagattcaacttttcccagcttgcgagtcccaccactgtcacccagatgagcttgtccaacccgaccatgctgaggactcacagcctctccaatgctgatgggcagtatgatccatacactgacagccgcttccggaatagctccatgtccctggatgagaagagcagaaccatgagccgttcaggctcattccgggatgggtttgaagaagttcatggatcctcactctccttggtttccagcacatcgtcagtttattctacaccagaagaaaaatgccagtcagagattcgcaagctgcggcgggaactggatgcctcccaggagaaagtttcagctttgaccacccagctgacagcaaatgctcaccttgtggcagcctttgaacagagtcttggtaacatgacaatcaggctccagagtctgaccatgacagctgagcagaaggactcagaactgaatgagttaagaaaaaccattgagctgctaaagaaacagaacgcagctgcccaggctgccattaatggagtaattaacacacctgagctcaactgcaaaggaaacggcactgcccagtctgcagacctccgcatccgcaggcagcactcctcagacagcgtctccagcatcaacagtgccaccagccactccagcgtgggcagcaacatagagagtgactcaaagaagaagaagcggaagaactggttacgcagctccttcaagcaagctttcgggaagaagaagtccccaaaatctgcgtcctctcattcagatattgaggagatgacggattcttctttgccttcctcaccaaagttaccgcacaatgggtccacaggttccaccccactgctgaggaattctcactccaactctctaatttcagaatgcatggatagtgaagctgagaccgtcatgcagctccgaaatgagttaagagacaaggagatgaagctgacggatatccgcttagaagctctcagttctgcccaccagctggaccagctccgggaggccatgaacaggatgcagagtgaaatagagaagctgaaagctgagaatgatcggctgaagtcagagtctcaaggcagtggctgcagccgggctccttcccaagtgtccatctctgcctccccgaggcagtccatgggcctctcccagcacagcttgaacctcactgagtcaaccagcctggacatgttgctggatgacactggtgaatgctcggctcggaaggaaggaggcaggcatgttaagatagttgtcagctttcaggaggaaatgaagtggaaggaggattccagaccacatctctttcttattggctgcattggagttagtggcaagacgaagtgggatgtgctcgatggggtggttagacggctgttcaaagaatacatcattcatgtcgacccagtgagtcagctagggctgaattcagacagcgttcttggctacagcattggagaaatcaagcgcagcaacacttccgaaacaccggagctgcttccttgtggctatctggttggagagaacacgaccatctcagtgactgtgaaagggctcgcagaaaacagcctggactcactggtgtttgagtccttgattcccaagcccatcctgcagcgctacgtctccctcctgatagagcaccgtcggatcattctctctggccccagcggcactgggaaaacctacctggccaaccggctgtctgagtatatagtgcttcgagagggacgggagttgacagacggggttatcgccacctttaacgtggaccataagtccagcaaggaattgcgccagtacctgtccaaccttgctgaccagtgcaacagtgagaacaatgctgtggacatgcccctcgtcatcatcctggacaacctacaccacgtgagctctctgggagagatcttcaatgggctgctcaactgcaagtaccacaaatgcccttacataattggcacaatgaaccaggctacctcttcgactcccaacctgcagcttcaccataacttcagatgggtgctttgtgccaaccacacggagcctgtgaagggtttccttggccgattcctgaggaggaagctcatggaaacagagatcagtgggcgggtgcgcaatatggagctggtaaaaatcattgactggattcccaaggtctggcatcacctcaaccgcttcctggaggctcacagttcctcggacgtcaccatcggcccccggctcttcctgtcatgccccatcgatgtggacggctcgagagtgtggttcaccgacttgtggaactattccattatcccctatctcctggaagccgtcagagaaggactccagctctatggaaggcgcgccccctgggaggatcctgccaagtgggtgatggacacatatccatgggcagccagcccacaacagcacgagtggcctcccctgctgcagttacggcctgaggatgtcggcttcgacggctactccatgcctcgggagggatcgacaagcaagcagatgccccccagtgatgctgaaggtgacccgctgatgaacatgctgatgaggctgcaggaggcagccaactactccagcccccagagctatgacagcgactccaacagcaacagccatcacgatgacatcttggactcctctttggagtccactctgtgacaggggcccggagcccagcgccctcctcttctcctcaccgcattccacctgcatcccccacatcaccctgaagatgacttcctgagccagcccccagccacagccttagagctgcgggaacaccgagaccccccgtccttcagcctcgacctgggtgcaggcatcccgggccagctgcctgcggaccgcttccttccacagcgagaactgcactaccttctgttgtactttaattattgttttgccttgttgctgtgacctccctaagacactgaagatacttctcgggaaaggatcatcgccgttgaaatgaaaagagagacagagagaaaaaaaaaaagagaacccacatgaagctctgaaaccaaacagcatcctgccatgagcttcccagagacagaagagactggagcaaagtcggaaacacagagaagcacggcttcccctcagcacagaccctccagactgggtctcagagccgtgccacccaccctcccacacagccggccacagggagaactggtgctaaccagggtgcttgctttggtcacgttcaacgcactacagagctacgacacagggaaaccttaggagcaaataaaccgtgctttcatgttttttaaatggtgctttccttacccgagaggtattttgcctgttccaatcaaaccaccccattcaggtccatcagcctctgattaatatccgtgagagtgagtgacggagtgagagtgtgagcgagtggatgtggctgtcagtgcagaacagcatgtgtctctttccttctgatatatgaatgaatcaggtttttttttttttttttctgcaaacactgtgtatagtgagacttgttctactttggagaacaggttaccttttgaaaatgaggttgagtttcttcctttctgatgcattgatttttgaagatttttttttcccccttcccctcttggtcagaatcaatcctttggtgaaagtaagaaccgcaggagttgagttttggtttggtcctgctcagttttggtttttagttgtccatcctcacagtcctacacactcgcctcctcctgctagggctgggggtatctgtgtcctttaaaatggatgaggacctggtcctcgacatgtgggtgagccatggaccttgccttcccttctcgtccttgagggtttagaacacacaccaacacctccagcgtccccgccccagcttccggtggggtgatgcggtcaccctgcaaaagacttgcactttcctcagaaccaacatgacgcagctcaataagggtgagggtcactccctcccagaagccccgtctggacgagccttgcctgacctcttcggtgctgaccttcccaaagtgatgccttactggttttgtactaactgtgttcattttacataagtgtcgtgcctgcctggggtttgttttttttgtcattgttttccccattgaaacaaacagggctaaaaagtcatctgttcattaggagaactcaagttgctgtgacttttctcatccaaaagactcatttgtgtggatgcgtgaccatgggaaaaagaaaaaaaaaaagatccattttttaggttcttttcggtctccagctgacaacccaactggacaatgatctgtctggtgcaggagaaggcaaaagtttctacaagtctacatgaccttgctgatacttgttctaatagaaacccagtctgctgtgtcttcaacatactggtattttcattacaaagtatggtaaatttttgagttgtttgtttctgttttgtaaagagaatccttattggacaccagtgaaggtgtctctgttttaatgatcagggtttttattccatcttttgcatttcttctatttctgaaggtttgtctcttggcatctttttttagtttcttaccataagagtttgacccgaaactgctcacttcacattggatgacaccatgttcttcctctttgaaaagaaaaggggaatgtgtcccactagtgaaaggaaaacttttcaacactatccctgctttagtctcagcaaactcagactattctgcttagccttcattagtcatctgggtgtgagtgtgtcttgttctgtttttctttttaataaaacttttaaaccatatatttagcctgtgaccaggggggccaaaccctaagatttctggtaaacctgaagggtggccctcctcagacaatttatctcccagcaatgaccctactacactcgcgtactgtgaatttgggaggaggtaaagttgacttctcctcgtgggcagttttccaatcaccttgtgagtagacacctgccaatattgtttgaaacctttttttaatatgacatcctctcttgtcattctcttctcccctttcccacagacttccctcctgggtccaggttcagaaccaagacttctgtacctagtgctgcctgattggtgaacattgacttcaagtagcatagcccttgtgtgactcacaactccgtgtccttcctaaagtttcgggaagcagggttgtctaatatgcacatttcttattttggtcatatttttactttagtgtcactcaccttttacaaagtgactttgtactcatttagggctctatcggaaatgcttccattttgccttttctacagttaggccaattttgaaatatataaattctatgcaacatttatgttgagttaccaatggaagccaaaagttctcttcccaaactgccaagaatgatacaggccataattgaaatgggaataccttttaagtttcattaggggtggggtgggagtgggacaggaacaagacttgcctagatctttgttgtatcttggggacttttactttgttgtttgatgcttaaacttcaaaattctctgtattcaaatttgattgtggcgaatctacttcaaaaaggaaaaataatccaactttgtggatattaaatggaaggtttgctgttttgatctagttgtttccagtggagcagttttatgaaatatgttctataagatgtacattttttcattgtaacatagaaattgtaaataattgattaaagtgctgcattttgatgaattttttctagccatttttaaagagaaaactaggaattgagtattttgtgtacggtatgtttccatcctccctccccttcctcctcccctcctctctctctcttcctacctatttaattttcatttgtcatgaggtttttggatttgccaatgatctgctggacatcatgccccatgtcatagagaataaagctgatgattgtaccagtcttaaattattcatgattcaataaaattgatgcttatttattcag

SEQ ID NO: 8781 - protein, 2429 aa, Homo sapiens; identical to SEQ ID NO: 1266

SEQ ID NO: 8782 - DNA, 12147 bp, Homo sapiens
gtcctcccctgcgctgagccccgcagccagcgcagccttcccgggaagcgcggcggccgctcccgagcgcagccctgcccggcccgccagccgcgcgtcccggcgcccgcgccccacggccacagccttgcctctatctagctcacggagcatgtgcagacccgcaggcgctaaggtgctctcagtccgggggccttctgggcagcggtgactgtcaccccaagagagacctttcgggggctcttgccgcacctctgctgcgtcgcgggtgacactgcggtgctcgcgagcagggtggcagctgcctctcggtggagacgtcttgggacccttgcgcccttcttctctccttccttcgctgctgtctcctttccttccttggctgctcgctctttctctcgccggctcagacccgtagcctccggaacgggactcgtgggtcgccgccgcctctgtctcttccaaaggggcctcctcacttcggagatgcagtgacaagttaatatgggcgtccaagcctctgtttcccaggaggaaatttgcaagaggcggcagcccctgagcgcccagagctcttgaaaggccacccaggagaggtgtgagacccggcggcagcatccgtccaggtgggacccgctgagcgccgtggccagtcccccattcccatcccggcaccccaaaggcgcgctcgcccgattgcttcgagttccccgacctggggattttttttttagccgctggtggtgggcgcctcgtgggctaaggcccggcgcctgctctgctacccgcgctgcctttagcggtcgcccccgccgccgctgccagggacgtgctgggaaagcccaagccccgggagaagatgccggccatcctggtcgcctccaaaatgaagtcgggactgcccaaacccgtgcacagcgccgcgcccatcctgcacgtgcccccggcccgggcgggcccccagccctgctacctgaagttgggaagcaaggtggaggtgagcaagaccacctatcctagccagatccccctgaaatcgcaggtgctgcaggggctgcaggagccagcgggggaggggctcccgctgcggaagagcggctcggtggaaaacgggttcgatacccagatctacacagactgggccaatcattacctagccaaatccggccacaagcgtctcatcagggatctccagcaagatgtgacagatggcgtcctcctggcccagattatccaggttgtggcaaatgaaaagattgaagacatcaatggctgtccgaagaacagatcccaaatgattgaaaacatagatgcctgcttgaatttcctggcagctaagggaataaacatccaggggctgtctgcagaagagatcaggaatggaaacctcaaggccattctaggcctcttcttcagcctctcccgatacaagcagcagcagcagcagccccagaagcagcacctctcctcacctctgccgcccgccgtatcccaggtggccggggccccctcccagtgccaggctggcacccctcagcagcaggtgccagtcactccccaagccccgtgccagcctcaccagccagcgccacatcagcagtcaaaagcacaagctgaaatgcagtccagtgcatcatccaaggactcatctcaaagcaaaatcatccgcttcactctgggtcagaaaaagatctctagacttccaggtcctaccgcgagggtatccgctgcaggcagcgaggccaaaacacgcggagggtcaactactgctaacaaccgacgcagccagagctttaacaactatgataaatccaaaccagtcacctccccacccccaccgccaagcagccacgagaaagagcctttggcaagttcagcctcctcccaccccggaatgagtgacaatgcacctgcttccttggagagcggcagcagctccacccctactaattgcagtacctcctcggccatcccgcagcccggtgcagccaccaagccttggcgcagcaaatccctcagcgtgaagcacagtgccacggtatccatgctctcggtcaagcctcctgggcctgaggcccccaggcccacacctgaagccatgaagccggcccccaacaatcagaagtccatgctggaaaagctgaaacttttcaacagtaaagggggctcaaaggcaggtgaggggccggggtcccgggacacaagctgtgagcggctggagactctgcccagcttcgaagagagcgaggagctggaggccgccagtcgcatgctcaccaccgtgggccctgcttccagcagccccaagattgcactcaagggcattgcccagaggacttttagccgggcactgaccaacaagaagagttctctgaaaggcaatgagaaagagaaggagaaacaacagcgggagaaggataaggagaaaagcaaggaccttgccaagagagcctctgtgacggagaggctggacctcaaggaggagccaaaagaagaccccagtggagcagctgtgcccgagatgccaaaaaagtcctccaagattgccagcttcatccccaaaggggggaagctcaacagtgccaagaaggagcccatggccccttcccacagtggaataccaaaaccaggaatgaaaagcatgcccgggaaatccccaagtgccccagcgccttccaaggaaggggagcggagccggagtgggaagctgagctcaggactcccccagcagaagccccagctggacggcagacactccagttcctcttccagcctggcgtcctcagaaggaaaaggcccaggagggaccaccctgaaccacagcatcagcagccagactgtcagtgggtctgtcgggaccacccagaccacaggaagcaataccgtcagtgttcagctacctcagccccagcagcaatacaaccatcccaacactgccacggttgcacctttcctgtacaggtctcagacggacactgaagggaatgttactgccgagtcaagctcaacaggtgtgagcgtggagcccagccacttcaccaagactggacagcctgctctggaagaactcactggggaagatcctgaggctcggcggctgcggacagtgaagaacatcgctgatctgcggcagaatttggaggaaaccatgtccagtttaaggggaactcaggttacacacagcacattggaaaccacgtttgacaccaatgtcaccacggagatgagtggccgtagcatactcagcttgacagggaggcccacacctctgtcctggagactgggccagtccagccctcggctccaagcaggagacgccccctcaatgggcaatgggtatccccctcgagccaacgccagcaggttcatcaacactgagtcaggtcgctatgtgtactccgcccctctgagaaggcagctggcctcccggggcagtagtgtctgccatgtggacgtctcagacaaggcaggagatgagatggacctggaaggcatcagcatggatgcccccggctacatgagcgacggggatgttctgagcaagaacatccggaccgatgacattacaagcggatacatgactgatggtggacttggcctctatacccgtcgcctgaaccggctccctgatgggatggctgtggtacgggagaccctgcaacgaaatacctccctgggcctcggagacgctgacagctgggacgacagcagctccgtcagcagcggcatcagcgacaccatagacaacctcagcactgatgacatcaacaccagctcctccatcagctcttatgccaacacacctgcctcctctcgaaaaaacctggatgtgcagactgatgctgagaagcactcacaggtggagaggaattccctgtggtctggtgatgatgtcaagaaatcagacggaggctcagacagcggcataaaaatggagccaggttccaagtggaggcggaatccttctgatgtgtctgacgagtccgacaaaagcacgtcgggcaagaagaatcctgtcatctcccagacaggctcatggcggcgaggcatgacagctcaggtgggcatcaccatgccaaggacgaagccttcagccccggcaggcgcactgaagaccccaggaactggaaaaacagacgacgcaaaggtgtctgagaaaggaaggctttctcctaaagcctcccaggtgaagcgctccccatcagatgcaggccggagcagtggtgacgaatccaaaaagcccctccccagcagctctaggacacctactgccaatgccaacagctttgggttcaagaagcagagtggttccgccgccggcctggccatgatcacagccagcggggtgactgtcaccagcaggtcagccacactgggcaaaatcccaaagtcatctgcactcgtcagtcggtctgctggtcggaagtcaagtatggatggggctcagaatcaggatgacgggtatctagccctaagctcccggacaaaccttcagtaccggagtttgccgaggcccagtaagtccaacagccggaacggggctgggaacaggtctagcaccagcagcatagattccaacattagcagcaagtccgcaggcctgccagtgcccaaactgagggagccttccaaaacagccctaggcagctctctaccaggtctggtcaaccaaacagacaaggagaaaggcatctcatcagacaacgagagtgtggcttcctgtaactcggtgaaagtgaatccggcagcccagcctgtgtccagtccggctcagaccagtctccagcctggagccaagtacccagatgtggcctctcccacactccgcagactctttggtgggaagcctaccaagcaagtgcccatcgccacagctgaaaacatgaaaaattcggtggtcatctccaatcctcatgccaccatgactcagcaaggtaacctagactccccgtcaggcagtggcgtcctgagcagtgggagcagcagtcctctctacagcaagaatgtggacctcaaccagtctccgctagcctccagccccagctcagcccactcggccccttccaacagcctcacctggggcaccaacgccagcagctcctccgcagttagcaaggatggcctgggctttcagtctgtcagcagcctccacaccagctgtgagtccatcgacatctccctcagcagtggaggggtccccagccacaattcttccactggcctcatcgcctcctccaaggacgactccttgactccctttgtcagaactaacagtgtgaagaccacactgtcagaaagccctctctcttcccctgctgctagccctaagttctgcagaagtactctgcccaggaaacaggacagtgacccgcaccttgataggaacactttgcctaagaaaggactcaggtatactcccacctcccagcttcgcacgcaagaagatgcaaaagaatggttacggtcccattctgcaggaggccttcaggacaccgctgccaattcccccttttcctctggctccagcgtgacttctccctccggaacaagattcaacttttcccagcttgcgagtcccaccactgtcacccagatgagcttgtccaacccgaccatgctgaggactcacagcctctccaatgctgatgggcagtatgatccatacactgacagccgcttccggaatagctccatgtccctggatgagaagagcagaaccatgagccgttcaggctcattccgggatgggtttgaagaagaatcatgggagaaaagttctgtggacaactttgtcagccgtcttcacagctcacttcatttctctcttcctttgttccatcacgcaaggtatgagttagttcatggatcctcactctccttggtttccagcacatcgtcagtttattctacaccagaagaaaaatgccagtcagagattcgcaagctgcggcgggaactggatgcctcccaggagaaagtttcagctttgaccacccagctgacagcaaatgctcaccttgtggcagcctttgaacagagtcttggtaacatgacaatcaggctccagagtctgaccatgacagctgagcagaaggactcagaactgaatgagttaagaaaaaccattgagctgctaaagaaacagaacgcagctgcccaggctgccattaatggagtaattaacacacctgagctcaactgcaaaggaaacggcactgcccagtctgcagacctccgcatccgcaggcagcactcctcagacagcgtctccagcatcaacagtgccaccagccactccagcgtgggcagcaacatagagagtgactcaaagaagaagaagcggaagaactggttacgcagctccttcaagcaagctttcgggaagaagaagtccccaaaatctgcgtcctctcattcagatattgaggagatgacggattcttctttgccttcctcaccaaagttaccgcacaatgggtccacaggttccaccccactgctgaggaattctcactccaactctctaatttcagaatgcatggatagtgaagctgagaccgtcatgcagctccgaaatgagttaagagacaaggagatgaagctgacggatatccgcttagaagctctcagttctgcccaccagctggaccagctccgggaggccatgaacaggatgcagagtgaaatagagaagctgaaagctgagaatgatcggctgaagtcagagtctcaaggcagtggctgcagccgggctccttcccaagtgtccatctctgcctccccgaggcagtccatgggcctctcccagcacagcttgaacctcactgagtcaaccagcctggacatgttgctggatgacactggtgaatgctcggctcggaaggaaggaggcaggcatgttaagatagttgtcagctttcaggaggaaatgaagtggaaggaggattccagaccacatctctttcttattggctgcattggagttagtggcaagacgaagtgggatgtgctcgatggggtggttagacggctgttcaaagaatacatcattcatgtcgacccagtgagtcagctagggctgaattcagacagcgttcttggctacagcattggagaaatcaagcgcagcaacacttccgaaacaccggagctgcttccttgtggctatctggttggagagaacacgaccatctcagtgactgtgaaagggctcgcagaaaacagcctggactcactggtgtttgagtccttgattcccaagcccatcctgcagcgctacgtctccctcctgatagagcaccgtcggatcattctctctggccccagcggcactgggaaaacctacctggccaaccggctgtctgagtatatagtgcttcgagagggacgggagttgacagacggggttatcgccacctttaacgtggaccataagtccagcaaggaattgcgccagtacctgtccaaccttgctgaccagtgcaacagtgagaacaatgctgtggacatgcccctcgtcatcatcctggacaacctacaccacgtgagctctctgggagagatcttcaatgggctgctcaactgcaagtaccacaaatgcccttacataattggcacaatgaaccaggctacctcttcgactcccaacctgcagcttcaccataacttcagatgggtgctttgtgccaaccacacggagcctgtgaagggtttccttggccgattcctgaggaggaagctcatggaaacagagatcagtgggcgggtgcgcaatatggagctggtaaaaatcattgactggattcccaaggtctggcatcacctcaaccgcttcctggaggctcacagttcctcggacgtcaccatcggcccccggctcttcctgtcatgccccatcgatgtggacggctcgagagtgtggttcaccgacttgtggaactattccattatcccctatctcctggaagccgtcagagaaggactccagctctatggaaggcgcgccccctgggaggatcctgccaagtgggtgatggacacatatccatgggcagccagcccacaacagcacgagtggcctcccctgctgcagttacggcctgaggatgtcggcttcgacggctactccatgcctcgggagggatcgacaagcaagcagatgccccccagtgatgctgaaggtgacccgctgatgaacatgctgatgaggctgcaggaggcagccaactactccagcccccagagctatgacagcgactccaacagcaacagccatcacgatgacatcttggactcctctttggagtccactctgtgacaggggcccggagcccagcgccctcctcttctcctcaccgcattccacctgcatcccccacatcaccctgaagatgacttcctgagccagcccccagccacagccttagagctgcgggaacaccgagaccccccgtccttcagcctcgacctgggtgcaggcatcccgggccagctgcctgcggaccgcttccttccacagcgagaactgcactaccttctgttgtactttaattattgttttgccttgttgctgtgacctccctaagacactgaagatacttctcgggaaaggatcatcgccgttgaaatgaaaagagagacagagagaaaaaaaaaaagagaacccacatgaagctctgaaaccaaacagcatcctgccatgagcttcccagagacagaagagactggagcaaagtcggaaacacagagaagcacggcttcccctcagcacagaccctccagactgggtctcagagccgtgccacccaccctcccacacagccggccacagggagaactggtgctaaccagggtgcttgctttggtcacgttcaacgcactacagagctacgacacagggaaaccttaggagcaaataaaccgtgctttcatgttttttaaatggtgctttccttacccgagaggtattttgcctgttccaatcaaaccaccccattcaggtccatcagcctctgattaatatccgtgagagtgagtgacggagtgagagtgtgagcgagtggatgtggctgtcagtgcagaacagcatgtgtctctttccttctgatatatgaatgaatcaggtttttttttttttttttctgcaaacactgtgtatagtgagacttgttctactttggagaacaggttaccttttgaaaatgaggttgagtttcttcctttctgatgcattgatttttgaagatttttttttcccccttcccctcttggtcagaatcaatcctttggtgaaagtaagaaccgcaggagttgagttttggtttggtcctgctcagttttggtttttagttgtccatcctcacagtcctacacactcgcctcctcctgctagggctgggggtatctgtgtcctttaaaatggatgaggacctggtcctcgacatgtgggtgagccatggaccttgccttcccttctcgtccttgagggtttagaacacacaccaacacctccagcgtccccgccccagcttccggtggggtgatgcggtcaccctgcaaaagacttgcactttcctcagaaccaacatgacgcagctcaataagggtgagggtcactccctcccagaagccccgtctggacgagccttgcctgacctcttcggtgctgaccttcccaaagtgatgccttactggttttgtactaactgtgttcattttacataagtgtcgtgcctgcctggggtttgttttttttgtcattgttttccccattgaaacaaacagggctaaaaagtcatctgttcattaggagaactcaagttgctgtgacttttctcatccaaaagactcatttgtgtggatgcgtgaccatgggaaaaagaaaaaaaaaaagatccattttttaggttcttttcggtctccagctgacaacccaactggacaatgatctgtctggtgcaggagaaggcaaaagtttctacaagtctacatgaccttgctgatacttgttctaatagaaacccagtctgctgtgtcttcaacatactggtattttcattacaaagtatggtaaatttttgagttgtttgtttctgttttgtaaagagaatccttattggacaccagtgaaggtgtctctgttttaatgatcagggtttttattccatcttttgcatttcttctatttctgaaggtttgtctcttggcatctttttttagtttcttaccataagagtttgacccgaaactgctcacttcacattggatgacaccatgttcttcctctttgaaaagaaaaggggaatgtgtcccactagtgaaaggaaaacttttcaacactatccctgctttagtctcagcaaactcagactattctgcttagccttcattagtcatctgggtgtgagtgtgtcttgttctgtttttctttttaataaaacttttaaaccatatatttagcctgtgaccaggggggccaaaccctaagatttctggtaaacctgaagggtggccctcctcagacaatttatctcccagcaatgaccctactacactcgcgtactgtgaatttgggaggaggtaaagttgacttctcctcgtgggcagttttccaatcaccttgtgagtagacacctgccaatattgtttgaaacctttttttaatatgacatcctctcttgtcattctcttctcccctttcccacagacttccctcctgggtccaggttcagaaccaagacttctgtacctagtgctgcctgattggtgaacattgacttcaagtagcatagcccttgtgtgactcacaactccgtgtccttcctaaagtttcgggaagcagggttgtctaatatgcacatttcttattttggtcatatttttactttagtgtcactcaccttttacaaagtgactttgtactcatttagggctctatcggaaatgcttccattttgccttttctacagttaggccaattttgaaatatataaattctatgcaacatttatgttgagttaccaatggaagccaaaagttctcttcccaaactgccaagaatgatacaggccataattgaaatgggaataccttttaagtttcattaggggtggggtgggagtgggacaggaacaagacttgcctagatctttgttgtatcttggggacttttactttgttgtttgatgcttaaacttcaaaattctctgtattcaaatttgattgtggcgaatctacttcaaaaaggaaaaataatccaactttgtggatattaaatggaaggtttgctgttttgatctagttgtttccagtggagcagttttatgaaatatgttctataagatgtacattttttcattgtaacatagaaattgtaaataattgattaaagtgctgcattttgatgaattttttctagccatttttaaagagaaaactaggaattgagtattttgtgtacggtatgtttccatcctccctccccttcctcctcccctcctctctctctcttcctacctatttaattttcatttgtcatgaggtttttggatttgccaatgatctgctggacatcatgccccatgtcatagagaataaagctgatgattgtaccagtcttaaattattcatgattcaataaaattgatgcttatttattcagattagtggtttggcttgtctgtgctagagcaagtcctcataggagttttatttcatgctaagagcaagtcagtcttatctggatgcagcaaatgcagggaaaaccccaaacctttgcaaacccatcttggctagtatgccatcaatatcccacatcttctcagtttctcaggtcttcttgccactcctgtggagcttgttagaactgtagaatttcagatcctctcagactttatgaatcaccagggatctagtggatcctcaatttctaacaaactcctaggcaataccagtgctctagtgcctggaccacacattgagtggcaagcaacatcagtgtccagccagccccctaagtcgatcccttggcatgaaaaggatttttttttaatgtattgagtacctactaatttccaaatgctttcccaaatactcagtataatgcaaaatgatgccagagaggtattcttactcccattttacaagtgg

SEQ ID NO: 8783 - protein, 2485 aa, Homo sapiens; identical to SEQ ID NO: 8779

SEQ ID NO: 8784 - DNA, 11979 bp, Homo sapiens
gtcctcccctgcgctgagccccgcagccagcgcagccttcccgggaagcgcggcggccgctcccgagcgcagccctgcccggcccgccagccgcgcgtcccggcgcccgcgccccacggccacagccttgcctctatctagctcacggagcatgtgcagacccgcaggcgctaaggtgctctcagtccgggggccttctgggcagcggtgactgtcaccccaagagagacctttcgggggctcttgccgcacctctgctgcgtcgcgggtgacactgcggtgctcgcgagcagggtggcagctgcctctcggtggagacgtcttgggacccttgcgcccttcttctctccttccttcgctgctgtctcctttccttccttggctgctcgctctttctctcgccggctcagacccgtagcctccggaacgggactcgtgggtcgccgccgcctctgtctcttccaaaggggcctcctcacttcggagatgcagtgacaagttaatatgggcgtccaagcctctgtttcccaggaggaaatttgcaagaggcggcagcccctgagcgcccagagctcttgaaaggccacccaggagaggtgtgagacccggcggcagcatccgtccaggtgggacccgctgagcgccgtggccagtcccccattcccatcccggcaccccaaaggcgcgctcgcccgattgcttcgagttccccgacctggggattttttttttagccgctggtggtgggcgcctcgtgggctaaggcccggcgcctgctctgctacccgcgctgcctttagcggtcgcccccgccgccgctgccagggacgtgctgggaaagcccaagccccgggagaagatgccggccatcctggtcgcctccaaaatgaagtcgggactgcccaaacccgtgcacagcgccgcgcccatcctgcacgtgcccccggcccgggcgggcccccagccctgctacctgaagttgggaagcaaggtggaggtgagcaagaccacctatcctagccagatccccctgaaatcgcaggtgctgcaggggctgcaggagccagcgggggaggggctcccgctgcggaagagcggctcggtggaaaacgggttcgatacccagatctacacagactgggccaatcattacctagccaaatccggccacaagcgtctcatcagggatctccagcaagatgtgacagatggcgtcctcctggcccagattatccaggttgtggcaaatgaaaagattgaagacatcaatggctgtccgaagaacagatcccaaatgattgaaaacatagatgcctgcttgaatttcctggcagctaagggaataaacatccaggggctgtctgcagaagagatcaggaatggaaacctcaaggccattctaggcctcttcttcagcctctcccgatacaagcagcagcagcagcagccccagaagcagcacctctcctcacctctgccgcccgccgtatcccaggtggccggggccccctcccagtgccaggctggcacccctcagcagcaggtgccagtcactccccaagccccgtgccagcctcaccagccagcgccacatcagcagtcaaaagcacaagctgaaatgcagtccagacttccaggtcctaccgcgagggtatccgctgcaggcagcgaggccaaaacacgcggagggtcaactactgctaacaaccgacgcagccagagctttaacaactatgataaatccaaaccagtcacctccccacccccaccgccaagcagccacgagaaagagcctttggcaagttcagcctcctcccaccccggaatgagtgacaatgcacctgcttccttggagagcggcagcagctccacccctactaattgcagtacctcctcggccatcccgcagcccggtgcagccaccaagccttggcgcagcaaatccctcagcgtgaagcacagtgccacggtatccatgctctcggtcaagcctcctgggcctgaggcccccaggcccacacctgaagccatgaagccggcccccaacaatcagaagtccatgctggaaaagctgaaacttttcaacagtaaagggggctcaaaggcaggtgaggggccggggtcccgggacacaagctgtgagcggctggagactctgcccagcttcgaagagagcgaggagctggaggccgccagtcgcatgctcaccaccgtgggccctgcttccagcagccccaagattgcactcaagggcattgcccagaggacttttagccgggcactgaccaacaagaagagttctctgaaaggcaatgagaaagagaaggagaaacaacagcgggagaaggataaggagaaaagcaaggaccttgccaagagagcctctgtgacggagaggctggacctcaaggaggagccaaaagaagaccccagtggagcagctgtgcccgagatgccaaaaaagtcctccaagattgccagcttcatccccaaaggggggaagctcaacagtgccaagaaggagcccatggccccttcccacagtggaataccaaaaccaggaatgaaaagcatgcccgggaaatccccaagtgccccagcgccttccaaggaaggggagcggagccggagtgggaagctgagctcaggactcccccagcagaagccccagctggacggcagacactccagttcctcttccagcctggcgtcctcagaaggaaaaggcccaggagggaccaccctgaaccacagcatcagcagccagactgtcagtgggtctgtcgggaccacccagaccacaggaagcaataccgtcagtgttcagctacctcagccccagcagcaatacaaccatcccaacactgccacggttgcacctttcctgtacaggtctcagacggacactgaagggaatgttactgccgagtcaagctcaacaggtgtgagcgtggagcccagccacttcaccaagactggacagcctgctctggaagaactcactggggaagatcctgaggctcggcggctgcggacagtgaagaacatcgctgatctgcggcagaatttggaggaaaccatgtccagtttaaggggaactcaggttacacacagcacattggaaaccacgtttgacaccaatgtcaccacggagatgagtggccgtagcatactcagcttgacagggaggcccacacctctgtcctggagactgggccagtccagccctcggctccaagcaggagacgccccctcaatgggcaatgggtatccccctcgagccaacgccagcaggttcatcaacactgagtcaggtcgctatgtgtactccgcccctctgagaaggcagctggcctcccggggcagtagtgtctgccatgtggacgtctcagacaaggcaggagatgagatggacctggaaggcatcagcatggatgcccccggctacatgagcgacggggatgttctgagcaagaacatccggaccgatgacattacaagcggatacatgactgatggtggacttggcctctatacccgtcgcctgaaccggctccctgatgggatggctgtggtacgggagaccctgcaacgaaatacctccctgggcctcggagacgctgacagctgggacgacagcagctccgtcagcagcggcatcagcgacaccatagacaacctcagcactgatgacatcaacaccagctcctccatcagctcttatgccaacacacctgcctcctctcgaaaaaacctggatgtgcagactgatgctgagaagcactcacaggtggagaggaattccctgtggtctggtgatgatgtcaagaaatcagacggaggctcagacagcggcataaaaatggagccaggttccaagtggaggcggaatccttctgatgtgtctgacgagtccgacaaaagcacgtcgggcaagaagaatcctgtcatctcccagacaggctcatggcggcgaggcatgacagctcaggtgggcatcaccatgccaaggacgaagccttcagccccggcaggcgcactgaagaccccaggaactggaaaaacagacgacgcaaaggtgtctgagaaaggaaggctttctcctaaagcctcccaggtgaagcgctccccatcagatgcaggccggagcagtggtgacgaatccaaaaagcccctccccagcagctctaggacacctactgccaatgccaacagctttgggttcaagaagcagagtggttccgccgccggcctggccatgatcacagccagcggggtgactgtcaccagcaggtcagccacactgggcaaaatcccaaagtcatctgcactcgtcagtcggtctgctggtcggaagtcaagtatggatggggctcagaatcaggatgacgggtatctagccctaagctcccggacaaaccttcagtaccggagtttgccgaggcccagtaagtccaacagccggaacggggctgggaacaggtctagcaccagcagcatagattccaacattagcagcaagtccgcaggcctgccagtgcccaaactgagggagccttccaaaacagccctaggcagctctctaccaggtctggtcaaccaaacagacaaggagaaaggcatctcatcagacaacgagagtgtggcttcctgtaactcggtgaaagtgaatccggcagcccagcctgtgtccagtccggctcagaccagtctccagcctggagccaagtacccagatgtggcctctcccacactccgcagactctttggtgggaagcctaccaagcaagtgcccatcgccacagctgaaaacatgaaaaattcggtggtcatctccaatcctcatgccaccatgactcagcaaggtaacctagactccccgtcaggcagtggcgtcctgagcagtgggagcagcagtcctctctacagcaagaatgtggacctcaaccagtctccgctagcctccagccccagctcagcccactcggccccttccaacagcctcacctggggcaccaacgccagcagctcctccgcagttagcaaggatggcctgggctttcagtctgtcagcagcctccacaccagctgtgagtccatcgacatctccctcagcagtggaggggtccccagccacaattcttccactggcctcatcgcctcctccaaggacgactccttgactccctttgtcagaactaacagtgtgaagaccacactgtcagaaagccctctctcttcccctgctgctagccctaagttctgcagaagtactctgcccaggaaacaggacagtgacccgcaccttgataggaacactttgcctaagaaaggactcaggtatactcccacctcccagcttcgcacgcaagaagatgcaaaagaatggttacggtcccattctgcaggaggccttcaggacaccgctgccaattcccccttttcctctggctccagcgtgacttctccctccggaacaagattcaacttttcccagcttgcgagtcccaccactgtcacccagatgagcttgtccaacccgaccatgctgaggactcacagcctctccaatgctgatgggcagtatgatccatacactgacagccgcttccggaatagctccatgtccctggatgagaagagcagaaccatgagccgttcaggctcattccgggatgggtttgaagaagttcatggatcctcactctccttggtttccagcacatcgtcagtttattctacaccagaagaaaaatgccagtcagagattcgcaagctgcggcgggaactggatgcctcccaggagaaagtttcagctttgaccacccagctgacagcaaatgctcaccttgtggcagcctttgaacagagtcttggtaacatgacaatcaggctccagagtctgaccatgacagctgagcagaaggactcagaactgaatgagttaagaaaaaccattgagctgctaaagaaacagaacgcagctgcccaggctgccattaatggagtaattaacacacctgagctcaactgcaaaggaaacggcactgcccagtctgcagacctccgcatccgcaggcagcactcctcagacagcgtctccagcatcaacagtgccaccagccactccagcgtgggcagcaacatagagagtgactcaaagaagaagaagcggaagaactggttacgcagctccttcaagcaagctttcgggaagaagaagtccccaaaatctgcgtcctctcattcagatattgaggagatgacggattcttctttgccttcctcaccaaagttaccgcacaatgggtccacaggttccaccccactgctgaggaattctcactccaactctctaatttcagaatgcatggatagtgaagctgagaccgtcatgcagctccgaaatgagttaagagacaaggagatgaagctgacggatatccgcttagaagctctcagttctgcccaccagctggaccagctccgggaggccatgaacaggatgcagagtgaaatagagaagctgaaagctgagaatgatcggctgaagtcagagtctcaaggcagtggctgcagccgggctccttcccaagtgtccatctctgcctccccgaggcagtccatgggcctctcccagcacagcttgaacctcactgagtcaaccagcctggacatgttgctggatgacactggtgaatgctcggctcggaaggaaggaggcaggcatgttaagatagttgtcagctttcaggaggaaatgaagtggaaggaggattccagaccacatctctttcttattggctgcattggagttagtggcaagacgaagtgggatgtgctcgatggggtggttagacggctgttcaaagaatacatcattcatgtcgacccagtgagtcagctagggctgaattcagacagcgttcttggctacagcattggagaaatcaagcgcagcaacacttccgaaacaccggagctgcttccttgtggctatctggttggagagaacacgaccatctcagtgactgtgaaagggctcgcagaaaacagcctggactcactggtgtttgagtccttgattcccaagcccatcctgcagcgctacgtctccctcctgatagagcaccgtcggatcattctctctggccccagcggcactgggaaaacctacctggccaaccggctgtctgagtatatagtgcttcgagagggacgggagttgacagacggggttatcgccacctttaacgtggaccataagtccagcaaggaattgcgccagtacctgtccaaccttgctgaccagtgcaacagtgagaacaatgctgtggacatgcccctcgtcatcatcctggacaacctacaccacgtgagctctctgggagagatcttcaatgggctgctcaactgcaagtaccacaaatgcccttacataattggcacaatgaaccaggctacctcttcgactcccaacctgcagcttcaccataacttcagatgggtgctttgtgccaaccacacggagcctgtgaagggtttccttggccgattcctgaggaggaagctcatggaaacagagatcagtgggcgggtgcgcaatatggagctggtaaaaatcattgactggattcccaaggtctggcatcacctcaaccgcttcctggaggctcacagttcctcggacgtcaccatcggcccccggctcttcctgtcatgccccatcgatgtggacggctcgagagtgtggttcaccgacttgtggaactattccattatcccctatctcctggaagccgtcagagaaggactccagctctatggaaggcgcgccccctgggaggatcctgccaagtgggtgatggacacatatccatgggcagccagcccacaacagcacgagtggcctcccctgctgcagttacggcctgaggatgtcggcttcgacggctactccatgcctcgggagggatcgacaagcaagcagatgccccccagtgatgctgaaggtgacccgctgatgaacatgctgatgaggctgcaggaggcagccaactactccagcccccagagctatgacagcgactccaacagcaacagccatcacgatgacatcttggactcctctttggagtccactctgtgacaggggcccggagcccagcgccctcctcttctcctcaccgcattccacctgcatcccccacatcaccctgaagatgacttcctgagccagcccccagccacagccttagagctgcgggaacaccgagaccccccgtccttcagcctcgacctgggtgcaggcatcccgggccagctgcctgcggaccgcttccttccacagcgagaactgcactaccttctgttgtactttaattattgttttgccttgttgctgtgacctccctaagacactgaagatacttctcgggaaaggatcatcgccgttgaaatgaaaagagagacagagagaaaaaaaaaaagagaacccacatgaagctctgaaaccaaacagcatcctgccatgagcttcccagagacagaagagactggagcaaagtcggaaacacagagaagcacggcttcccctcagcacagaccctccagactgggtctcagagccgtgccacccaccctcccacacagccggccacagggagaactggtgctaaccagggtgcttgctttggtcacgttcaacgcactacagagctacgacacagggaaaccttaggagcaaataaaccgtgctttcatgttttttaaatggtgctttccttacccgagaggtattttgcctgttccaatcaaaccaccccattcaggtccatcagcctctgattaatatccgtgagagtgagtgacggagtgagagtgtgagcgagtggatgtggctgtcagtgcagaacagcatgtgtctctttccttctgatatatgaatgaatcaggtttttttttttttttttctgcaaacactgtgtatagtgagacttgttctactttggagaacaggttaccttttgaaaatgaggttgagtttcttcctttctgatgcattgatttttgaagatttttttttcccccttcccctcttggtcagaatcaatcctttggtgaaagtaagaaccgcaggagttgagttttggtttggtcctgctcagttttggtttttagttgtccatcctcacagtcctacacactcgcctcctcctgctagggctgggggtatctgtgtcctttaaaatggatgaggacctggtcctcgacatgtgggtgagccatggaccttgccttcccttctcgtccttgagggtttagaacacacaccaacacctccagcgtccccgccccagcttccggtggggtgatgcggtcaccctgcaaaagacttgcactttcctcagaaccaacatgacgcagctcaataagggtgagggtcactccctcccagaagccccgtctggacgagccttgcctgacctcttcggtgctgaccttcccaaagtgatgccttactggttttgtactaactgtgttcattttacataagtgtcgtgcctgcctggggtttgttttttttgtcattgttttccccattgaaacaaacagggctaaaaagtcatctgttcattaggagaactcaagttgctgtgacttttctcatccaaaagactcatttgtgtggatgcgtgaccatgggaaaaagaaaaaaaaaaagatccattttttaggttcttttcggtctccagctgacaacccaactggacaatgatctgtctggtgcaggagaaggcaaaagtttctacaagtctacatgaccttgctgatacttgttctaatagaaacccagtctgctgtgtcttcaacatactggtattttcattacaaagtatggtaaatttttgagttgtttgtttctgttttgtaaagagaatccttattggacaccagtgaaggtgtctctgttttaatgatcagggtttttattccatcttttgcatttcttctatttctgaaggtttgtctcttggcatctttttttagtttcttaccataagagtttgacccgaaactgctcacttcacattggatgacaccatgttcttcctctttgaaaagaaaaggggaatgtgtcccactagtgaaaggaaaacttttcaacactatccctgctttagtctcagcaaactcagactattctgcttagccttcattagtcatctgggtgtgagtgtgtcttgttctgtttttctttttaataaaacttttaaaccatatatttagcctgtgaccaggggggccaaaccctaagatttctggtaaacctgaagggtggccctcctcagacaatttatctcccagcaatgaccctactacactcgcgtactgtgaatttgggaggaggtaaagttgacttctcctcgtgggcagttttccaatcaccttgtgagtagacacctgccaatattgtttgaaacctttttttaatatgacatcctctcttgtcattctcttctcccctttcccacagacttccctcctgggtccaggttcagaaccaagacttctgtacctagtgctgcctgattggtgaacattgacttcaagtagcatagcccttgtgtgactcacaactccgtgtccttcctaaagtttcgggaagcagggttgtctaatatgcacatttcttattttggtcatatttttactttagtgtcactcaccttttacaaagtgactttgtactcatttagggctctatcggaaatgcttccattttgccttttctacagttaggccaattttgaaatatataaattctatgcaacatttatgttgagttaccaatggaagccaaaagttctcttcccaaactgccaagaatgatacaggccataattgaaatgggaataccttttaagtttcattaggggtggggtgggagtgggacaggaacaagacttgcctagatctttgttgtatcttggggacttttactttgttgtttgatgcttaaacttcaaaattctctgtattcaaatttgattgtggcgaatctacttcaaaaaggaaaaataatccaactttgtggatattaaatggaaggtttgctgttttgatctagttgtttccagtggagcagttttatgaaatatgttctataagatgtacattttttcattgtaacatagaaattgtaaataattgattaaagtgctgcattttgatgaattttttctagccatttttaaagagaaaactaggaattgagtattttgtgtacggtatgtttccatcctccctccccttcctcctcccctcctctctctctcttcctacctatttaattttcatttgtcatgaggtttttggatttgccaatgatctgctggacatcatgccccatgtcatagagaataaagctgatgattgtaccagtcttaaattattcatgattcaataaaattgatgcttatttattcagattagtggtttggcttgtctgtgctagagcaagtcctcataggagttttatttcatgctaagagcaagtcagtcttatctggatgcagcaaatgcagggaaaaccccaaacctttgcaaacccatcttggctagtatgccatcaatatcccacatcttctcagtttctcaggtcttcttgccactcctgtggagcttgttagaactgtagaatttcagatcctctcagactttatgaatcaccagggatctagtggatcctcaatttctaacaaactcctaggcaataccagtgctctagtgcctggaccacacattgagtggcaagcaacatcagtgtccagccagccccctaagtcgatcccttggcatgaaaaggatttttttttaatgtattgagtacctactaatttccaaatgctttcccaaatactcagtataatgcaaaatgatgccagagaggtattcttactcccattttacaagtgg

SEQ ID NO: 8785 - protein, 2429 aa, Homo sapiens; identical to SEQ ID NO: 1266

SEQ ID NO: 8786 - DNA, 7869 bp, Homo sapiens
taaggcccggcgcctgctctgctacccgcgctgcctttagcggtcgcccccgccgccgctgccagggacgtgctgggaaagcccaagccccgggagaagatgccggccatcctggtcgcctccaaaatgaagtcgggactgcccaaacccgtgcacagcgccgcgcccatcctgcacgtgcccccggcccgggcgggcccccagccctgctacctgaagttgggaagcaaggtggaggtgagcaagaccacctatcctagccagatccccctgaaatcgcaggtgctgcaggggctgcaggagccagcgggggaggggctcccgctgcggaagagcggctcggtggaaaacgggttcgatacccagatctacacagactgggccaatcattacctagccaaatccggccacaagcgtctcatcagggatctccagcaagatgtgacagatggcgtcctcctggcccagattatccaggttgtggcaaatgaaaagattgaagacatcaatggctgtccgaagaacagatcccaaatgattgaaaacatagatgcctgcttgaatttcctggcagctaagggaataaacatccaggggctgtctgcagaagagatcaggaatggaaacctcaaggccattctaggcctcttcttcagcctctcccgatacaagcagcagcagcagcagccccagaagcagcacctctcctcacctctgccgcccgccgtatcccaggtggccggggccccctcccagtgccaggctggcacccctcagcagcaggtgccagtcactccccaagccccgtgccagcctcaccagccagcgccacatcagcagtcaaaagcacaagctgaaatgcagtccagtgcatcatccaaggactcatctcaaagcaaaatcatccgcttcactctgggtcagaaaaagatctctagacttccaggtcctaccgcgagggtatccgctgcaggcagcgaggccaaaacacgcggagggtcaactactgctaacaaccgacgcagccagagctttaacaactatgataaatccaaaccagtcacctccccacccccaccgccaagcagccacgagaaagagcctttggcaagttcagcctcctcccaccccggaatgagtgacaatgcacctgcttccttggagagcggcagcagctccacccctactaattgcagtacctcctcggccatcccgcagcccggtgcagccaccaagccttggcgcagcaaatccctcagcgtgaagcacagtgccacggtatccatgctctcggtcaagcctcctgggcctgaggcccccaggcccacacctgaagccatgaagccggcccccaacaatcagaagtccatgctggaaaagctgaaacttttcaacagtaaagggggctcaaaggcaggtgaggggccggggtcccgggacacaagctgtgagcggctggagactctgcccagcttcgaagagagcgaggagctggaggccgccagtcgcatgctcaccaccgtgggccctgcttccagcagccccaagattgcactcaagggcattgcccagaggacttttagccgggcactgaccaacaagaagagttctctgaaaggcaatgagaaagagaaggagaaacaacagcgggagaaggataaggagaaaagcaaggaccttgccaagagagcctctgtgacggagaggctggacctcaaggaggagccaaaagaagaccccagtggagcagctgtgcccgagatgccaaaaaagtcctccaagattgccagcttcatccccaaaggggggaagctcaacagtgccaagaaggagcccatggccccttcccacagtggaataccaaaaccaggaatgaaaagcatgcccgggaaatccccaagtgccccagcgccttccaaggaaggggagcggagccggagtgggaagctgagctcaggactcccccagcagaagccccagctggacggcagacactccagttcctcttccagcctggcgtcctcagaaggaaaaggcccaggagggaccaccctgaaccacagcatcagcagccagactgtcagtgggtctgtcgggaccacccagaccacaggaagcaataccgtcagtgttcagctacctcagccccagcagcaatacaaccatcccaacactgccacggttgcacctttcctgtacaggtctcagacggacactgaagggaatgttactgccgagtcaagctcaacaggtgtgagcgtggagcccagccacttcaccaagactggacagcctgctctggaagaactcactggggaagatcctgaggctcggcggctgcggacagtgaagaacatcgctgatctgcggcagaatttggaggaaaccatgtccagtttaaggggaactcaggttacacacagcacattggaaaccacgtttgacaccaatgtcaccacggagatgagtggccgtagcatactcagcttgacagggaggcccacacctctgtcctggagactgggccagtccagccctcggctccaagcaggagacgccccctcaatgggcaatgggtatccccctcgagccaacgccagcaggttcatcaacactgagtcaggtcgctatgtgtactccgcccctctgagaaggcagctggcctcccggggcagtagtgtctgccatgtggacgtctcagacaaggcaggagatgagatggacctggaaggcatcagcatggatgcccccggctacatgagcgacggggatgttctgagcaagaacatccggaccgatgacattacaagcggatacatgactgatggtggacttggcctctatacccgtcgcctgaaccggctccctgatgggatggctgtggtacgggagaccctgcaacgaaatacctccctgggcctcggagacgctgacagctgggacgacagcagctccgtcagcagcggcatcagcgacaccatagacaacctcagcactgatgacatcaacaccagctcctccatcagctcttatgccaacacacctgcctcctctcgaaaaaacctggatgtgcagactgatgctgagaagcactcacaggtggagaggaattccctgtggtctggtgatgatgtcaagaaatcagacggaggctcagacagcggcataaaaatggagccaggttccaagtggaggcggaatccttctgatgtgtctgacgagtccgacaaaagcacgtcgggcaagaagaatcctgtcatctcccagacaggctcatggcggcgaggcatgacagctcaggtgggcatcaccatgccaaggacgaagccttcagccccggcaggcgcactgaagaccccaggaactggaaaaacagacgacgcaaaggtgtctgagaaaggaaggctttctcctaaagcctcccaggtgaagcgctccccatcagatgcaggccggagcagtggtgacgaatccaaaaagcccctccccagcagctctaggacacctactgccaatgccaacagctttgggttcaagaagcagagtggttccgccgccggcctggccatgatcacagccagcggggtgactgtcaccagcaggtcagccacactgggcaaaatcccaaagtcatctgcactcgtcagtcggtctgctggtcggaagtcaagtatggatggggctcagaatcaggatgacgggtatctagccctaagctcccggacaaaccttcagtaccggagtttgccgaggcccagtaagtccaacagccggaacggggctgggaacaggtctagcaccagcagcatagattccaacattagcagcaagtccgcaggcctgccagtgcccaaactgagggagccttccaaaacagccctaggcagctctctaccaggtctggtcaaccaaacagacaaggagaaaggcatctcatcagacaacgagagtgtggcttcctgtaactcggtgaaagtgaatccggcagcccagcctgtgtccagtccggctcagaccagtctccagcctggagccaagtacccagatgtggcctctcccacactccgcagactctttggtgggaagcctaccaagcaagtgcccatcgccacagctgaaaacatgaaaaattcggtggtcatctccaatcctcatgccaccatgactcagcaaggtaacctagactccccgtcaggcagtggcgtcctgagcagtgggagcagcagtcctctctacagcaagaatgtggacctcaaccagtctccgctagcctccagccccagctcagcccactcggccccttccaacagcctcacctggggcaccaacgccagcagctcctccgcagttagcaaggatggcctgggctttcagtctgtcagcagcctccacaccagctgtgagtccatcgacatctccctcagcagtggaggggtccccagccacaattcttccactggcctcatcgcctcctccaaggacgactccttgactccctttgtcagaactaacagtgtgaagaccacactgtcagaaagccctctctcttcccctgctgctagccctaagttctgcagaagtactctgcccaggaaacaggacagtgacccgcaccttgataggaacactttgcctaagaaaggactcaggtatactcccacctcccagcttcgcacgcaagaagatgcaaaagaatggttacggtcccattctgcaggaggccttcaggacaccgctgccaattcccccttttcctctggctccagcgtgacttctccctccggaacaagattcaacttttcccagcttgcgagtcccaccactgtcacccagatgagcttgtccaacccgaccatgctgaggactcacagcctctccaatgctgatgggcagtatgatccatacactgacagccgcttccggaatagctccatgtccctggatgagaagagcagaaccatgagccgttcaggctcattccgggatgggtttgaagaagaatcatgggagaaaagttctgtggacaactttgtcagccgtcttcacagctcacttcatttctctcttcctttgttccatcacgcaaggtatgagttagttcatggatcctcactctccttggtttccagcacatcgtcagtttattctacaccagaagaaaaatgccagtcagagattcgcaagctgcggcgggaactggatgcctcccaggagaaagtttcagctttgaccacccagctgacagcaaatgctcaccttgtggcagcctttgaacagagtcttggtaacatgacaatcaggctccagagtctgaccatgacagctgagcagaaggactcagaactgaatgagttaagaaaaaccattgagctgctaaagaaacagaacgcagctgcccaggctgccattaatggagtaattaacacacctgagctcaactgcaaaggaaacggcactgcccagtctgcagacctccgcatccgcaggcagcactcctcagacagcgtctccagcatcaacagtgccaccagccactccagcgtgggcagcaacatagagagtgactcaaagaagaagaagcggaagaactggttacgcagctccttcaagcaagctttcgggaagaagaagtccccaaaatctgcgtcctctcattcagatattgaggagatgacggattcttctttgccttcctcaccaaagttaccgcacaatgggtccacaggttccaccccactgctgaggaattctcactccaactctctaatttcagaatgcatggatagtgaagctgagaccgtcatgcagctccgaaatgagttaagagacaaggagatgaagctgacggatatccgcttagaagctctcagttctgcccaccagctggaccagctccgggaggccatgaacaggatgcagagtgaaatagagaagctgaaagctgagaatgatcggctgaagtcagagtctcaaggcagtggctgcagccgggctccttcccaagtgtccatctctgcctccccgaggcagtccatgggcctctcccagcacagcttgaacctcactgagtcaaccagcctggacatgttgctggatgacactggtgaatgctcggctcggaaggaaggaggcaggcatgttaagatagttgtcagctttcaggaggaaatgaagtggaaggaggattccagaccacatctctttcttattggctgcattggagttagtggcaagacgaagtgggatgtgctcgatggggtggttagacggctgttcaaagaatacatcattcatgtcgacccagtgagtcagctagggctgaattcagacagcgttcttggctacagcattggagaaatcaagcgcagcaacacttccgaaacaccggagctgcttccttgtggctatctggttggagagaacacgaccatctcagtgactgtgaaagggctcgcagaaaacagcctggactcactggtgtttgagtccttgattcccaagcccatcctgcagcgctacgtctccctcctgatagagcaccgtcggatcattctctctggccccagcggcactgggaaaacctacctggccaaccggctgtctgagtatatagtgcttcgagagggacgggagttgacagacggggttatcgccacctttaacgtggaccataagtccagcaaggaattgcgccagtacctgtccaaccttgctgaccagtgcaacagtgagaacaatgctgtggacatgcccctcgtcatcatcctggacaacctacaccacgtgagctctctgggagagatcttcaatgggctgctcaactgcaagtaccacaaatgcccttacataattggcacaatgaaccaggctacctcttcgactcccaacctgcagcttcaccataacttcagatgggtgctttgtgccaaccacacggagcctgtgaagggtttccttggccgattcctgaggaggaagctcatggaaacagagatcagtgggcgggtgcgcaatatggagctggtaaaaatcattgactggattcccaaggtctggcatcacctcaaccgcttcctggaggctcacagttcctcggacgtcaccatcggcccccggctcttcctgtcatgccccatcgatgtggacggctcgagagtgtggttcaccgacttgtggaactattccattatcccctatctcctggaagccgtcagagaaggactccagctctatggaaggcgcgccccctgggaggatcctgccaagtgggtgatggacacatatccatgggcagccagcccacaacagcacgagtggcctcccctgctgcagttacggcctgaggatgtcggcttcgacggctactccatgcctcgggagggatcgacaagcaagcagatgccccccagtgatgctgaaggtgacccgctgatgaacatgctgatgaggctgcaggaggcagccaactactccagcccccagagctatgacagcgactccaacagcaacagccatcacgatgacatcttggactcctctttggagtccactctgtgacaggggcccggagcccagcgccctcctcttctcctcaccgcattccacctgcatcccccacatcaccctgaagatgacttcctgagccagcccccagccacagccttagagctgcgggaacaccgagaccccccgtccttcagcctcgacctgggtgcaggcatcccgggccagctgcctgcggaccgcttccttccacagcgagaactgcactaccttctgttgtactttaattattgttttgccttgttgctgtgacctccctaagacactgaagatacttctcgggaaaggatcatcgccgttgaaatg

SEQ ID NO: 8787 - protein, 2485 aa, Homo sapiens; identical to SEQ ID NO: 8779

SEQ ID NO: 8788 - DNA, 7678 bp, Homo sapiens
acccgcgctgcctttagcggtcgcccccgccgccgctgccagggacgtgctgggaaagcccaagccccgggagaagatgccggccatcctggtcgcctccaaaatgaagtcgggactgcccaaacccgtgcacagcgccgcgcccatcctgcacgtgcccccggcccgggcgggcccccagccctgctacctgaagttgggaagcaaggtggaggtgagcaagaccacctatcctagccagatccccctgaaatcgcaggtgctgcaggggctgcaggagccagcgggggaggggctcccgctgcggaagagcggctcggtggaaaacgggttcgatacccagatctacacagactgggccaatcattacctagccaaatccggccacaagcgtctcatcagggatctccagcaagatgtgacagatggcgtcctcctggcccagattatccaggttgtggcaaatgaaaagattgaagacatcaatggctgtccgaagaacagatcccaaatgattgaaaacatagatgcctgcttgaatttcctggcagctaagggaataaacatccaggggctgtctgcagaagagatcaggaatggaaacctcaaggccattctaggcctcttcttcagcctctcccgatacaagcagcagcagcagcagccccagaagcagcacctctcctcacctctgccgcccgccgtatcccaggtggccggggccccctcccagtgccaggctggcacccctcagcagcaggtgccagtcactccccaagccccgtgccagcctcaccagccagcgccacatcagcagtcaaaagcacaagctgaaatgcagtccagacttccaggtcctaccgcgagggtatccgctgcaggcagcgaggccaaaacacgcggagggtcaactactgctaacaaccgacgcagccagagctttaacaactatgataaatccaaaccagtcacctccccacccccaccgccaagcagccacgagaaagagcctttggcaagttcagcctcctcccaccccggaatgagtgacaatgcacctgcttccttggagagcggcagcagctccacccctactaattgcagtacctcctcggccatcccgcagcccggtgcagccaccaagccttggcgcagcaaatccctcagcgtgaagcacagtgccacggtatccatgctctcggtcaagcctcctgggcctgaggcccccaggcccacacctgaagccatgaagccggcccccaacaatcagaagtccatgctggaaaagctgaaacttttcaacagtaaagggggctcaaaggcaggtgaggggccggggtcccgggacacaagctgtgagcggctggagactctgcccagcttcgaagagagcgaggagctggaggccgccagtcgcatgctcaccaccgtgggccctgcttccagcagccccaagattgcactcaagggcattgcccagaggacttttagccgggcactgaccaacaagaagagttctctgaaaggcaatgagaaagagaaggagaaacaacagcgggagaaggataaggagaaaagcaaggaccttgccaagagagcctctgtgacggagaggctggacctcaaggaggagccaaaagaagaccccagtggagcagctgtgcccgagatgccaaaaaagtcctccaagattgccagcttcatccccaaaggggggaagctcaacagtgccaagaaggagcccatggccccttcccacagtggaataccaaaaccaggaatgaaaagcatgcccgggaaatccccaagtgccccagcgccttccaaggaaggggagcggagccggagtgggaagctgagctcaggactcccccagcagaagccccagctggacggcagacactccagttcctcttccagcctggcgtcctcagaaggaaaaggcccaggagggaccaccctgaaccacagcatcagcagccagactgtcagtgggtctgtcgggaccacccagaccacaggaagcaataccgtcagtgttcagctacctcagccccagcagcaatacaaccatcccaacactgccacggttgcacctttcctgtacaggtctcagacggacactgaagggaatgttactgccgagtcaagctcaacaggtgtgagcgtggagcccagccacttcaccaagactggacagcctgctctggaagaactcactggggaagatcctgaggctcggcggctgcggacagtgaagaacatcgctgatctgcggcagaatttggaggaaaccatgtccagtttaaggggaactcaggttacacacagcacattggaaaccacgtttgacaccaatgtcaccacggagatgagtggccgtagcatactcagcttgacagggaggcccacacctctgtcctggagactgggccagtccagccctcggctccaagcaggagacgccccctcaatgggcaatgggtatccccctcgagccaacgccagcaggttcatcaacactgagtcaggtcgctatgtgtactccgcccctctgagaaggcagctggcctcccggggcagtagtgtctgccatgtggacgtctcagacaaggcaggagatgagatggacctggaaggcatcagcatggatgcccccggctacatgagcgacggggatgttctgagcaagaacatccggaccgatgacattacaagcggatacatgactgatggtggacttggcctctatacccgtcgcctgaaccggctccctgatgggatggctgtggtacgggagaccctgcaacgaaatacctccctgggcctcggagacgctgacagctgggacgacagcagctccgtcagcagcggcatcagcgacaccatagacaacctcagcactgatgacatcaacaccagctcctccatcagctcttatgccaacacacctgcctcctctcgaaaaaacctggatgtgcagactgatgctgagaagcactcacaggtggagaggaattccctgtggtctggtgatgatgtcaagaaatcagacggaggctcagacagcggcataaaaatggagccaggttccaagtggaggcggaatccttctgatgtgtctgacgagtccgacaaaagcacgtcgggcaagaagaatcctgtcatctcccagacaggctcatggcggcgaggcatgacagctcaggtgggcatcaccatgccaaggacgaagccttcagccccggcaggcgcactgaagaccccaggaactggaaaaacagacgacgcaaaggtgtctgagaaaggaaggctttctcctaaagcctcccaggtgaagcgctccccatcagatgcaggccggagcagtggtgacgaatccaaaaagcccctccccagcagctctaggacacctactgccaatgccaacagctttgggttcaagaagcagagtggttccgccgccggcctggccatgatcacagccagcggggtgactgtcaccagcaggtcagccacactgggcaaaatcccaaagtcatctgcactcgtcagtcggtctgctggtcggaagtcaagtatggatggggctcagaatcaggatgacgggtatctagccctaagctcccggacaaaccttcagtaccggagtttgccgaggcccagtaagtccaacagccggaacggggctgggaacaggtctagcaccagcagcatagattccaacattagcagcaagtccgcaggcctgccagtgcccaaactgagggagccttccaaaacagccctaggcagctctctaccaggtctggtcaaccaaacagacaaggagaaaggcatctcatcagacaacgagagtgtggcttcctgtaactcggtgaaagtgaatccggcagcccagcctgtgtccagtccggctcagaccagtctccagcctggagccaagtacccagatgtggcctctcccacactccgcagactctttggtgggaagcctaccaagcaagtgcccatcgccacagctgaaaacatgaaaaattcggtggtcatctccaatcctcatgccaccatgactcagcaaggtaacctagactccccgtcaggcagtggcgtcctgagcagtgggagcagcagtcctctctacagcaagaatgtggacctcaaccagtctccgctagcctccagccccagctcagcccactcggccccttccaacagcctcacctggggcaccaacgccagcagctcctccgcagttagcaaggatggcctgggctttcagtctgtcagcagcctccacaccagctgtgagtccatcgacatctccctcagcagtggaggggtccccagccacaattcttccactggcctcatcgcctcctccaaggacgactccttgactccctttgtcagaactaacagtgtgaagaccacactgtcagaaagccctctctcttcccctgctgctagccctaagttctgcagaagtactctgcccaggaaacaggacagtgacccgcaccttgataggaacactttgcctaagaaaggactcaggtatactcccacctcccagcttcgcacgcaagaagatgcaaaagaatggttacggtcccattctgcaggaggccttcaggacaccgctgccaattcccccttttcctctggctccagcgtgacttctccctccggaacaagattcaacttttcccagcttgcgagtcccaccactgtcacccagatgagcttgtccaacccgaccatgctgaggactcacagcctctccaatgctgatgggcagtatgatccatacactgacagccgcttccggaatagctccatgtccctggatgagaagagcagaaccatgagccgttcaggctcattccgggatgggtttgaagaagttcatggatcctcactctccttggtttccagcacatcgtcagtttattctacaccagaagaaaaatgccagtcagagattcgcaagctgcggcgggaactggatgcctcccaggagaaagtttcagctttgaccacccagctgacagcaaatgctcaccttgtggcagcctttgaacagagtcttggtaacatgacaatcaggctccagagtctgaccatgacagctgagcagaaggactcagaactgaatgagttaagaaaaaccattgagctgctaaagaaacagaacgcagctgcccaggctgccattaatggagtaattaacacacctgagctcaactgcaaaggaaacggcactgcccagtctgcagacctccgcatccgcaggcagcactcctcagacagcgtctccagcatcaacagtgccaccagccactccagcgtgggcagcaacatagagagtgactcaaagaagaagaagcggaagaactggttacgcagctccttcaagcaagctttcgggaagaagaagtccccaaaatctgcgtcctctcattcagatattgaggagatgacggattcttctttgccttcctcaccaaagttaccgcacaatgggtccacaggttccaccccactgctgaggaattctcactccaactctctaatttcagaatgcatggatagtgaagctgagaccgtcatgcagctccgaaatgagttaagagacaaggagatgaagctgacggatatccgcttagaagctctcagttctgcccaccagctggaccagctccgggaggccatgaacaggatgcagagtgaaatagagaagctgaaagctgagaatgatcggctgaagtcagagtctcaaggcagtggctgcagccgggctccttcccaagtgtccatctctgcctccccgaggcagtccatgggcctctcccagcacagcttgaacctcactgagtcaaccagcctggacatgttgctggatgacactggtgaatgctcggctcggaaggaaggaggcaggcatgttaagatagttgtcagctttcaggaggaaatgaagtggaaggaggattccagaccacatctctttcttattggctgcattggagttagtggcaagacgaagtgggatgtgctcgatggggtggttagacggctgttcaaagaatacatcattcatgtcgacccagtgagtcagctagggctgaattcagacagcgttcttggctacagcattggagaaatcaagcgcagcaacacttccgaaacaccggagctgcttccttgtggctatctggttggagagaacacgaccatctcagtgactgtgaaagggctcgcagaaaacagcctggactcactggtgtttgagtccttgattcccaagcccatcctgcagcgctacgtctccctcctgatagagcaccgtcggatcattctctctggccccagcggcactgggaaaacctacctggccaaccggctgtctgagtatatagtgcttcgagagggacgggagttgacagacggggttatcgccacctttaacgtggaccataagtccagcaaggaattgcgccagtacctgtccaaccttgctgaccagtgcaacagtgagaacaatgctgtggacatgcccctcgtcatcatcctggacaacctacaccacgtgagctctctgggagagatcttcaatgggctgctcaactgcaagtaccacaaatgcccttacataattggcacaatgaaccaggctacctcttcgactcccaacctgcagcttcaccataacttcagatgggtgctttgtgccaaccacacggagcctgtgaagggtttccttggccgattcctgaggaggaagctcatggaaacagagatcagtgggcgggtgcgcaatatggagctggtaaaaatcattgactggattcccaaggtctggcatcacctcaaccgcttcctggaggctcacagttcctcggacgtcaccatcggcccccggctcttcctgtcatgccccatcgatgtggacggctcgagagtgtggttcaccgacttgtggaactattccattatcccctatctcctggaagccgtcagagaaggactccagctctatggaaggcgcgccccctgggaggatcctgccaagtgggtgatggacacatatccatgggcagccagcccacaacagcacgagtggcctcccctgctgcagttacggcctgaggatgtcggcttcgacggctactccatgcctcgggagggatcgacaagcaagcagatgccccccagtgatgctgaaggtgacccgctgatgaacatgctgatgaggctgcaggaggcagccaactactccagcccccagagctatgacagcgactccaacagcaacagccatcacgatgacatcttggactcctctttggagtccactctgtgacaggggcccggagcccagcgccctcctcttctcctcaccgcattccacctgcatcccccacatcaccctgaagatgacttcctgagccagcccccagccacagccttagagctgcgggaacaccgagaccccccgtccttcagcctcgacctgggtgcaggcatcccgggccagctgcctgcggaccgcttccttccacagcgagaactgcactaccttctgttgtactttaattattgttttgccttgttgctgtgacctccctaagacactgaagatacttctcgggaaaggatcatcgccgttgaaatg

SEQ ID NO: 8789 - protein, 2429 aa, Homo sapiens; identical to SEQ ID NO: 1266

SEQ ID NO: 8790 - DNA, 2280 bp, Homo sapiens
aacagtaaagggggctcaaaggcaggtgaggggccggggtcccgggacacaagctgtgagcggctggagactctgcccagcttcgaagagagcgaggagctggaggccgccagtcgcatgctcaccaccgtgggccctgcttccagcagccccaagattgcactcaagggcattgcccagaggacttttagccgggcactgaccaacaagaagagttctctgaaaggcaatgagaaagagaaggagaaacaacagcgggagaaggataaggagaaaagcaaggaccttgccaagagagcctctgtgacggagaggctggacctcaaggaggagccaaaagaagaccccagtggagcagctgtgcccgagatgccaaaaaagtcctccaagattgccagcttcatccccaaaggggggaagctcaacagtgccaagaaggagcccatggccccttcccacagtggaataccaaaaccaggaatgaaaagcatgcccgggaaatccccaagtgccccagcgccttccaaggaaggggagcggagccggagtgggaagctgagctcaggactcccccagcagaagccccagctggacggcagacactccagttcctcttccagcctggcgtcctcagaaggaaaaggcccaggagggaccaccctgaaccacagcatcagcagccagactgtcagtgggtctgtcgggaccacccagaccacaggaagcaataccgtcagtgttcagctacctcagccccagcagcaatacaaccatcccaacactgccacggttgcacctttcctgtacaggtctcagacggacactgaagggaatgttactgccgagtcaagctcaacaggtgtgagcgtggagcccagccacttcaccaagactggacagcctgctctggaagaactcactggggaagatcctgaggctcggcggctgcggacagtgaagaacatcgctgatctgcggcagaatttggaggaaaccatgtccagtttaaggggaactcaggttacacacagcacattggaaaccacgtttgacaccaatgtcaccacggagatgagtggccgtagcatactcagcttgacagggaggcccacacctctgtcctggagactgggccagtccagccctcggctccaagcaggagacgccccctcaatgggcaatgggtatccccctcgagccaacgccagcaggttcatcaacactgagtcaggtcgctatgtgtactccgcccctctgagaaggcagctggcctcccggggcagtagtgtctgccatgtggacgtctcagacaaggcaggagatgagatggacctggaaggcatcagcatggatgcccccggctacatgagcgacggggatgttctgagcaagaacatccggaccgatgacattacaagcggatacatgactgatggtggacttggcctctatacccgtcgcctgaaccggctccctgatgggatggctgtggtacgggagaccctgcaacgaaatacctccctgggcctcggagacgctgacagctgggacgacagcagctccgtcagcagcggcatcagcgacaccatagacaacctcagcactgatgacatcaacaccagctcctccatcagctcttatgccaacacacctgcctcctctcgaaaaaacctggatgtgcagactgatgctgagaagcactcacaggtggagaggaattccctgtggtctggtgatgatgtcaagaaatcagacggaggctcagacagcggcataaaaatggagccaggttccaagtggaggcggaatccttctgatgtgtctgacgagtccgacaaaagcacgtcgggcaagaagaatcctgtcatctcccagacaggctcatggcggcgaggcatgacagctcaggtgggcatcaccatgccaaggacgaagccttcagccccggcaggcgcactgaagaccccaggaactggaaaaacagacgacgcaaaggtgtctgagaaaggaaggctttctcctaaagcctcccaggtgaagcgctccccatcagatgcaggccggagcagtggtgacgaatccaaaaagcccctccccagcagctctaggacacctactgccaatgccaacagctttgggttcaagaagcagagtggttccgccgccggcctggccatgatcacagccagcggggtgactgtcaccagcaggtcagccacactgggcaaaatcccaaagtcatctgcactcgtcataccggagtttgccgaggcccagtaa

SEQ ID NO: 8791 - protein, 720 aa, Homo sapiens
MLTTVGPASSSPKIALKGIAQRTFSRALTNKKSSLKGNEKEKEKQQREKDKEKSKDLAKRASVTERLDLKEEPKEDPSGAAVPEMPKKSSKIASFIPKGGKLNSAKKEPMAPSHSGIPKPGMKSMPGKSPSAPAPSKEGERSRSGKLSSGLPQQKPQLDGRHSSSSSSLASSEGKGPGGTTLNHSISSQTVSGSVGTTQTTGSNTVSVQLPQPQQQYNHPNTATVAPFLYRSQTDTEGNVTAESSSTGVSVEPSHFTKTGQPALEELTGEDPEARRLRTVKNIADLRQNLEETMSSLRGTQVTHSTLETTFDTNVTTEMSGRSILSLTGRPTPLSWRLGQSSPRLQAGDAPSMGNGYPPRANASRFINTESGRYVYSAPLRRQLASRGSSVCHVDVSDKAGDEMDLEGISMDAPGYMSDGDVLSKNIRTDDITSGYMTDGGLGLYTRRLNRLPDGMAVVRETLQRNTSLGLGDADSWDDSSSVSSGISDTIDNLSTDDINTSSSISSYANTPASSRKNLDVQTDAEKHSQVERNSLWSGDDVKKSDGGSDSGIKMEPGSKWRRNPSDVSDESDKSTSGKKNPVISQTGSWRRGMTAQVGITMPRTKPSAPAGALKTPGTGKTDDAKVSEKGRLSPKASQVKRSPSDAGRSSGDESKKPLPSSSRTPTANANSFGFKKQSGSAAGLAMITASGVTVTSRSATLGKIPKSSALVIPEFAEAQ

SEQ ID NO: 8792 - DNA, 5051 bp, Homo sapiens
aatcttttcaatcgaatgctttgccttcagacgtcaatggaatgagctaagaaatgttatagtcaatgatttttgcatcattaaaagtagcacttagggctggaaagactttctgcaatgtttctgtgcagtctgtgaggatttaaagtagtttttcattcttagattttcttcaatttgacccgctgttgcaaactcccctgggaccacatggagggcccttccattcagtgctttacgggccgcaatgtagtgaaatgctctggcctaggaaccttacaagctgggacgacagcagctccgtcagcagcggcatcagcgacaccatagacaacctcagcactgatgacatcaacaccagctcctccatcagctcttatgccaacacacctgcctcctctcgaaaaaacctggatgtgcagactgatgctgagaagcactcacaggtggagaggaattccctgtggtctggtgatgatgtcaagaaatcagacggaggctcagacagcggcataaaaatggagccaggttccaagtggaggcggaatccttctgatgtgtctgacgagtccgacaaaagcacgtcgggcaagaagaatcctgtcatctcccagacaggctcatggcggcgaggcatgacagctcaggtgggcatcaccatgccaaggacgaagccttcagccccggcaggcgcactgaagaccccaggaactggaaaaacagacgacgcaaaggtgtctgagaaaggaaggctttctcctaaagcctcccaggtgaagcgctccccatcagatgcaggccggagcagtggtgacgaatccaaaaagcccctccccagcagctctaggacacctactgccaatgccaacagctttgggttcaagaagcagagtggttccgccgccggcctggccatgatcacagccagcggggtgactgtcaccagcaggtcagccacactgggcaaaatcccaaagtcatctgcactcgtcagtcggtctgctggtcggaagtcaagtatggatggggctcagaatcaggatgacgggtatctagccctaagctcccggacaaaccttcagtaccggagtttgccgaggcccagtaagtccaacagccggaacggggctgggaacaggtctagcaccagcagcatagattccaacattagcagcaagtccgcaggcctgccagtgcccaaactgagggagccttccaaaacagccctaggcagctctctaccaggtctggtcaaccaaacagacaaggagaaaggcatctcatcagacaacgagagtgtggcttcctgtaactcggtgaaagtgaatccggcagcccagcctgtgtccagtccggctcagaccagtctccagcctggagccaagtacccagatgtggcctctcccacactccgcagactctttggtgggaagcctaccaagcaagtgcccatcgccacagctgaaaacatgaaaaattcggtggtcatctccaatcctcatgccaccatgactcagcaaggtaacctagactccccgtcaggcagtggcgtcctgagcagtgggagcagcagtcctctctacagcaagaatgtggacctcaaccagtctccgctagcctccagccccagctcagcccactcggccccttccaacagcctcacctggggcaccaacgccagcagctcctccgcagttagcaaggatggcctgggctttcagtctgtcagcagcctccacaccagctgtgagtccatcgacatctccctcagcagtggaggggtccccagccacaattcttccactggcctcatcgcctcctccaaggacgactccttgactccctttgtcagaactaacagtgtgaagaccacactgtcagaaagtgacccgcaccttgataggaacactttgcctaagaaaggactcaggtatactcccacctcccagcttcgcacgcaagaagatgcaaaagaatggttacggtcccattctgcaggaggccttcaggacaccgctgccaattcccccttttcctctggctccagcgtgacttctccctccggaacaagattcaacttttcccagcttgcgagtcccaccactgtcacccagatgagcttgtccaacccgaccatgctgaggactcacagcctctccaatgctgatgggcagtatgatccatacactgacagccgcttccggaatagctccatgtccctggatgagaagagcagaaccatgagccgttcaggctcattccgggatgggtttgaagaagttcatggatcctcactctccttggtttccagcacatcgtcagtttattctacaccagaagaaaaatgccagtcagagattcgcaagctgcggcgggaactggatgcctcccaggagaaagtttcagctttgaccacccagctgacagcaaatgctcaccttgtggcagcctttgaacagagtcttggtaacatgacaatcaggctccagagtctgaccatgacagctgagcagaaggactcagaactgaatgagttaagaaaaaccattgagctgctaaagaaacagaacgcagctgcccaggctgccattaatggagtaattaacacacctgagctcaactgcaaaggaaacggcactgcccagtctgcagacctccgcatccgcaggcagcactcctcagacagcgtctccagcatcaacagtgccaccagccactccagcgtgggcagcaacatagagagtgactcaaagaagaagaagcggaagaactggttacgcagctccttcaagcaagctttcgggaagaagaagtccccaaaatctgcgtcctctcattcagatattgaggagatgacggattcttctttgccttcctcaccaaagttaccgcacaatgggtccacaggttccaccccactgctgaggaattctcactccaactctctaatttcagaatgcatggatagtgaagctgagaccgtcatgcagctccgaaatgagttaagagacaaggagatgaagctgacggatatccgcttagaagctctcagttctgcccaccagctggaccagctccgggaggccatgaacaggatgcagagtgaaatagagaagctgaaagctgagaatgatcggctgaagtcagagtctcaaggcagtggctgcagccgggctccttcccaagtgtccatctctgcctccccgaggcagtccatgggcctctcccagcacagcttgaacctcactgagtcaaccagcctggacatgttgctggatgacactggtgaatgctcggctcggaaggaaggaggcaggcatgttaagatagttgtcagctttcaggaggaaatgaagtggaaggaggattccagaccacatctctttcttattggctgcattggagttagtggcaagacgaagtgggatgtgctcgatggggtggttagacggctgttcaaagaatacatcattcatgtcgacccagtgagtcagctagggctgaattcagacagcgttcttggctacagcattggagaaatcaagcgcagcaacacttccgaaacaccggagctgcttccttgtggctatctggttggagagaacacgaccatctcagtgactgtgaaagggctcgcagaaaacagcctggactcactggtgtttgagtccttgattcccaagcccatcctgcagcgctacgtctccctcctgatagagcaccgtcggatcattctctctggccccagcggcactgggaaaacctacctggccaaccggctgtctgagtatatagtgcttcgagagggacgggagttgacagacggggttatcgccacctttaacgtggaccataagtccagcaaggaattgcgccagtacctgtccaaccttgctgaccagtgcaacagtgagaacaatgctgtggacatgcccctcgtcatcatcctggacaacctacaccacgtgagctctctgggagagatcttcaatgggctgctcaactgcaagtaccacaaatgcccttacataattggcacaatgaaccaggctacctcttcgactcccaacctgcagcttcaccataacttcagatgggtgctttgtgccaaccacacggagcctgtgaagggtttccttggccgattcctgaggaggaagctcatggaaacagagatcagtgggcgggtgcgcaatatggagctggtaaaaatcattgactggattcccaaggtctggcatcacctcaaccgcttcctggaggctcacagttcctcggacgtcaccatcggcccccggctcttcctgtcatgccccatcgatgtggacggctcgagagtgtggttcaccgacttgtggaactattccattatcccctatctcctggaagccgtcagagaaggactccagctctatggaaggcgcgccccctgggaggatcctgccaagtgggtgatggacacatatccatgggcagccagcccacaacagcacgagtggcctcccctgctgcagttacggcctgaggatgtcggcttcgacggctactccatgcctcgggagggatcgacaagcaagcagatgccccccagtgatgctgaaggtgacccgctgatgaacatgctgatgaggctgcaggaggcagccaactactccagcccccagagctatgacagcgactccaacagcaacagccatcacgatgacatcttggactcctctttggagtccactctgtgacaggggcccggagcccagcgccctcctcttctcctcaccgcattccacctgcatcccccacatcaccctgaagatgacttcctgagccagcccccagccacagccttagagctgcgggaacaccgagaccccccgtccttcagcctcgacctgggtgcaggcatcccgggccagctgcctgcggaccgcttccttccacagcgagaactgcactaccttctgttgtactttaattattgttttgccttgttgctgtgacctccctaagacactgaagatacttctcgggaaaggatcatcgccgttgaaatg

SEQ ID NO: 8793 - protein, 1493 aa, Homo sapiens
MLWPRNLTSWDDSSSVSSGISDTIDNLSTDDINTSSSISSYANTPASSRKNLDVQTDAEKHSQVERNSLWSGDDVKKSDGGSDSGIKMEPGSKWRRNPSDVSDESDKSTSGKKNPVISQTGSWRRGMTAQVGITMPRTKPSAPAGALKTPGTGKTDDAKVSEKGRLSPKASQVKRSPSDAGRSSGDESKKPLPSSSRTPTANANSFGFKKQSGSAAGLAMITASGVTVTSRSATLGKIPKSSALVSRSAGRKSSMDGAQNQDDGYLALSSRTNLQYRSLPRPSKSNSRNGAGNRSSTSSIDSNISSKSAGLPVPKLREPSKTALGSSLPGLVNQTDKEKGISSDNESVASCNSVKVNPAAQPVSSPAQTSLQPGAKYPDVASPTLRRLFGGKPTKQVPIATAENMKNSVVISNPHATMTQQGNLDSPSGSGVLSSGSSSPLYSKNVDLNQSPLASSPSSAHSAPSNSLTWGTNASSSSAVSKDGLGFQSVSSLHTSCESIDISLSSGGVPSHNSSTGLIASSKDDSLTPFVRTNSVKTTLSESDPHLDRNTLPKKGLRYTPTSQLRTQEDAKEWLRSHSAGGLQDTAANSPFSSGSSVTSPSGTRFNFSQLASPTTVTQMSLSNPTMLRTHSLSNADGQYDPYTDSRFRNSSMSLDEKSRTMSRSGSFRDGFEEVHGSSLSLVSSTSSVYSTPEEKCQSEIRKLRRELDASQEKVSALTTQLTANAHLVAAFEQSLGNMTIRLQSLTMTAEQKDSELNELRKTIELLKKQNAAAQAAINGVINTPELNCKGNGTAQSADLRIRRQHSSDSVSSINSATSHSSVGSNIESDSKKKKRKNWLRSSFKQAFGKKKSPKSASSHSDIEEMTDSSLPSSPKLPHNGSTGSTPLLRNSHSNSLISECMDSEAETVMQLRNELRDKEMKLTDIRLEALSSAHQLDQLREAMNRMQSEIEKLKAENDRLKSESQGSGCSRAPSQVSISASPRQSMGLSQHSLNLTESTSLDMLLDDTGECSARKEGGRHVKIVVSFQEEMKWKEDSRPHLFLIGCIGVSGKTKWDVLDGVVRRLFKEYIIHVDPVSQLGLNSDSVLGYSIGEIKRSNTSETPELLPCGYLVGENTTISVTVKGLAENSLDSLVFESLIPKPILQRYVSLLIEHRRIILSGPSGTGKTYLANRLSEYIVLREGRELTDGVIATFNVDHKSSKELRQYLSNLADQCNSENNAVDMPLVIILDNLHHVSSLGEIFNGLLNCKYHKCPYIIGTMNQATSSTPNLQLHHNFRWVLCANHTEPVKGFLGRFLRRKLMETEISGRVRNMELVKIIDWIPKVWHHLNRFLEAHSSSDVTIGPRLFLSCPIDVDGSRVWFTDLWNYSIIPYLLEAVREGLQLYGRRAPWEDPAKWVMDTYPWAASPQQHEWPPLLQLRPEDVGFDGYSMPREGSTSKQMPPSDAEGDPLMNMLMRLQEAANYSSPQSYDSDSNSNSHHDDILDSSLESTL

SEQ ID NO: 8794 - DNA, 8081 bp, Homo sapiens
aatcttttcaatcgaatgctttgccttcagacgtcaatggaatgagctaagaaatgttatagtcaatgatttttgcatcattaaaagtagcacttagggctggaaagactttctgcaatgtttctgtgcagtctgtgaggatttaaagtagtttttcattcttagattttcttcaatttgacccgctgttgcaaactcccctgggaccacatggagggcccttccattcagtgctttacgggccgcaatgtagtgaaatgctctggcctaggaaccttacaagctgggacgacagcagctccgtcagcagcggcatcagcgacaccatagacaacctcagcactgatgacatcaacaccagctcctccatcagctcttatgccaacacacctgcctcctctcgaaaaaacctggatgtgcagactgatgctgagaagcactcacaggtggagaggaattccctgtggtctggtgatgatgtcaagaaatcagacggaggctcagacagcggcataaaaatggagccaggttccaagtggaggcggaatccttctgatgtgtctgacgagtccgacaaaagcacgtcgggcaagaagaatcctgtcatctcccagacaggctcatggcggcgaggcatgacagctcaggtgggcatcaccatgccaaggacgaagccttcagccccggcaggcgcactgaagaccccaggaactggaaaaacagacgacgcaaaggtgtctgagaaaggaaggctttctcctaaagcctcccaggtgaagcgctccccatcagatgcaggccggagcagtggtgacgaatccaaaaagcccctccccagcagctctaggacacctactgccaatgccaacagctttgggttcaagaagcagagtggttccgccgccggcctggccatgatcacagccagcggggtgactgtcaccagcaggtcagccacactgggcaaaatcccaaagtcatctgcactcgtcagtcggtctgctggtcggaagtcaagtatggatggggctcagaatcaggatgacgggtatctagccctaagctcccggacaaaccttcagtaccggagtttgccgaggcccagtaagtccaacagccggaacggggctgggaacaggtctagcaccagcagcatagattccaacattagcagcaagtccgcaggcctgccagtgcccaaactgagggagccttccaaaacagccctaggcagctctctaccaggtctggtcaaccaaacagacaaggagaaaggcatctcatcagacaacgagagtgtggcttcctgtaactcggtgaaagtgaatccggcagcccagcctgtgtccagtccggctcagaccagtctccagcctggagccaagtacccagatgtggcctctcccacactccgcagactctttggtgggaagcctaccaagcaagtgcccatcgccacagctgaaaacatgaaaaattcggtggtcatctccaatcctcatgccaccatgactcagcaaggtaacctagactccccgtcaggcagtggcgtcctgagcagtgggagcagcagtcctctctacagcaagaatgtggacctcaaccagtctccgctagcctccagccccagctcagcccactcggccccttccaacagcctcacctggggcaccaacgccagcagctcctccgcagttagcaaggatggcctgggctttcagtctgtcagcagcctccacaccagctgtgagtccatcgacatctccctcagcagtggaggggtccccagccacaattcttccactggcctcatcgcctcctccaaggacgactccttgactccctttgtcagaactaacagtgtgaagaccacactgtcagaaagtgacccgcaccttgataggaacactttgcctaagaaaggactcaggtatactcccacctcccagcttcgcacgcaagaagatgcaaaagaatggttacggtcccattctgcaggaggccttcaggacaccgctgccaattcccccttttcctctggctccagcgtgacttctccctccggaacaagattcaacttttcccagcttgcgagtcccaccactgtcacccagatgagcttgtccaacccgaccatgctgaggactcacagcctctccaatgctgatgggcagtatgatccatacactgacagccgcttccggaatagctccatgtccctggatgagaagagcagaaccatgagccgttcaggctcattccgggatgggtttgaagaagttcatggatcctcactctccttggtttccagcacatcgtcagtttattctacaccagaagaaaaatgccagtcagagattcgcaagctgcggcgggaactggatgcctcccaggagaaagtttcagctttgaccacccagctgacagcaaatgctcaccttgtggcagcctttgaacagagtcttggtaacatgacaatcaggctccagagtctgaccatgacagctgagcagaaggactcagaactgaatgagttaagaaaaaccattgagctgctaaagaaacagaacgcagctgcccaggctgccattaatggagtaattaacacacctgagctcaactgcaaaggaaacggcactgcccagtctgcagacctccgcatccgcaggcagcactcctcagacagcgtctccagcatcaacagtgccaccagccactccagcgtgggcagcaacatagagagtgactcaaagaagaagaagcggaagaactggttacgcagctccttcaagcaagctttcgggaagaagaagtccccaaaatctgcgtcctctcattcagatattgaggagatgacggattcttctttgccttcctcaccaaagttaccgcacaatgggtccacaggttccaccccactgctgaggaattctcactccaactctctaatttcagaatgcatggatagtgaagctgagaccgtcatgcagctccgaaatgagttaagagacaaggagatgaagctgacggatatccgcttagaagctctcagttctgcccaccagctggaccagctccgggaggccatgaacaggatgcagagtgaaatagagaagctgaaagctgagaatgatcggctgaagtcagagtctcaaggcagtggctgcagccgggctccttcccaagtgtccatctctgcctccccgaggcagtccatgggcctctcccagcacagcttgaacctcactgagtcaaccagcctggacatgttgctggatgacactggtgaatgctcggctcggaaggaaggaggcaggcatgttaagatagttgtcagctttcaggaggaaatgaagtggaaggaggattccagaccacatctctttcttattggctgcattggagttagtggcaagacgaagtgggatgtgctcgatggggtggttagacggctgttcaaagaatacatcattcatgtcgacccagtgagtcagctagggctgaattcagacagcgttcttggctacagcattggagaaatcaagcgcagcaacacttccgaaacaccggagctgcttccttgtggctatctggttggagagaacacgaccatctcagtgactgtgaaagggctcgcagaaaacagcctggactcactggtgtttgagtccttgattcccaagcccatcctgcagcgctacgtctccctcctgatagagcaccgtcggatcattctctctggccccagcggcactgggaaaacctacctggccaaccggctgtctgagtatatagtgcttcgagagggacgggagttgacagacggggttatcgccacctttaacgtggaccataagtccagcaaggaattgcgccagtacctgtccaaccttgctgaccagtgcaacagtgagaacaatgctgtggacatgcccctcgtcatcatcctggacaacctacaccacgtgagctctctgggagagatcttcaatgggctgctcaactgcaagtaccacaaatgcccttacataattggcacaatgaaccaggctacctcttcgactcccaacctgcagcttcaccataacttcagatgggtgctttgtgccaaccacacggagcctgtgaagggtttccttggccgattcctgaggaggaagctcatggaaacagagatcagtgggcgggtgcgcaatatggagctggtaaaaatcattgactggattcccaaggtctggcatcacctcaaccgcttcctggaggctcacagttcctcggacgtcaccatcggcccccggctcttcctgtcatgccccatcgatgtggacggctcgagagtgtggttcaccgacttgtggaactattccattatcccctatctcctggaagccgtcagagaaggactccagctctatggaaggcgcgccccctgggaggatcctgccaagtgggtgatggacacatatccatgggcagccagcccacaacagcacgagtggcctcccctgctgcagttacggcctgaggatgtcggcttcgacggctactccatgcctcgggagggatcgacaagcaagcagatgccccccagtgatgctgaaggtgacccgctgatgaacatgctgatgaggctgcaggaggcagccaactactccagcccccagagctatgacagcgactccaacagcaacagccatcacgatgacatcttggactcctctttggagtccactctgtgacaggggcccggagcccagcgccctcctcttctcctcaccgcattccacctgcatcccccacatcaccctgaagatgacttcctgagccagcccccagccacagccttagagctgcgggaacaccgagaccccccgtccttcagcctcgacctgggtgcaggcatcccgggccagctgcctgcggaccgcttccttccacagcgagaactgcactaccttctgttgtactttaattattgttttgccttgttgctgtgacctccctaagacactgaagatacttctcgggaaaggatcatcgccgttgaaatgaaaagagagacagagagaaaaaaaaaaagagaacccacatgaagctctgaaaccaaacagcatcctgccatgagcttcccagagacagaagagactggagcaaagtcggaaacacagagaagcacggcttcccctcagcacagaccctccagactgggtctcagagccgtgccacccaccctcccacacagccggccacagggagaactggtgctaaccagggtgcttgctttggtcacgttcaacgcactacagagctacgacacagggaaaccttaggagcaaataaaccgtgctttcatgttttttaaatggtgctttccttacccgagaggtattttgcctgttccaatcaaaccaccccattcaggtccatcagcctctgattaatatccgtgagagtgagtgacggagtgagagtgtgagcgagtggatgtggctgtcagtgcagaacagcatgtgtctctttccttctgatatatgaatgaatcaggtttttttttttttttttctgcaaacactgtgtatagtgagacttgttctactttggagaacaggttaccttttgaaaatgaggttgagtttcttcctttctgatgcattgatttttgaagatttttttttcccccttcccctcttggtcagaatcaatcctttggtgaaagtaagaaccgcaggagttgagttttggtttggtcctgctcagttttggtttttagttgtccatcctcacagtcctacacactcgcctcctcctgctagggctgggggtatctgtgtcctttaaaatggatgaggacctggtcctcgacatgtgggtgagccatggaccttgccttcccttctcgtccttgagggtttagaacacacaccaacacctccagcgtccccgccccagcttccggtggggtgatgcggtcaccctgcaaaagacttgcactttcctcagaaccaacatgacgcagctcaataagggtgagggtcactccctcccagaagccccgtctggacgagccttgcctgacctcttcggtgctgaccttcccaaagtgatgccttactggttttgtactaactgtgttcattttacataagtgtcgtgcctgcctggggtttgttttttttgtcattgttttccccattgaaacaaacagggctaaaaagtcatctgttcattaggagaactcaagttgctgtgacttttctcatccaaaagactcatttgtgtggatgcgtgaccatgggaaaaagaaaaaaaaaaagatccattttttaggttcttttcggtctccagctgacaacccaactggacaatgatctgtctggtgcaggagaaggcaaaagtttctacaagtctacatgaccttgctgatacttgttctaatagaaacccagtctgctgtgtcttcaacatactggtattttcattacaaagtatggtaaatttttgagttgtttgtttctgttttgtaaagagaatccttattggacaccagtgaaggtgtctctgttttaatgatcagggtttttattccatcttttgcatttcttctatttctgaaggtttgtctcttggcatctttttttagtttcttaccataagagtttgacccgaaactgctcacttcacattggatgacaccatgttcttcctctttgaaaagaaaaggggaatgtgtcccactagtgaaaggaaaacttttcaacactatccctgctttagtctcagcaaactcagactattctgcttagccttcattagtcatctgggtgtgagtgtgtcttgttctgtttttctttttaataaaacttttaaaccatatatttagcctgtgaccaggggggccaaaccctaagatttctggtaaacctgaagggtggccctcctcagacaatttatctcccagcaatgaccctactacactcgcgtactgtgaatttgggaggaggtaaagttgacttctcctcgtgggcagttttccaatcaccttgtgagtagacacctgccaatattgtttgaaacctttttttaatatgacatcctctcttgtcattctcttctcccctttcccacagacttccctcctgggtccaggttcagaaccaagacttctgtacctagtgctgcctgattggtgaacattgacttcaagtagcatagcccttgtgtgactcacaactccgtgtccttcctaaagtttcgggaagcagggttgtctaatatgcacatttcttattttggtcatatttttactttagtgtcactcaccttttacaaagtgactttgtactcatttagggctctatcggaaatgcttccattttgccttttctacagttaggccaattttgaaatatataaattctatgcaacatttatgttgagttaccaatggaagccaaaagttctcttcccaaactgccaagaatgatacaggccataattgaaatgggaataccttttaagtttcattaggggtggggtgggagtgggacaggaacaagacttgcctagatctttgttgtatcttggggacttttactttgttgtttgatgcttaaacttcaaaattctctgtattcaaatttgattgtggcgaatctacttcaaaaaggaaaaataatccaactttgtggatattaaatggaaggtttgctgttttgatctagttgtttccagtggagcagttttatgaaatatgttctataagatgtacattttttcattgtaacatagaaattgtaaataattgattaaagtgctgcattttgatgaattttttctagccatttttaaagagaaaactaggaattgagtattttgtgtacggtatgtttccatcctccctccccttcctcctcccctcctctctctctcttcctacctatttaattttcatttgtcatgaggtttttggatttgccaatgatctgctggacatcatgccccatgtcatagagaataaagctgatgattgtaccagtcttaaattattcatgattcaataaaattgatgcttatttattcag

SEQ ID NO: 8795 - protein, 1493 aa, Homo sapiens; identical to SEQ ID NO: 8793

SEQ ID NO: 8796 - DNA, 8569 bp, Homo sapiens
aatcttttcaatcgaatgctttgccttcagacgtcaatggaatgagctaagaaatgttatagtcaatgatttttgcatcattaaaagtagcacttagggctggaaagactttctgcaatgtttctgtgcagtctgtgaggatttaaagtagtttttcattcttagattttcttcaatttgacccgctgttgcaaactcccctgggaccacatggagggcccttccattcagtgctttacgggccgcaatgtagtgaaatgctctggcctaggaaccttacaagctgggacgacagcagctccgtcagcagcggcatcagcgacaccatagacaacctcagcactgatgacatcaacaccagctcctccatcagctcttatgccaacacacctgcctcctctcgaaaaaacctggatgtgcagactgatgctgagaagcactcacaggtggagaggaattccctgtggtctggtgatgatgtcaagaaatcagacggaggctcagacagcggcataaaaatggagccaggttccaagtggaggcggaatccttctgatgtgtctgacgagtccgacaaaagcacgtcgggcaagaagaatcctgtcatctcccagacaggctcatggcggcgaggcatgacagctcaggtgggcatcaccatgccaaggacgaagccttcagccccggcaggcgcactgaagaccccaggaactggaaaaacagacgacgcaaaggtgtctgagaaaggaaggctttctcctaaagcctcccaggtgaagcgctccccatcagatgcaggccggagcagtggtgacgaatccaaaaagcccctccccagcagctctaggacacctactgccaatgccaacagctttgggttcaagaagcagagtggttccgccgccggcctggccatgatcacagccagcggggtgactgtcaccagcaggtcagccacactgggcaaaatcccaaagtcatctgcactcgtcagtcggtctgctggtcggaagtcaagtatggatggggctcagaatcaggatgacgggtatctagccctaagctcccggacaaaccttcagtaccggagtttgccgaggcccagtaagtccaacagccggaacggggctgggaacaggtctagcaccagcagcatagattccaacattagcagcaagtccgcaggcctgccagtgcccaaactgagggagccttccaaaacagccctaggcagctctctaccaggtctggtcaaccaaacagacaaggagaaaggcatctcatcagacaacgagagtgtggcttcctgtaactcggtgaaagtgaatccggcagcccagcctgtgtccagtccggctcagaccagtctccagcctggagccaagtacccagatgtggcctctcccacactccgcagactctttggtgggaagcctaccaagcaagtgcccatcgccacagctgaaaacatgaaaaattcggtggtcatctccaatcctcatgccaccatgactcagcaaggtaacctagactccccgtcaggcagtggcgtcctgagcagtgggagcagcagtcctctctacagcaagaatgtggacctcaaccagtctccgctagcctccagccccagctcagcccactcggccccttccaacagcctcacctggggcaccaacgccagcagctcctccgcagttagcaaggatggcctgggctttcagtctgtcagcagcctccacaccagctgtgagtccatcgacatctccctcagcagtggaggggtccccagccacaattcttccactggcctcatcgcctcctccaaggacgactccttgactccctttgtcagaactaacagtgtgaagaccacactgtcagaaagtgacccgcaccttgataggaacactttgcctaagaaaggactcaggtatactcccacctcccagcttcgcacgcaagaagatgcaaaagaatggttacggtcccattctgcaggaggccttcaggacaccgctgccaattcccccttttcctctggctccagcgtgacttctccctccggaacaagattcaacttttcccagcttgcgagtcccaccactgtcacccagatgagcttgtccaacccgaccatgctgaggactcacagcctctccaatgctgatgggcagtatgatccatacactgacagccgcttccggaatagctccatgtccctggatgagaagagcagaaccatgagccgttcaggctcattccgggatgggtttgaagaagttcatggatcctcactctccttggtttccagcacatcgtcagtttattctacaccagaagaaaaatgccagtcagagattcgcaagctgcggcgggaactggatgcctcccaggagaaagtttcagctttgaccacccagctgacagcaaatgctcaccttgtggcagcctttgaacagagtcttggtaacatgacaatcaggctccagagtctgaccatgacagctgagcagaaggactcagaactgaatgagttaagaaaaaccattgagctgctaaagaaacagaacgcagctgcccaggctgccattaatggagtaattaacacacctgagctcaactgcaaaggaaacggcactgcccagtctgcagacctccgcatccgcaggcagcactcctcagacagcgtctccagcatcaacagtgccaccagccactccagcgtgggcagcaacatagagagtgactcaaagaagaagaagcggaagaactggttacgcagctccttcaagcaagctttcgggaagaagaagtccccaaaatctgcgtcctctcattcagatattgaggagatgacggattcttctttgccttcctcaccaaagttaccgcacaatgggtccacaggttccaccccactgctgaggaattctcactccaactctctaatttcagaatgcatggatagtgaagctgagaccgtcatgcagctccgaaatgagttaagagacaaggagatgaagctgacggatatccgcttagaagctctcagttctgcccaccagctggaccagctccgggaggccatgaacaggatgcagagtgaaatagagaagctgaaagctgagaatgatcggctgaagtcagagtctcaaggcagtggctgcagccgggctccttcccaagtgtccatctctgcctccccgaggcagtccatgggcctctcccagcacagcttgaacctcactgagtcaaccagcctggacatgttgctggatgacactggtgaatgctcggctcggaaggaaggaggcaggcatgttaagatagttgtcagctttcaggaggaaatgaagtggaaggaggattccagaccacatctctttcttattggctgcattggagttagtggcaagacgaagtgggatgtgctcgatggggtggttagacggctgttcaaagaatacatcattcatgtcgacccagtgagtcagctagggctgaattcagacagcgttcttggctacagcattggagaaatcaagcgcagcaacacttccgaaacaccggagctgcttccttgtggctatctggttggagagaacacgaccatctcagtgactgtgaaagggctcgcagaaaacagcctggactcactggtgtttgagtccttgattcccaagcccatcctgcagcgctacgtctccctcctgatagagcaccgtcggatcattctctctggccccagcggcactgggaaaacctacctggccaaccggctgtctgagtatatagtgcttcgagagggacgggagttgacagacggggttatcgccacctttaacgtggaccataagtccagcaaggaattgcgccagtacctgtccaaccttgctgaccagtgcaacagtgagaacaatgctgtggacatgcccctcgtcatcatcctggacaacctacaccacgtgagctctctgggagagatcttcaatgggctgctcaactgcaagtaccacaaatgcccttacataattggcacaatgaaccaggctacctcttcgactcccaacctgcagcttcaccataacttcagatgggtgctttgtgccaaccacacggagcctgtgaagggtttccttggccgattcctgaggaggaagctcatggaaacagagatcagtgggcgggtgcgcaatatggagctggtaaaaatcattgactggattcccaaggtctggcatcacctcaaccgcttcctggaggctcacagttcctcggacgtcaccatcggcccccggctcttcctgtcatgccccatcgatgtggacggctcgagagtgtggttcaccgacttgtggaactattccattatcccctatctcctggaagccgtcagagaaggactccagctctatggaaggcgcgccccctgggaggatcctgccaagtgggtgatggacacatatccatgggcagccagcccacaacagcacgagtggcctcccctgctgcagttacggcctgaggatgtcggcttcgacggctactccatgcctcgggagggatcgacaagcaagcagatgccccccagtgatgctgaaggtgacccgctgatgaacatgctgatgaggctgcaggaggcagccaactactccagcccccagagctatgacagcgactccaacagcaacagccatcacgatgacatcttggactcctctttggagtccactctgtgacaggggcccggagcccagcgccctcctcttctcctcaccgcattccacctgcatcccccacatcaccctgaagatgacttcctgagccagcccccagccacagccttagagctgcgggaacaccgagaccccccgtccttcagcctcgacctgggtgcaggcatcccgggccagctgcctgcggaccgcttccttccacagcgagaactgcactaccttctgttgtactttaattattgttttgccttgttgctgtgacctccctaagacactgaagatacttctcgggaaaggatcatcgccgttgaaatgaaaagagagacagagagaaaaaaaaaaagagaacccacatgaagctctgaaaccaaacagcatcctgccatgagcttcccagagacagaagagactggagcaaagtcggaaacacagagaagcacggcttcccctcagcacagaccctccagactgggtctcagagccgtgccacccaccctcccacacagccggccacagggagaactggtgctaaccagggtgcttgctttggtcacgttcaacgcactacagagctacgacacagggaaaccttaggagcaaataaaccgtgctttcatgttttttaaatggtgctttccttacccgagaggtattttgcctgttccaatcaaaccaccccattcaggtccatcagcctctgattaatatccgtgagagtgagtgacggagtgagagtgtgagcgagtggatgtggctgtcagtgcagaacagcatgtgtctctttccttctgatatatgaatgaatcaggtttttttttttttttttctgcaaacactgtgtatagtgagacttgttctactttggagaacaggttaccttttgaaaatgaggttgagtttcttcctttctgatgcattgatttttgaagatttttttttcccccttcccctcttggtcagaatcaatcctttggtgaaagtaagaaccgcaggagttgagttttggtttggtcctgctcagttttggtttttagttgtccatcctcacagtcctacacactcgcctcctcctgctagggctgggggtatctgtgtcctttaaaatggatgaggacctggtcctcgacatgtgggtgagccatggaccttgccttcccttctcgtccttgagggtttagaacacacaccaacacctccagcgtccccgccccagcttccggtggggtgatgcggtcaccctgcaaaagacttgcactttcctcagaaccaacatgacgcagctcaataagggtgagggtcactccctcccagaagccccgtctggacgagccttgcctgacctcttcggtgctgaccttcccaaagtgatgccttactggttttgtactaactgtgttcattttacataagtgtcgtgcctgcctggggtttgttttttttgtcattgttttccccattgaaacaaacagggctaaaaagtcatctgttcattaggagaactcaagttgctgtgacttttctcatccaaaagactcatttgtgtggatgcgtgaccatgggaaaaagaaaaaaaaaaagatccattttttaggttcttttcggtctccagctgacaacccaactggacaatgatctgtctggtgcaggagaaggcaaaagtttctacaagtctacatgaccttgctgatacttgttctaatagaaacccagtctgctgtgtcttcaacatactggtattttcattacaaagtatggtaaatttttgagttgtttgtttctgttttgtaaagagaatccttattggacaccagtgaaggtgtctctgttttaatgatcagggtttttattccatcttttgcatttcttctatttctgaaggtttgtctcttggcatctttttttagtttcttaccataagagtttgacccgaaactgctcacttcacattggatgacaccatgttcttcctctttgaaaagaaaaggggaatgtgtcccactagtgaaaggaaaacttttcaacactatccctgctttagtctcagcaaactcagactattctgcttagccttcattagtcatctgggtgtgagtgtgtcttgttctgtttttctttttaataaaacttttaaaccatatatttagcctgtgaccaggggggccaaaccctaagatttctggtaaacctgaagggtggccctcctcagacaatttatctcccagcaatgaccctactacactcgcgtactgtgaatttgggaggaggtaaagttgacttctcctcgtgggcagttttccaatcaccttgtgagtagacacctgccaatattgtttgaaacctttttttaatatgacatcctctcttgtcattctcttctcccctttcccacagacttccctcctgggtccaggttcagaaccaagacttctgtacctagtgctgcctgattggtgaacattgacttcaagtagcatagcccttgtgtgactcacaactccgtgtccttcctaaagtttcgggaagcagggttgtctaatatgcacatttcttattttggtcatatttttactttagtgtcactcaccttttacaaagtgactttgtactcatttagggctctatcggaaatgcttccattttgccttttctacagttaggccaattttgaaatatataaattctatgcaacatttatgttgagttaccaatggaagccaaaagttctcttcccaaactgccaagaatgatacaggccataattgaaatgggaataccttttaagtttcattaggggtggggtgggagtgggacaggaacaagacttgcctagatctttgttgtatcttggggacttttactttgttgtttgatgcttaaacttcaaaattctctgtattcaaatttgattgtggcgaatctacttcaaaaaggaaaaataatccaactttgtggatattaaatggaaggtttgctgttttgatctagttgtttccagtggagcagttttatgaaatatgttctataagatgtacattttttcattgtaacatagaaattgtaaataattgattaaagtgctgcattttgatgaattttttctagccatttttaaagagaaaactaggaattgagtattttgtgtacggtatgtttccatcctccctccccttcctcctcccctcctctctctctcttcctacctatttaattttcatttgtcatgaggtttttggatttgccaatgatctgctggacatcatgccccatgtcatagagaataaagctgatgattgtaccagtcttaaattattcatgattcaataaaattgatgcttatttattcagattagtggtttggcttgtctgtgctagagcaagtcctcataggagttttatttcatgctaagagcaagtcagtcttatctggatgcagcaaatgcagggaaaaccccaaacctttgcaaacccatcttggctagtatgccatcaatatcccacatcttctcagtttctcaggtcttcttgccactcctgtggagcttgttagaactgtagaatttcagatcctctcagactttatgaatcaccagggatctagtggatcctcaatttctaacaaactcctaggcaataccagtgctctagtgcctggaccacacattgagtggcaagcaacatcagtgtccagccagccccctaagtcgatcccttggcatgaaaaggatttttttttaatgtattgagtacctactaatttccaaatgctttcccaaatactcagtataatgcaaaatgatgccagagaggtattcttactcccattttacaagtgg

SEQ ID NO: 8797 - protein, 1493 aa, Homo sapiens; identical to SEQ ID NO: 8793

SEQ ID NO: 8798 - DNA, 1382 bp, Homo sapiens
ttttcacagctgacttgataccagcactgaggcctgacctctcgatccttcagcacttcagaggttaattttgttgggggatcggatttctttcctggcctggggaatggtgatccctgctagctagtcctttagttacagagttgctgggtgcctgggattccctggcccagtgtgggctggctcagctggctaaaggacttgccatcctgtgagattcattcagcttctttgtccgctgttctccaagggccgcaatgtagtgaaatgctctggcctaggaaccttacaagctgggacgacagcagctccgtcagcagcggcatcagcgacaccatagacaacctcagcactgatgacatcaacaccagctcctccatcagctcttatgccaacacacctgcctcctctcgaaaaaacctggatgtgcagactgatgctgagaagcactcacaggtggagaggaattccctgtggtctggtgatgatgtcaagaaatcagacggaggctcagacagcggcataaaaatggagccaggttccaagtggaggcggaatccttctgatgtgtctgacgagtccgacaaaagcacgtcgggcaagaagaatcctgtcatctcccagacaggctcatggcggcgaggcatgacagctcaggtgggcatcaccatgccaaggacgaagccttcagccccggcaggcgcactgaagaccccaggaactggaaaaacagacgacgcaaaggtgtctgagaaaggaaggctttctcctaaagcctcccaggtgaagcgctccccatcagatgcaggccggagcagtggtgacgaatccaaaaagcccctccccagcagctctaggacacctactgccaatgccaacagctttgggttcaagaagcagagtggttccgccgccggcctggccatgatcacagccagcggggtgactgtcaccagcaggtcagccacactgggcaaaatcccaaagtcatctgcactcgtcagtcggtctgctggtcggaagtcaagtatggatggggctcagaatcaggatgacgggtatctagccctaagctcccggacaaaccttcagtaccggagtttgccgaggcccagtaagtccaacagccggaacggggctgggaacaggtctagcaccagcagcatagattccaacattagcagcaagtccgcaggcctgccagtgcccaaactgagggagccttccaaaacagccctaggcagctctctaccaggtctggtcaaccaaacagacaaggagaaaggcatctcatcagacaacgagagtgtggcttcctgtaactcggtgaaagtgaatccggcagcccagcctgtgtccagtccggctcagaccagtctcca

SEQ ID NO: 8799 - protein, 370 aa, Homo sapiens
MLWPRNLTSWDDSSSVSSGISDTIDNLSTDDINTSSSISSYANTPASSRKNLDVQTDAEKHSQVERNSLWSGDDVKKSDGGSDSGIKMEPGSKWRRNPSDVSDESDKSTSGKKNPVISQTGSWRRGMTAQVGITMPRTKPSAPAGALKTPGTGKTDDAKVSEKGRLSPKASQVKRSPSDAGRSSGDESKKPLPSSSRTPTANANSFGFKKQSGSAAGLAMITASGVTVTSRSATLGKIPKSSALVSRSAGRKSSMDGAQNQDDGYLALSSRTNLQYRSLPRPSKSNSRNGAGNRSSTSSIDSNISSKSAGLPVPKLREPSKTALGSSLPGLVNQTDKEKGISSDNESVASCNSVKVNPAAQPVSSPAQTS

SEQ ID NO: 8800 - DNA, 5127 bp, Homo sapiens
ttttcacagctgacttgataccagcactgaggcctgacctctcgatccttcagcacttcagaggttaattttgttgggggatcggatttctttcctggcctggggaatggtgatccctgctagctagtcctttagttacagagttgctgggtgcctgggattccctggcccagtgtgggctggctcagctggctaaaggacttgccatcctgtgagattcattcagcttctttgtccgctgttctccaagggccgcaatgtagtgaaatgctctggcctaggaaccttacaagctgggacgacagcagctccgtcagcagcggcatcagcgacaccatagacaacctcagcactgatgacatcaacaccagctcctccatcagctcttatgccaacacacctgcctcctctcgaaaaaacctggatgtgcagactgatgctgagaagcactcacaggtggagaggaattccctgtggtctggtgatgatgtcaagaaatcagacggaggctcagacagcggcataaaaatggagccaggttccaagtggaggcggaatccttctgatgtgtctgacgagtccgacaaaagcacgtcgggcaagaagaatcctgtcatctcccagacaggctcatggcggcgaggcatgacagctcaggtgggcatcaccatgccaaggacgaagccttcagccccggcaggcgcactgaagaccccaggaactggaaaaacagacgacgcaaaggtgtctgagaaaggaaggctttctcctaaagcctcccaggtgaagcgctccccatcagatgcaggccggagcagtggtgacgaatccaaaaagcccctccccagcagctctaggacacctactgccaatgccaacagctttgggttcaagaagcagagtggttccgccgccggcctggccatgatcacagccagcggggtgactgtcaccagcaggtcagccacactgggcaaaatcccaaagtcatctgcactcgtcagtcggtctgctggtcggaagtcaagtatggatggggctcagaatcaggatgacgggtatctagccctaagctcccggacaaaccttcagtaccggagtttgccgaggcccagtaagtccaacagccggaacggggctgggaacaggtctagcaccagcagcatagattccaacattagcagcaagtccgcaggcctgccagtgcccaaactgagggagccttccaaaacagccctaggcagctctctaccaggtctggtcaaccaaacagacaaggagaaaggcatctcatcagacaacgagagtgtggcttcctgtaactcggtgaaagtgaatccggcagcccagcctgtgtccagtccggctcagaccagtctccagcctggagccaagtacccagatgtggcctctcccacactccgcagactctttggtgggaagcctaccaagcaagtgcccatcgccacagctgaaaacatgaaaaattcggtggtcatctccaatcctcatgccaccatgactcagcaaggtaacctagactccccgtcaggcagtggcgtcctgagcagtgggagcagcagtcctctctacagcaagaatgtggacctcaaccagtctccgctagcctccagccccagctcagcccactcggccccttccaacagcctcacctggggcaccaacgccagcagctcctccgcagttagcaaggatggcctgggctttcagtctgtcagcagcctccacaccagctgtgagtccatcgacatctccctcagcagtggaggggtccccagccacaattcttccactggcctcatcgcctcctccaaggacgactccttgactccctttgtcagaactaacagtgtgaagaccacactgtcagaaagccctctctcttcccctgctgctagccctaagttctgcagaagtactctgcccaggaaacaggacagtgacccgcaccttgataggaacactttgcctaagaaaggactcaggtatactcccacctcccagcttcgcacgcaagaagatgcaaaagaatggttacggtcccattctgcaggaggccttcaggacaccgctgccaattcccccttttcctctggctccagcgtgacttctccctccggaacaagattcaacttttcccagcttgcgagtcccaccactgtcacccagatgagcttgtccaacccgaccatgctgaggactcacagcctctccaatgctgatgggcagtatgatccatacactgacagccgcttccggaatagctccatgtccctggatgagaagagcagaaccatgagccgttcaggctcattccgggatgggtttgaagaagttcatggatcctcactctccttggtttccagcacatcgtcagtttattctacaccagaagaaaaatgccagtcagagattcgcaagctgcggcgggaactggatgcctcccaggagaaagtttcagctttgaccacccagctgacagcaaatgctcaccttgtggcagcctttgaacagagtcttggtaacatgacaatcaggctccagagtctgaccatgacagctgagcagaaggactcagaactgaatgagttaagaaaaaccattgagctgctaaagaaacagaacgcagctgcccaggctgccattaatggagtaattaacacacctgagctcaactgcaaaggaaacggcactgcccagtctgcagacctccgcatccgcaggcagcactcctcagacagcgtctccagcatcaacagtgccaccagccactccagcgtgggcagcaacatagagagtgactcaaagaagaagaagcggaagaactggttacgcagctccttcaagcaagctttcgggaagaagaagtccccaaaatctgcgtcctctcattcagatattgaggagatgacggattcttctttgccttcctcaccaaagttaccgcacaatgggtccacaggttccaccccactgctgaggaattctcactccaactctctaatttcagaatgcatggatagtgaagctgagaccgtcatgcagctccgaaatgagttaagagacaaggagatgaagctgacggatatccgcttagaagctctcagttctgcccaccagctggaccagctccgggaggccatgaacaggatgcagagtgaaatagagaagctgaaagctgagaatgatcggctgaagtcagagtctcaaggcagtggctgcagccgggctccttcccaagtgtccatctctgcctccccgaggcagtccatgggcctctcccagcacagcttgaacctcactgagtcaaccagcctggacatgttgctggatgacactggtgaatgctcggctcggaaggaaggaggcaggcatgttaagatagttgtcagctttcaggaggaaatgaagtggaaggaggattccagaccacatctctttcttattggctgcattggagttagtggcaagacgaagtgggatgtgctcgatggggtggttagacggctgttcaaagaatacatcattcatgtcgacccagtgagtcagctagggctgaattcagacagcgttcttggctacagcattggagaaatcaagcgcagcaacacttccgaaacaccggagctgcttccttgtggctatctggttggagagaacacgaccatctcagtgactgtgaaagggctcgcagaaaacagcctggactcactggtgtttgagtccttgattcccaagcccatcctgcagcgctacgtctccctcctgatagagcaccgtcggatcattctctctggccccagcggcactgggaaaacctacctggccaaccggctgtctgagtatatagtgcttcgagagggacgggagttgacagacggggttatcgccacctttaacgtggaccataagtccagcaaggaattgcgccagtacctgtccaaccttgctgaccagtgcaacagtgagaacaatgctgtggacatgcccctcgtcatcatcctggacaacctacaccacgtgagctctctgggagagatcttcaatgggctgctcaactgcaagtaccacaaatgcccttacataattggcacaatgaaccaggctacctcttcgactcccaacctgcagcttcaccataacttcagatgggtgctttgtgccaaccacacggagcctgtgaagggtttccttggccgattcctgaggaggaagctcatggaaacagagatcagtgggcgggtgcgcaatatggagctggtaaaaatcattgactggattcccaaggtctggcatcacctcaaccgcttcctggaggctcacagttcctcggacgtcaccatcggcccccggctcttcctgtcatgccccatcgatgtggacggctcgagagtgtggttcaccgacttgtggaactattccattatcccctatctcctggaagccgtcagagaaggactccagctctatggaaggcgcgccccctgggaggatcctgccaagtgggtgatggacacatatccatgggcagccagcccacaacagcacgagtggcctcccctgctgcagttacggcctgaggatgtcggcttcgacggctactccatgcctcgggagggatcgacaagcaagcagatgccccccagtgatgctgaaggtgacccgctgatgaacatgctgatgaggctgcaggaggcagccaactactccagcccccagagctatgacagcgactccaacagcaacagccatcacgatgacatcttggactcctctttggagtccactctgtgacaggggcccggagcccagcgccctcctcttctcctcaccgcattccacctgcatcccccacatcaccctgaagatgacttcctgagccagcccccagccacagccttagagctgcgggaacaccgagaccccccgtccttcagcctcgacctgggtgcaggcatcccgggccagctgcctgcggaccgcttccttccacagcgagaactgcactaccttctgttgtactttaattattgttttgccttgttgctgtgacctccctaagacactgaagatacttctcgggaaaggatcatcgccgttgaaatg

SEQ ID NO: 8801 - protein, 1515 aa, Homo sapiens
MLWPRNLTSWDDSSSVSSGISDTIDNLSTDDINTSSSISSYANTPASSRKNLDVQTDAEKHSQVERNSLWSGDDVKKSDGGSDSGIKMEPGSKWRRNPSDVSDESDKSTSGKKNPVISQTGSWRRGMTAQVGITMPRTKPSAPAGALKTPGTGKTDDAKVSEKGRLSPKASQVKRSPSDAGRSSGDESKKPLPSSSRTPTANANSFGFKKQSGSAAGLAMITASGVTVTSRSATLGKIPKSSALVSRSAGRKSSMDGAQNQDDGYLALSSRTNLQYRSLPRPSKSNSRNGAGNRSSTSSIDSNISSKSAGLPVPKLREPSKTALGSSLPGLVNQTDKEKGISSDNESVASCNSVKVNPAAQPVSSPAQTSLQPGAKYPDVASPTLRRLFGGKPTKQVPIATAENMKNSVVISNPHATMTQQGNLDSPSGSGVLSSGSSSPLYSKNVDLNQSPLASSPSSAHSAPSNSLTWGTNASSSSAVSKDGLGFQSVSSLHTSCESIDISLSSGGVPSHNSSTGLIASSKDDSLTPFVRTNSVKTTLSESPLSSPAASPKFCRSTLPRKQDSDPHLDRNTLPKKGLRYTPTSQLRTQEDAKEWLRSHSAGGLQDTAANSPFSSGSSVTSPSGTRFNFSQLASPTTVTQMSLSNPTMLRTHSLSNADGQYDPYTDSRFRNSSMSLDEKSRTMSRSGSFRDGFEEVHGSSLSLVSSTSSVYSTPEEKCQSEIRKLRRELDASQEKVSALTTQLTANAHLVAAFEQSLGNMTIRLQSLTMTAEQKDSELNELRKTIELLKKQNAAAQAAINGVINTPELNCKGNGTAQSADLRIRRQHSSDSVSSINSATSHSSVGSNIESDSKKKKRKNWLRSSFKQAFGKKKSPKSASSHSDIEEMTDSSLPSSPKLPHNGSTGSTPLLRNSHSNSLISECMDSEAETVMQLRNELRDKEMKLTDIRLEALSSAHQLDQLREAMNRMQSEIEKLKAENDRLKSESQGSGCSRAPSQVSISASPRQSMGLSQHSLNLTESTSLDMLLDDTGECSARKEGGRHVKIVVSFQEEMKWKEDSRPHLFLIGCIGVSGKTKWDVLDGVVRRLFKEYIIHVDPVSQLGLNSDSVLGYSIGEIKRSNTSETPELLPCGYLVGENTTISVTVKGLAENSLDSLVFESLIPKPILQRYVSLLIEHRRIILSGPSGTGKTYLANRLSEYIVLREGRELTDGVIATFNVDHKSSKELRQYLSNLADQCNSENNAVDMPLVIILDNLHHVSSLGEIFNGLLNCKYHKCPYIIGTMNQATSSTPNLQLHHNFRWVLCANHTEPVKGFLGRFLRRKLMETEISGRVRNMELVKIIDWIPKVWHHLNRFLEAHSSSDVTIGPRLFLSCPIDVDGSRVWFTDLWNYSIIPYLLEAVREGLQLYGRRAPWEDPAKWVMDTYPWAASPQQHEWPPLLQLRPEDVGFDGYSMPREGSTSKQMPPSDAEGDPLMNMLMRLQEAANYSSPQSYDSDSNSNSHHDDILDSSLESTL

SEQ ID NO: 8802 - DNA, 5061 bp, Homo sapiens
ttttcacagctgacttgataccagcactgaggcctgacctctcgatccttcagcacttcagaggttaattttgttgggggatcggatttctttcctggcctggggaatggtgatccctgctagctagtcctttagttacagagttgctgggtgcctgggattccctggcccagtgtgggctggctcagctggctaaaggacttgccatcctgtgagattcattcagcttctttgtccgctgttctccaagggccgcaatgtagtgaaatgctctggcctaggaaccttacaagctgggacgacagcagctccgtcagcagcggcatcagcgacaccatagacaacctcagcactgatgacatcaacaccagctcctccatcagctcttatgccaacacacctgcctcctctcgaaaaaacctggatgtgcagactgatgctgagaagcactcacaggtggagaggaattccctgtggtctggtgatgatgtcaagaaatcagacggaggctcagacagcggcataaaaatggagccaggttccaagtggaggcggaatccttctgatgtgtctgacgagtccgacaaaagcacgtcgggcaagaagaatcctgtcatctcccagacaggctcatggcggcgaggcatgacagctcaggtgggcatcaccatgccaaggacgaagccttcagccccggcaggcgcactgaagaccccaggaactggaaaaacagacgacgcaaaggtgtctgagaaaggaaggctttctcctaaagcctcccaggtgaagcgctccccatcagatgcaggccggagcagtggtgacgaatccaaaaagcccctccccagcagctctaggacacctactgccaatgccaacagctttgggttcaagaagcagagtggttccgccgccggcctggccatgatcacagccagcggggtgactgtcaccagcaggtcagccacactgggcaaaatcccaaagtcatctgcactcgtcagtcggtctgctggtcggaagtcaagtatggatggggctcagaatcaggatgacgggtatctagccctaagctcccggacaaaccttcagtaccggagtttgccgaggcccagtaagtccaacagccggaacggggctgggaacaggtctagcaccagcagcatagattccaacattagcagcaagtccgcaggcctgccagtgcccaaactgagggagccttccaaaacagccctaggcagctctctaccaggtctggtcaaccaaacagacaaggagaaaggcatctcatcagacaacgagagtgtggcttcctgtaactcggtgaaagtgaatccggcagcccagcctgtgtccagtccggctcagaccagtctccagcctggagccaagtacccagatgtggcctctcccacactccgcagactctttggtgggaagcctaccaagcaagtgcccatcgccacagctgaaaacatgaaaaattcggtggtcatctccaatcctcatgccaccatgactcagcaaggtaacctagactccccgtcaggcagtggcgtcctgagcagtgggagcagcagtcctctctacagcaagaatgtggacctcaaccagtctccgctagcctccagccccagctcagcccactcggccccttccaacagcctcacctggggcaccaacgccagcagctcctccgcagttagcaaggatggcctgggctttcagtctgtcagcagcctccacaccagctgtgagtccatcgacatctccctcagcagtggaggggtccccagccacaattcttccactggcctcatcgcctcctccaaggacgactccttgactccctttgtcagaactaacagtgtgaagaccacactgtcagaaagtgacccgcaccttgataggaacactttgcctaagaaaggactcaggtatactcccacctcccagcttcgcacgcaagaagatgcaaaagaatggttacggtcccattctgcaggaggccttcaggacaccgctgccaattcccccttttcctctggctccagcgtgacttctccctccggaacaagattcaacttttcccagcttgcgagtcccaccactgtcacccagatgagcttgtccaacccgaccatgctgaggactcacagcctctccaatgctgatgggcagtatgatccatacactgacagccgcttccggaatagctccatgtccctggatgagaagagcagaaccatgagccgttcaggctcattccgggatgggtttgaagaagttcatggatcctcactctccttggtttccagcacatcgtcagtttattctacaccagaagaaaaatgccagtcagagattcgcaagctgcggcgggaactggatgcctcccaggagaaagtttcagctttgaccacccagctgacagcaaatgctcaccttgtggcagcctttgaacagagtcttggtaacatgacaatcaggctccagagtctgaccatgacagctgagcagaaggactcagaactgaatgagttaagaaaaaccattgagctgctaaagaaacagaacgcagctgcccaggctgccattaatggagtaattaacacacctgagctcaactgcaaaggaaacggcactgcccagtctgcagacctccgcatccgcaggcagcactcctcagacagcgtctccagcatcaacagtgccaccagccactccagcgtgggcagcaacatagagagtgactcaaagaagaagaagcggaagaactggttacgcagctccttcaagcaagctttcgggaagaagaagtccccaaaatctgcgtcctctcattcagatattgaggagatgacggattcttctttgccttcctcaccaaagttaccgcacaatgggtccacaggttccaccccactgctgaggaattctcactccaactctctaatttcagaatgcatggatagtgaagctgagaccgtcatgcagctccgaaatgagttaagagacaaggagatgaagctgacggatatccgcttagaagctctcagttctgcccaccagctggaccagctccgggaggccatgaacaggatgcagagtgaaatagagaagctgaaagctgagaatgatcggctgaagtcagagtctcaaggcagtggctgcagccgggctccttcccaagtgtccatctctgcctccccgaggcagtccatgggcctctcccagcacagcttgaacctcactgagtcaaccagcctggacatgttgctggatgacactggtgaatgctcggctcggaaggaaggaggcaggcatgttaagatagttgtcagctttcaggaggaaatgaagtggaaggaggattccagaccacatctctttcttattggctgcattggagttagtggcaagacgaagtgggatgtgctcgatggggtggttagacggctgttcaaagaatacatcattcatgtcgacccagtgagtcagctagggctgaattcagacagcgttcttggctacagcattggagaaatcaagcgcagcaacacttccgaaacaccggagctgcttccttgtggctatctggttggagagaacacgaccatctcagtgactgtgaaagggctcgcagaaaacagcctggactcactggtgtttgagtccttgattcccaagcccatcctgcagcgctacgtctccctcctgatagagcaccgtcggatcattctctctggccccagcggcactgggaaaacctacctggccaaccggctgtctgagtatatagtgcttcgagagggacgggagttgacagacggggttatcgccacctttaacgtggaccataagtccagcaaggaattgcgccagtacctgtccaaccttgctgaccagtgcaacagtgagaacaatgctgtggacatgcccctcgtcatcatcctggacaacctacaccacgtgagctctctgggagagatcttcaatgggctgctcaactgcaagtaccacaaatgcccttacataattggcacaatgaaccaggctacctcttcgactcccaacctgcagcttcaccataacttcagatgggtgctttgtgccaaccacacggagcctgtgaagggtttccttggccgattcctgaggaggaagctcatggaaacagagatcagtgggcgggtgcgcaatatggagctggtaaaaatcattgactggattcccaaggtctggcatcacctcaaccgcttcctggaggctcacagttcctcggacgtcaccatcggcccccggctcttcctgtcatgccccatcgatgtggacggctcgagagtgtggttcaccgacttgtggaactattccattatcccctatctcctggaagccgtcagagaaggactccagctctatggaaggcgcgccccctgggaggatcctgccaagtgggtgatggacacatatccatgggcagccagcccacaacagcacgagtggcctcccctgctgcagttacggcctgaggatgtcggcttcgacggctactccatgcctcgggagggatcgacaagcaagcagatgccccccagtgatgctgaaggtgacccgctgatgaacatgctgatgaggctgcaggaggcagccaactactccagcccccagagctatgacagcgactccaacagcaacagccatcacgatgacatcttggactcctctttggagtccactctgtgacaggggcccggagcccagcgccctcctcttctcctcaccgcattccacctgcatcccccacatcaccctgaagatgacttcctgagccagcccccagccacagccttagagctgcgggaacaccgagaccccccgtccttcagcctcgacctgggtgcaggcatcccgggccagctgcctgcggaccgcttccttccacagcgagaactgcactaccttctgttgtactttaattattgttttgccttgttgctgtgacctccctaagacactgaagatacttctcgggaaaggatcatcgccgttgaaatg

SEQ ID NO: 8803 - protein, 1493 aa, Homo sapiens; identical to SEQ ID NO: 8793

SEQ ID NO: 8804 - DNA, 8091 bp, Homo sapiens
ttttcacagctgacttgataccagcactgaggcctgacctctcgatccttcagcacttcagaggttaattttgttgggggatcggatttctttcctggcctggggaatggtgatccctgctagctagtcctttagttacagagttgctgggtgcctgggattccctggcccagtgtgggctggctcagctggctaaaggacttgccatcctgtgagattcattcagcttctttgtccgctgttctccaagggccgcaatgtagtgaaatgctctggcctaggaaccttacaagctgggacgacagcagctccgtcagcagcggcatcagcgacaccatagacaacctcagcactgatgacatcaacaccagctcctccatcagctcttatgccaacacacctgcctcctctcgaaaaaacctggatgtgcagactgatgctgagaagcactcacaggtggagaggaattccctgtggtctggtgatgatgtcaagaaatcagacggaggctcagacagcggcataaaaatggagccaggttccaagtggaggcggaatccttctgatgtgtctgacgagtccgacaaaagcacgtcgggcaagaagaatcctgtcatctcccagacaggctcatggcggcgaggcatgacagctcaggtgggcatcaccatgccaaggacgaagccttcagccccggcaggcgcactgaagaccccaggaactggaaaaacagacgacgcaaaggtgtctgagaaaggaaggctttctcctaaagcctcccaggtgaagcgctccccatcagatgcaggccggagcagtggtgacgaatccaaaaagcccctccccagcagctctaggacacctactgccaatgccaacagctttgggttcaagaagcagagtggttccgccgccggcctggccatgatcacagccagcggggtgactgtcaccagcaggtcagccacactgggcaaaatcccaaagtcatctgcactcgtcagtcggtctgctggtcggaagtcaagtatggatggggctcagaatcaggatgacgggtatctagccctaagctcccggacaaaccttcagtaccggagtttgccgaggcccagtaagtccaacagccggaacggggctgggaacaggtctagcaccagcagcatagattccaacattagcagcaagtccgcaggcctgccagtgcccaaactgagggagccttccaaaacagccctaggcagctctctaccaggtctggtcaaccaaacagacaaggagaaaggcatctcatcagacaacgagagtgtggcttcctgtaactcggtgaaagtgaatccggcagcccagcctgtgtccagtccggctcagaccagtctccagcctggagccaagtacccagatgtggcctctcccacactccgcagactctttggtgggaagcctaccaagcaagtgcccatcgccacagctgaaaacatgaaaaattcggtggtcatctccaatcctcatgccaccatgactcagcaaggtaacctagactccccgtcaggcagtggcgtcctgagcagtgggagcagcagtcctctctacagcaagaatgtggacctcaaccagtctccgctagcctccagccccagctcagcccactcggccccttccaacagcctcacctggggcaccaacgccagcagctcctccgcagttagcaaggatggcctgggctttcagtctgtcagcagcctccacaccagctgtgagtccatcgacatctccctcagcagtggaggggtccccagccacaattcttccactggcctcatcgcctcctccaaggacgactccttgactccctttgtcagaactaacagtgtgaagaccacactgtcagaaagtgacccgcaccttgataggaacactttgcctaagaaaggactcaggtatactcccacctcccagcttcgcacgcaagaagatgcaaaagaatggttacggtcccattctgcaggaggccttcaggacaccgctgccaattcccccttttcctctggctccagcgtgacttctccctccggaacaagattcaacttttcccagcttgcgagtcccaccactgtcacccagatgagcttgtccaacccgaccatgctgaggactcacagcctctccaatgctgatgggcagtatgatccatacactgacagccgcttccggaatagctccatgtccctggatgagaagagcagaaccatgagccgttcaggctcattccgggatgggtttgaagaagttcatggatcctcactctccttggtttccagcacatcgtcagtttattctacaccagaagaaaaatgccagtcagagattcgcaagctgcggcgggaactggatgcctcccaggagaaagtttcagctttgaccacccagctgacagcaaatgctcaccttgtggcagcctttgaacagagtcttggtaacatgacaatcaggctccagagtctgaccatgacagctgagcagaaggactcagaactgaatgagttaagaaaaaccattgagctgctaaagaaacagaacgcagctgcccaggctgccattaatggagtaattaacacacctgagctcaactgcaaaggaaacggcactgcccagtctgcagacctccgcatccgcaggcagcactcctcagacagcgtctccagcatcaacagtgccaccagccactccagcgtgggcagcaacatagagagtgactcaaagaagaagaagcggaagaactggttacgcagctccttcaagcaagctttcgggaagaagaagtccccaaaatctgcgtcctctcattcagatattgaggagatgacggattcttctttgccttcctcaccaaagttaccgcacaatgggtccacaggttccaccccactgctgaggaattctcactccaactctctaatttcagaatgcatggatagtgaagctgagaccgtcatgcagctccgaaatgagttaagagacaaggagatgaagctgacggatatccgcttagaagctctcagttctgcccaccagctggaccagctccgggaggccatgaacaggatgcagagtgaaatagagaagctgaaagctgagaatgatcggctgaagtcagagtctcaaggcagtggctgcagccgggctccttcccaagtgtccatctctgcctccccgaggcagtccatgggcctctcccagcacagcttgaacctcactgagtcaaccagcctggacatgttgctggatgacactggtgaatgctcggctcggaaggaaggaggcaggcatgttaagatagttgtcagctttcaggaggaaatgaagtggaaggaggattccagaccacatctctttcttattggctgcattggagttagtggcaagacgaagtgggatgtgctcgatggggtggttagacggctgttcaaagaatacatcattcatgtcgacccagtgagtcagctagggctgaattcagacagcgttcttggctacagcattggagaaatcaagcgcagcaacacttccgaaacaccggagctgcttccttgtggctatctggttggagagaacacgaccatctcagtgactgtgaaagggctcgcagaaaacagcctggactcactggtgtttgagtccttgattcccaagcccatcctgcagcgctacgtctccctcctgatagagcaccgtcggatcattctctctggccccagcggcactgggaaaacctacctggccaaccggctgtctgagtatatagtgcttcgagagggacgggagttgacagacggggttatcgccacctttaacgtggaccataagtccagcaaggaattgcgccagtacctgtccaaccttgctgaccagtgcaacagtgagaacaatgctgtggacatgcccctcgtcatcatcctggacaacctacaccacgtgagctctctgggagagatcttcaatgggctgctcaactgcaagtaccacaaatgcccttacataattggcacaatgaaccaggctacctcttcgactcccaacctgcagcttcaccataacttcagatgggtgctttgtgccaaccacacggagcctgtgaagggtttccttggccgattcctgaggaggaagctcatggaaacagagatcagtgggcgggtgcgcaatatggagctggtaaaaatcattgactggattcccaaggtctggcatcacctcaaccgcttcctggaggctcacagttcctcggacgtcaccatcggcccccggctcttcctgtcatgccccatcgatgtggacggctcgagagtgtggttcaccgacttgtggaactattccattatcccctatctcctggaagccgtcagagaaggactccagctctatggaaggcgcgccccctgggaggatcctgccaagtgggtgatggacacatatccatgggcagccagcccacaacagcacgagtggcctcccctgctgcagttacggcctgaggatgtcggcttcgacggctactccatgcctcgggagggatcgacaagcaagcagatgccccccagtgatgctgaaggtgacccgctgatgaacatgctgatgaggctgcaggaggcagccaactactccagcccccagagctatgacagcgactccaacagcaacagccatcacgatgacatcttggactcctctttggagtccactctgtgacaggggcccggagcccagcgccctcctcttctcctcaccgcattccacctgcatcccccacatcaccctgaagatgacttcctgagccagcccccagccacagccttagagctgcgggaacaccgagaccccccgtccttcagcctcgacctgggtgcaggcatcccgggccagctgcctgcggaccgcttccttccacagcgagaactgcactaccttctgttgtactttaattattgttttgccttgttgctgtgacctccctaagacactgaagatacttctcgggaaaggatcatcgccgttgaaatgaaaagagagacagagagaaaaaaaaaaagagaacccacatgaagctctgaaaccaaacagcatcctgccatgagcttcccagagacagaagagactggagcaaagtcggaaacacagagaagcacggcttcccctcagcacagaccctccagactgggtctcagagccgtgccacccaccctcccacacagccggccacagggagaactggtgctaaccagggtgcttgctttggtcacgttcaacgcactacagagctacgacacagggaaaccttaggagcaaataaaccgtgctttcatgttttttaaatggtgctttccttacccgagaggtattttgcctgttccaatcaaaccaccccattcaggtccatcagcctctgattaatatccgtgagagtgagtgacggagtgagagtgtgagcgagtggatgtggctgtcagtgcagaacagcatgtgtctctttccttctgatatatgaatgaatcaggtttttttttttttttttctgcaaacactgtgtatagtgagacttgttctactttggagaacaggttaccttttgaaaatgaggttgagtttcttcctttctgatgcattgatttttgaagatttttttttcccccttcccctcttggtcagaatcaatcctttggtgaaagtaagaaccgcaggagttgagttttggtttggtcctgctcagttttggtttttagttgtccatcctcacagtcctacacactcgcctcctcctgctagggctgggggtatctgtgtcctttaaaatggatgaggacctggtcctcgacatgtgggtgagccatggaccttgccttcccttctcgtccttgagggtttagaacacacaccaacacctccagcgtccccgccccagcttccggtggggtgatgcggtcaccctgcaaaagacttgcactttcctcagaaccaacatgacgcagctcaataagggtgagggtcactccctcccagaagccccgtctggacgagccttgcctgacctcttcggtgctgaccttcccaaagtgatgccttactggttttgtactaactgtgttcattttacataagtgtcgtgcctgcctggggtttgttttttttgtcattgttttccccattgaaacaaacagggctaaaaagtcatctgttcattaggagaactcaagttgctgtgacttttctcatccaaaagactcatttgtgtggatgcgtgaccatgggaaaaagaaaaaaaaaaagatccattttttaggttcttttcggtctccagctgacaacccaactggacaatgatctgtctggtgcaggagaaggcaaaagtttctacaagtctacatgaccttgctgatacttgttctaatagaaacccagtctgctgtgtcttcaacatactggtattttcattacaaagtatggtaaatttttgagttgtttgtttctgttttgtaaagagaatccttattggacaccagtgaaggtgtctctgttttaatgatcagggtttttattccatcttttgcatttcttctatttctgaaggtttgtctcttggcatctttttttagtttcttaccataagagtttgacccgaaactgctcacttcacattggatgacaccatgttcttcctctttgaaaagaaaaggggaatgtgtcccactagtgaaaggaaaacttttcaacactatccctgctttagtctcagcaaactcagactattctgcttagccttcattagtcatctgggtgtgagtgtgtcttgttctgtttttctttttaataaaacttttaaaccatatatttagcctgtgaccaggggggccaaaccctaagatttctggtaaacctgaagggtggccctcctcagacaatttatctcccagcaatgaccctactacactcgcgtactgtgaatttgggaggaggtaaagttgacttctcctcgtgggcagttttccaatcaccttgtgagtagacacctgccaatattgtttgaaacctttttttaatatgacatcctctcttgtcattctcttctcccctttcccacagacttccctcctgggtccaggttcagaaccaagacttctgtacctagtgctgcctgattggtgaacattgacttcaagtagcatagcccttgtgtgactcacaactccgtgtccttcctaaagtttcgggaagcagggttgtctaatatgcacatttcttattttggtcatatttttactttagtgtcactcaccttttacaaagtgactttgtactcatttagggctctatcggaaatgcttccattttgccttttctacagttaggccaattttgaaatatataaattctatgcaacatttatgttgagttaccaatggaagccaaaagttctcttcccaaactgccaagaatgatacaggccataattgaaatgggaataccttttaagtttcattaggggtggggtgggagtgggacaggaacaagacttgcctagatctttgttgtatcttggggacttttactttgttgtttgatgcttaaacttcaaaattctctgtattcaaatttgattgtggcgaatctacttcaaaaaggaaaaataatccaactttgtggatattaaatggaaggtttgctgttttgatctagttgtttccagtggagcagttttatgaaatatgttctataagatgtacattttttcattgtaacatagaaattgtaaataattgattaaagtgctgcattttgatgaattttttctagccatttttaaagagaaaactaggaattgagtattttgtgtacggtatgtttccatcctccctccccttcctcctcccctcctctctctctcttcctacctatttaattttcatttgtcatgaggtttttggatttgccaatgatctgctggacatcatgccccatgtcatagagaataaagctgatgattgtaccagtcttaaattattcatgattcaataaaattgatgcttatttattcag

SEQ ID NO: 8805 - protein, 1493 aa, Homo sapiens; identical to SEQ ID NO: 8793

SEQ ID NO: 8806 - DNA, 8157 bp, Homo sapiens
ttttcacagctgacttgataccagcactgaggcctgacctctcgatccttcagcacttcagaggttaattttgttgggggatcggatttctttcctggcctggggaatggtgatccctgctagctagtcctttagttacagagttgctgggtgcctgggattccctggcccagtgtgggctggctcagctggctaaaggacttgccatcctgtgagattcattcagcttctttgtccgctgttctccaagggccgcaatgtagtgaaatgctctggcctaggaaccttacaagctgggacgacagcagctccgtcagcagcggcatcagcgacaccatagacaacctcagcactgatgacatcaacaccagctcctccatcagctcttatgccaacacacctgcctcctctcgaaaaaacctggatgtgcagactgatgctgagaagcactcacaggtggagaggaattccctgtggtctggtgatgatgtcaagaaatcagacggaggctcagacagcggcataaaaatggagccaggttccaagtggaggcggaatccttctgatgtgtctgacgagtccgacaaaagcacgtcgggcaagaagaatcctgtcatctcccagacaggctcatggcggcgaggcatgacagctcaggtgggcatcaccatgccaaggacgaagccttcagccccggcaggcgcactgaagaccccaggaactggaaaaacagacgacgcaaaggtgtctgagaaaggaaggctttctcctaaagcctcccaggtgaagcgctccccatcagatgcaggccggagcagtggtgacgaatccaaaaagcccctccccagcagctctaggacacctactgccaatgccaacagctttgggttcaagaagcagagtggttccgccgccggcctggccatgatcacagccagcggggtgactgtcaccagcaggtcagccacactgggcaaaatcccaaagtcatctgcactcgtcagtcggtctgctggtcggaagtcaagtatggatggggctcagaatcaggatgacgggtatctagccctaagctcccggacaaaccttcagtaccggagtttgccgaggcccagtaagtccaacagccggaacggggctgggaacaggtctagcaccagcagcatagattccaacattagcagcaagtccgcaggcctgccagtgcccaaactgagggagccttccaaaacagccctaggcagctctctaccaggtctggtcaaccaaacagacaaggagaaaggcatctcatcagacaacgagagtgtggcttcctgtaactcggtgaaagtgaatccggcagcccagcctgtgtccagtccggctcagaccagtctccagcctggagccaagtacccagatgtggcctctcccacactccgcagactctttggtgggaagcctaccaagcaagtgcccatcgccacagctgaaaacatgaaaaattcggtggtcatctccaatcctcatgccaccatgactcagcaaggtaacctagactccccgtcaggcagtggcgtcctgagcagtgggagcagcagtcctctctacagcaagaatgtggacctcaaccagtctccgctagcctccagccccagctcagcccactcggccccttccaacagcctcacctggggcaccaacgccagcagctcctccgcagttagcaaggatggcctgggctttcagtctgtcagcagcctccacaccagctgtgagtccatcgacatctccctcagcagtggaggggtccccagccacaattcttccactggcctcatcgcctcctccaaggacgactccttgactccctttgtcagaactaacagtgtgaagaccacactgtcagaaagccctctctcttcccctgctgctagccctaagttctgcagaagtactctgcccaggaaacaggacagtgacccgcaccttgataggaacactttgcctaagaaaggactcaggtatactcccacctcccagcttcgcacgcaagaagatgcaaaagaatggttacggtcccattctgcaggaggccttcaggacaccgctgccaattcccccttttcctctggctccagcgtgacttctccctccggaacaagattcaacttttcccagcttgcgagtcccaccactgtcacccagatgagcttgtccaacccgaccatgctgaggactcacagcctctccaatgctgatgggcagtatgatccatacactgacagccgcttccggaatagctccatgtccctggatgagaagagcagaaccatgagccgttcaggctcattccgggatgggtttgaagaagttcatggatcctcactctccttggtttccagcacatcgtcagtttattctacaccagaagaaaaatgccagtcagagattcgcaagctgcggcgggaactggatgcctcccaggagaaagtttcagctttgaccacccagctgacagcaaatgctcaccttgtggcagcctttgaacagagtcttggtaacatgacaatcaggctccagagtctgaccatgacagctgagcagaaggactcagaactgaatgagttaagaaaaaccattgagctgctaaagaaacagaacgcagctgcccaggctgccattaatggagtaattaacacacctgagctcaactgcaaaggaaacggcactgcccagtctgcagacctccgcatccgcaggcagcactcctcagacagcgtctccagcatcaacagtgccaccagccactccagcgtgggcagcaacatagagagtgactcaaagaagaagaagcggaagaactggttacgcagctccttcaagcaagctttcgggaagaagaagtccccaaaatctgcgtcctctcattcagatattgaggagatgacggattcttctttgccttcctcaccaaagttaccgcacaatgggtccacaggttccaccccactgctgaggaattctcactccaactctctaatttcagaatgcatggatagtgaagctgagaccgtcatgcagctccgaaatgagttaagagacaaggagatgaagctgacggatatccgcttagaagctctcagttctgcccaccagctggaccagctccgggaggccatgaacaggatgcagagtgaaatagagaagctgaaagctgagaatgatcggctgaagtcagagtctcaaggcagtggctgcagccgggctccttcccaagtgtccatctctgcctccccgaggcagtccatgggcctctcccagcacagcttgaacctcactgagtcaaccagcctggacatgttgctggatgacactggtgaatgctcggctcggaaggaaggaggcaggcatgttaagatagttgtcagctttcaggaggaaatgaagtggaaggaggattccagaccacatctctttcttattggctgcattggagttagtggcaagacgaagtgggatgtgctcgatggggtggttagacggctgttcaaagaatacatcattcatgtcgacccagtgagtcagctagggctgaattcagacagcgttcttggctacagcattggagaaatcaagcgcagcaacacttccgaaacaccggagctgcttccttgtggctatctggttggagagaacacgaccatctcagtgactgtgaaagggctcgcagaaaacagcctggactcactggtgtttgagtccttgattcccaagcccatcctgcagcgctacgtctccctcctgatagagcaccgtcggatcattctctctggccccagcggcactgggaaaacctacctggccaaccggctgtctgagtatatagtgcttcgagagggacgggagttgacagacggggttatcgccacctttaacgtggaccataagtccagcaaggaattgcgccagtacctgtccaaccttgctgaccagtgcaacagtgagaacaatgctgtggacatgcccctcgtcatcatcctggacaacctacaccacgtgagctctctgggagagatcttcaatgggctgctcaactgcaagtaccacaaatgcccttacataattggcacaatgaaccaggctacctcttcgactcccaacctgcagcttcaccataacttcagatgggtgctttgtgccaaccacacggagcctgtgaagggtttccttggccgattcctgaggaggaagctcatggaaacagagatcagtgggcgggtgcgcaatatggagctggtaaaaatcattgactggattcccaaggtctggcatcacctcaaccgcttcctggaggctcacagttcctcggacgtcaccatcggcccccggctcttcctgtcatgccccatcgatgtggacggctcgagagtgtggttcaccgacttgtggaactattccattatcccctatctcctggaagccgtcagagaaggactccagctctatggaaggcgcgccccctgggaggatcctgccaagtgggtgatggacacatatccatgggcagccagcccacaacagcacgagtggcctcccctgctgcagttacggcctgaggatgtcggcttcgacggctactccatgcctcgggagggatcgacaagcaagcagatgccccccagtgatgctgaaggtgacccgctgatgaacatgctgatgaggctgcaggaggcagccaactactccagcccccagagctatgacagcgactccaacagcaacagccatcacgatgacatcttggactcctctttggagtccactctgtgacaggggcccggagcccagcgccctcctcttctcctcaccgcattccacctgcatcccccacatcaccctgaagatgacttcctgagccagcccccagccacagccttagagctgcgggaacaccgagaccccccgtccttcagcctcgacctgggtgcaggcatcccgggccagctgcctgcggaccgcttccttccacagcgagaactgcactaccttctgttgtactttaattattgttttgccttgttgctgtgacctccctaagacactgaagatacttctcgggaaaggatcatcgccgttgaaatgaaaagagagacagagagaaaaaaaaaaagagaacccacatgaagctctgaaaccaaacagcatcctgccatgagcttcccagagacagaagagactggagcaaagtcggaaacacagagaagcacggcttcccctcagcacagaccctccagactgggtctcagagccgtgccacccaccctcccacacagccggccacagggagaactggtgctaaccagggtgcttgctttggtcacgttcaacgcactacagagctacgacacagggaaaccttaggagcaaataaaccgtgctttcatgttttttaaatggtgctttccttacccgagaggtattttgcctgttccaatcaaaccaccccattcaggtccatcagcctctgattaatatccgtgagagtgagtgacggagtgagagtgtgagcgagtggatgtggctgtcagtgcagaacagcatgtgtctctttccttctgatatatgaatgaatcaggtttttttttttttttttctgcaaacactgtgtatagtgagacttgttctactttggagaacaggttaccttttgaaaatgaggttgagtttcttcctttctgatgcattgatttttgaagatttttttttcccccttcccctcttggtcagaatcaatcctttggtgaaagtaagaaccgcaggagttgagttttggtttggtcctgctcagttttggtttttagttgtccatcctcacagtcctacacactcgcctcctcctgctagggctgggggtatctgtgtcctttaaaatggatgaggacctggtcctcgacatgtgggtgagccatggaccttgccttcccttctcgtccttgagggtttagaacacacaccaacacctccagcgtccccgccccagcttccggtggggtgatgcggtcaccctgcaaaagacttgcactttcctcagaaccaacatgacgcagctcaataagggtgagggtcactccctcccagaagccccgtctggacgagccttgcctgacctcttcggtgctgaccttcccaaagtgatgccttactggttttgtactaactgtgttcattttacataagtgtcgtgcctgcctggggtttgttttttttgtcattgttttccccattgaaacaaacagggctaaaaagtcatctgttcattaggagaactcaagttgctgtgacttttctcatccaaaagactcatttgtgtggatgcgtgaccatgggaaaaagaaaaaaaaaaagatccattttttaggttcttttcggtctccagctgacaacccaactggacaatgatctgtctggtgcaggagaaggcaaaagtttctacaagtctacatgaccttgctgatacttgttctaatagaaacccagtctgctgtgtcttcaacatactggtattttcattacaaagtatggtaaatttttgagttgtttgtttctgttttgtaaagagaatccttattggacaccagtgaaggtgtctctgttttaatgatcagggtttttattccatcttttgcatttcttctatttctgaaggtttgtctcttggcatctttttttagtttcttaccataagagtttgacccgaaactgctcacttcacattggatgacaccatgttcttcctctttgaaaagaaaaggggaatgtgtcccactagtgaaaggaaaacttttcaacactatccctgctttagtctcagcaaactcagactattctgcttagccttcattagtcatctgggtgtgagtgtgtcttgttctgtttttctttttaataaaacttttaaaccatatatttagcctgtgaccaggggggccaaaccctaagatttctggtaaacctgaagggtggccctcctcagacaatttatctcccagcaatgaccctactacactcgcgtactgtgaatttgggaggaggtaaagttgacttctcctcgtgggcagttttccaatcaccttgtgagtagacacctgccaatattgtttgaaacctttttttaatatgacatcctctcttgtcattctcttctcccctttcccacagacttccctcctgggtccaggttcagaaccaagacttctgtacctagtgctgcctgattggtgaacattgacttcaagtagcatagcccttgtgtgactcacaactccgtgtccttcctaaagtttcgggaagcagggttgtctaatatgcacatttcttattttggtcatatttttactttagtgtcactcaccttttacaaagtgactttgtactcatttagggctctatcggaaatgcttccattttgccttttctacagttaggccaattttgaaatatataaattctatgcaacatttatgttgagttaccaatggaagccaaaagttctcttcccaaactgccaagaatgatacaggccataattgaaatgggaataccttttaagtttcattaggggtggggtgggagtgggacaggaacaagacttgcctagatctttgttgtatcttggggacttttactttgttgtttgatgcttaaacttcaaaattctctgtattcaaatttgattgtggcgaatctacttcaaaaaggaaaaataatccaactttgtggatattaaatggaaggtttgctgttttgatctagttgtttccagtggagcagttttatgaaatatgttctataagatgtacattttttcattgtaacatagaaattgtaaataattgattaaagtgctgcattttgatgaattttttctagccatttttaaagagaaaactaggaattgagtattttgtgtacggtatgtttccatcctccctccccttcctcctcccctcctctctctctcttcctacctatttaattttcatttgtcatgaggtttttggatttgccaatgatctgctggacatcatgccccatgtcatagagaataaagctgatgattgtaccagtcttaaattattcatgattcaataaaattgatgcttatttattcag

SEQ ID NO: 8807 - protein, 1515 aa, Homo sapiens; identical to SEQ ID NO: 8801

SEQ ID NO: 8808 - DNA, 8645 bp, Homo sapiens
ttttcacagctgacttgataccagcactgaggcctgacctctcgatccttcagcacttcagaggttaattttgttgggggatcggatttctttcctggcctggggaatggtgatccctgctagctagtcctttagttacagagttgctgggtgcctgggattccctggcccagtgtgggctggctcagctggctaaaggacttgccatcctgtgagattcattcagcttctttgtccgctgttctccaagggccgcaatgtagtgaaatgctctggcctaggaaccttacaagctgggacgacagcagctccgtcagcagcggcatcagcgacaccatagacaacctcagcactgatgacatcaacaccagctcctccatcagctcttatgccaacacacctgcctcctctcgaaaaaacctggatgtgcagactgatgctgagaagcactcacaggtggagaggaattccctgtggtctggtgatgatgtcaagaaatcagacggaggctcagacagcggcataaaaatggagccaggttccaagtggaggcggaatccttctgatgtgtctgacgagtccgacaaaagcacgtcgggcaagaagaatcctgtcatctcccagacaggctcatggcggcgaggcatgacagctcaggtgggcatcaccatgccaaggacgaagccttcagccccggcaggcgcactgaagaccccaggaactggaaaaacagacgacgcaaaggtgtctgagaaaggaaggctttctcctaaagcctcccaggtgaagcgctccccatcagatgcaggccggagcagtggtgacgaatccaaaaagcccctccccagcagctctaggacacctactgccaatgccaacagctttgggttcaagaagcagagtggttccgccgccggcctggccatgatcacagccagcggggtgactgtcaccagcaggtcagccacactgggcaaaatcccaaagtcatctgcactcgtcagtcggtctgctggtcggaagtcaagtatggatggggctcagaatcaggatgacgggtatctagccctaagctcccggacaaaccttcagtaccggagtttgccgaggcccagtaagtccaacagccggaacggggctgggaacaggtctagcaccagcagcatagattccaacattagcagcaagtccgcaggcctgccagtgcccaaactgagggagccttccaaaacagccctaggcagctctctaccaggtctggtcaaccaaacagacaaggagaaaggcatctcatcagacaacgagagtgtggcttcctgtaactcggtgaaagtgaatccggcagcccagcctgtgtccagtccggctcagaccagtctccagcctggagccaagtacccagatgtggcctctcccacactccgcagactctttggtgggaagcctaccaagcaagtgcccatcgccacagctgaaaacatgaaaaattcggtggtcatctccaatcctcatgccaccatgactcagcaaggtaacctagactccccgtcaggcagtggcgtcctgagcagtgggagcagcagtcctctctacagcaagaatgtggacctcaaccagtctccgctagcctccagccccagctcagcccactcggccccttccaacagcctcacctggggcaccaacgccagcagctcctccgcagttagcaaggatggcctgggctttcagtctgtcagcagcctccacaccagctgtgagtccatcgacatctccctcagcagtggaggggtccccagccacaattcttccactggcctcatcgcctcctccaaggacgactccttgactccctttgtcagaactaacagtgtgaagaccacactgtcagaaagccctctctcttcccctgctgctagccctaagttctgcagaagtactctgcccaggaaacaggacagtgacccgcaccttgataggaacactttgcctaagaaaggactcaggtatactcccacctcccagcttcgcacgcaagaagatgcaaaagaatggttacggtcccattctgcaggaggccttcaggacaccgctgccaattcccccttttcctctggctccagcgtgacttctccctccggaacaagattcaacttttcccagcttgcgagtcccaccactgtcacccagatgagcttgtccaacccgaccatgctgaggactcacagcctctccaatgctgatgggcagtatgatccatacactgacagccgcttccggaatagctccatgtccctggatgagaagagcagaaccatgagccgttcaggctcattccgggatgggtttgaagaagttcatggatcctcactctccttggtttccagcacatcgtcagtttattctacaccagaagaaaaatgccagtcagagattcgcaagctgcggcgggaactggatgcctcccaggagaaagtttcagctttgaccacccagctgacagcaaatgctcaccttgtggcagcctttgaacagagtcttggtaacatgacaatcaggctccagagtctgaccatgacagctgagcagaaggactcagaactgaatgagttaagaaaaaccattgagctgctaaagaaacagaacgcagctgcccaggctgccattaatggagtaattaacacacctgagctcaactgcaaaggaaacggcactgcccagtctgcagacctccgcatccgcaggcagcactcctcagacagcgtctccagcatcaacagtgccaccagccactccagcgtgggcagcaacatagagagtgactcaaagaagaagaagcggaagaactggttacgcagctccttcaagcaagctttcgggaagaagaagtccccaaaatctgcgtcctctcattcagatattgaggagatgacggattcttctttgccttcctcaccaaagttaccgcacaatgggtccacaggttccaccccactgctgaggaattctcactccaactctctaatttcagaatgcatggatagtgaagctgagaccgtcatgcagctccgaaatgagttaagagacaaggagatgaagctgacggatatccgcttagaagctctcagttctgcccaccagctggaccagctccgggaggccatgaacaggatgcagagtgaaatagagaagctgaaagctgagaatgatcggctgaagtcagagtctcaaggcagtggctgcagccgggctccttcccaagtgtccatctctgcctccccgaggcagtccatgggcctctcccagcacagcttgaacctcactgagtcaaccagcctggacatgttgctggatgacactggtgaatgctcggctcggaaggaaggaggcaggcatgttaagatagttgtcagctttcaggaggaaatgaagtggaaggaggattccagaccacatctctttcttattggctgcattggagttagtggcaagacgaagtgggatgtgctcgatggggtggttagacggctgttcaaagaatacatcattcatgtcgacccagtgagtcagctagggctgaattcagacagcgttcttggctacagcattggagaaatcaagcgcagcaacacttccgaaacaccggagctgcttccttgtggctatctggttggagagaacacgaccatctcagtgactgtgaaagggctcgcagaaaacagcctggactcactggtgtttgagtccttgattcccaagcccatcctgcagcgctacgtctccctcctgatagagcaccgtcggatcattctctctggccccagcggcactgggaaaacctacctggccaaccggctgtctgagtatatagtgcttcgagagggacgggagttgacagacggggttatcgccacctttaacgtggaccataagtccagcaaggaattgcgccagtacctgtccaaccttgctgaccagtgcaacagtgagaacaatgctgtggacatgcccctcgtcatcatcctggacaacctacaccacgtgagctctctgggagagatcttcaatgggctgctcaactgcaagtaccacaaatgcccttacataattggcacaatgaaccaggctacctcttcgactcccaacctgcagcttcaccataacttcagatgggtgctttgtgccaaccacacggagcctgtgaagggtttccttggccgattcctgaggaggaagctcatggaaacagagatcagtgggcgggtgcgcaatatggagctggtaaaaatcattgactggattcccaaggtctggcatcacctcaaccgcttcctggaggctcacagttcctcggacgtcaccatcggcccccggctcttcctgtcatgccccatcgatgtggacggctcgagagtgtggttcaccgacttgtggaactattccattatcccctatctcctggaagccgtcagagaaggactccagctctatggaaggcgcgccccctgggaggatcctgccaagtgggtgatggacacatatccatgggcagccagcccacaacagcacgagtggcctcccctgctgcagttacggcctgaggatgtcggcttcgacggctactccatgcctcgggagggatcgacaagcaagcagatgccccccagtgatgctgaaggtgacccgctgatgaacatgctgatgaggctgcaggaggcagccaactactccagcccccagagctatgacagcgactccaacagcaacagccatcacgatgacatcttggactcctctttggagtccactctgtgacaggggcccggagcccagcgccctcctcttctcctcaccgcattccacctgcatcccccacatcaccctgaagatgacttcctgagccagcccccagccacagccttagagctgcgggaacaccgagaccccccgtccttcagcctcgacctgggtgcaggcatcccgggccagctgcctgcggaccgcttccttccacagcgagaactgcactaccttctgttgtactttaattattgttttgccttgttgctgtgacctccctaagacactgaagatacttctcgggaaaggatcatcgccgttgaaatgaaaagagagacagagagaaaaaaaaaaagagaacccacatgaagctctgaaaccaaacagcatcctgccatgagcttcccagagacagaagagactggagcaaagtcggaaacacagagaagcacggcttcccctcagcacagaccctccagactgggtctcagagccgtgccacccaccctcccacacagccggccacagggagaactggtgctaaccagggtgcttgctttggtcacgttcaacgcactacagagctacgacacagggaaaccttaggagcaaataaaccgtgctttcatgttttttaaatggtgctttccttacccgagaggtattttgcctgttccaatcaaaccaccccattcaggtccatcagcctctgattaatatccgtgagagtgagtgacggagtgagagtgtgagcgagtggatgtggctgtcagtgcagaacagcatgtgtctctttccttctgatatatgaatgaatcaggtttttttttttttttttctgcaaacactgtgtatagtgagacttgttctactttggagaacaggttaccttttgaaaatgaggttgagtttcttcctttctgatgcattgatttttgaagatttttttttcccccttcccctcttggtcagaatcaatcctttggtgaaagtaagaaccgcaggagttgagttttggtttggtcctgctcagttttggtttttagttgtccatcctcacagtcctacacactcgcctcctcctgctagggctgggggtatctgtgtcctttaaaatggatgaggacctggtcctcgacatgtgggtgagccatggaccttgccttcccttctcgtccttgagggtttagaacacacaccaacacctccagcgtccccgccccagcttccggtggggtgatgcggtcaccctgcaaaagacttgcactttcctcagaaccaacatgacgcagctcaataagggtgagggtcactccctcccagaagccccgtctggacgagccttgcctgacctcttcggtgctgaccttcccaaagtgatgccttactggttttgtactaactgtgttcattttacataagtgtcgtgcctgcctggggtttgttttttttgtcattgttttccccattgaaacaaacagggctaaaaagtcatctgttcattaggagaactcaagttgctgtgacttttctcatccaaaagactcatttgtgtggatgcgtgaccatgggaaaaagaaaaaaaaaaagatccattttttaggttcttttcggtctccagctgacaacccaactggacaatgatctgtctggtgcaggagaaggcaaaagtttctacaagtctacatgaccttgctgatacttgttctaatagaaacccagtctgctgtgtcttcaacatactggtattttcattacaaagtatggtaaatttttgagttgtttgtttctgttttgtaaagagaatccttattggacaccagtgaaggtgtctctgttttaatgatcagggtttttattccatcttttgcatttcttctatttctgaaggtttgtctcttggcatctttttttagtttcttaccataagagtttgacccgaaactgctcacttcacattggatgacaccatgttcttcctctttgaaaagaaaaggggaatgtgtcccactagtgaaaggaaaacttttcaacactatccctgctttagtctcagcaaactcagactattctgcttagccttcattagtcatctgggtgtgagtgtgtcttgttctgtttttctttttaataaaacttttaaaccatatatttagcctgtgaccaggggggccaaaccctaagatttctggtaaacctgaagggtggccctcctcagacaatttatctcccagcaatgaccctactacactcgcgtactgtgaatttgggaggaggtaaagttgacttctcctcgtgggcagttttccaatcaccttgtgagtagacacctgccaatattgtttgaaacctttttttaatatgacatcctctcttgtcattctcttctcccctttcccacagacttccctcctgggtccaggttcagaaccaagacttctgtacctagtgctgcctgattggtgaacattgacttcaagtagcatagcccttgtgtgactcacaactccgtgtccttcctaaagtttcgggaagcagggttgtctaatatgcacatttcttattttggtcatatttttactttagtgtcactcaccttttacaaagtgactttgtactcatttagggctctatcggaaatgcttccattttgccttttctacagttaggccaattttgaaatatataaattctatgcaacatttatgttgagttaccaatggaagccaaaagttctcttcccaaactgccaagaatgatacaggccataattgaaatgggaataccttttaagtttcattaggggtggggtgggagtgggacaggaacaagacttgcctagatctttgttgtatcttggggacttttactttgttgtttgatgcttaaacttcaaaattctctgtattcaaatttgattgtggcgaatctacttcaaaaaggaaaaataatccaactttgtggatattaaatggaaggtttgctgttttgatctagttgtttccagtggagcagttttatgaaatatgttctataagatgtacattttttcattgtaacatagaaattgtaaataattgattaaagtgctgcattttgatgaattttttctagccatttttaaagagaaaactaggaattgagtattttgtgtacggtatgtttccatcctccctccccttcctcctcccctcctctctctctcttcctacctatttaattttcatttgtcatgaggtttttggatttgccaatgatctgctggacatcatgccccatgtcatagagaataaagctgatgattgtaccagtcttaaattattcatgattcaataaaattgatgcttatttattcagattagtggtttggcttgtctgtgctagagcaagtcctcataggagttttatttcatgctaagagcaagtcagtcttatctggatgcagcaaatgcagggaaaaccccaaacctttgcaaacccatcttggctagtatgccatcaatatcccacatcttctcagtttctcaggtcttcttgccactcctgtggagcttgttagaactgtagaatttcagatcctctcagactttatgaatcaccagggatctagtggatcctcaatttctaacaaactcctaggcaataccagtgctctagtgcctggaccacacattgagtggcaagcaacatcagtgtccagccagccccctaagtcgatcccttggcatgaaaaggatttttttttaatgtattgagtacctactaatttccaaatgctttcccaaatactcagtataatgcaaaatgatgccagagaggtattcttactcccattttacaagtgg

SEQ ID NO: 8809 - protein, 1515 aa, Homo sapiens; identical to SEQ ID NO: 8801

SEQ ID NO: 8810 - DNA, 8579 bp, Homo sapiens
ttttcacagctgacttgataccagcactgaggcctgacctctcgatccttcagcacttcagaggttaattttgttgggggatcggatttctttcctggcctggggaatggtgatccctgctagctagtcctttagttacagagttgctgggtgcctgggattccctggcccagtgtgggctggctcagctggctaaaggacttgccatcctgtgagattcattcagcttctttgtccgctgttctccaagggccgcaatgtagtgaaatgctctggcctaggaaccttacaagctgggacgacagcagctccgtcagcagcggcatcagcgacaccatagacaacctcagcactgatgacatcaacaccagctcctccatcagctcttatgccaacacacctgcctcctctcgaaaaaacctggatgtgcagactgatgctgagaagcactcacaggtggagaggaattccctgtggtctggtgatgatgtcaagaaatcagacggaggctcagacagcggcataaaaatggagccaggttccaagtggaggcggaatccttctgatgtgtctgacgagtccgacaaaagcacgtcgggcaagaagaatcctgtcatctcccagacaggctcatggcggcgaggcatgacagctcaggtgggcatcaccatgccaaggacgaagccttcagccccggcaggcgcactgaagaccccaggaactggaaaaacagacgacgcaaaggtgtctgagaaaggaaggctttctcctaaagcctcccaggtgaagcgctccccatcagatgcaggccggagcagtggtgacgaatccaaaaagcccctccccagcagctctaggacacctactgccaatgccaacagctttgggttcaagaagcagagtggttccgccgccggcctggccatgatcacagccagcggggtgactgtcaccagcaggtcagccacactgggcaaaatcccaaagtcatctgcactcgtcagtcggtctgctggtcggaagtcaagtatggatggggctcagaatcaggatgacgggtatctagccctaagctcccggacaaaccttcagtaccggagtttgccgaggcccagtaagtccaacagccggaacggggctgggaacaggtctagcaccagcagcatagattccaacattagcagcaagtccgcaggcctgccagtgcccaaactgagggagccttccaaaacagccctaggcagctctctaccaggtctggtcaaccaaacagacaaggagaaaggcatctcatcagacaacgagagtgtggcttcctgtaactcggtgaaagtgaatccggcagcccagcctgtgtccagtccggctcagaccagtctccagcctggagccaagtacccagatgtggcctctcccacactccgcagactctttggtgggaagcctaccaagcaagtgcccatcgccacagctgaaaacatgaaaaattcggtggtcatctccaatcctcatgccaccatgactcagcaaggtaacctagactccccgtcaggcagtggcgtcctgagcagtgggagcagcagtcctctctacagcaagaatgtggacctcaaccagtctccgctagcctccagccccagctcagcccactcggccccttccaacagcctcacctggggcaccaacgccagcagctcctccgcagttagcaaggatggcctgggctttcagtctgtcagcagcctccacaccagctgtgagtccatcgacatctccctcagcagtggaggggtccccagccacaattcttccactggcctcatcgcctcctccaaggacgactccttgactccctttgtcagaactaacagtgtgaagaccacactgtcagaaagtgacccgcaccttgataggaacactttgcctaagaaaggactcaggtatactcccacctcccagcttcgcacgcaagaagatgcaaaagaatggttacggtcccattctgcaggaggccttcaggacaccgctgccaattcccccttttcctctggctccagcgtgacttctccctccggaacaagattcaacttttcccagcttgcgagtcccaccactgtcacccagatgagcttgtccaacccgaccatgctgaggactcacagcctctccaatgctgatgggcagtatgatccatacactgacagccgcttccggaatagctccatgtccctggatgagaagagcagaaccatgagccgttcaggctcattccgggatgggtttgaagaagttcatggatcctcactctccttggtttccagcacatcgtcagtttattctacaccagaagaaaaatgccagtcagagattcgcaagctgcggcgggaactggatgcctcccaggagaaagtttcagctttgaccacccagctgacagcaaatgctcaccttgtggcagcctttgaacagagtcttggtaacatgacaatcaggctccagagtctgaccatgacagctgagcagaaggactcagaactgaatgagttaagaaaaaccattgagctgctaaagaaacagaacgcagctgcccaggctgccattaatggagtaattaacacacctgagctcaactgcaaaggaaacggcactgcccagtctgcagacctccgcatccgcaggcagcactcctcagacagcgtctccagcatcaacagtgccaccagccactccagcgtgggcagcaacatagagagtgactcaaagaagaagaagcggaagaactggttacgcagctccttcaagcaagctttcgggaagaagaagtccccaaaatctgcgtcctctcattcagatattgaggagatgacggattcttctttgccttcctcaccaaagttaccgcacaatgggtccacaggttccaccccactgctgaggaattctcactccaactctctaatttcagaatgcatggatagtgaagctgagaccgtcatgcagctccgaaatgagttaagagacaaggagatgaagctgacggatatccgcttagaagctctcagttctgcccaccagctggaccagctccgggaggccatgaacaggatgcagagtgaaatagagaagctgaaagctgagaatgatcggctgaagtcagagtctcaaggcagtggctgcagccgggctccttcccaagtgtccatctctgcctccccgaggcagtccatgggcctctcccagcacagcttgaacctcactgagtcaaccagcctggacatgttgctggatgacactggtgaatgctcggctcggaaggaaggaggcaggcatgttaagatagttgtcagctttcaggaggaaatgaagtggaaggaggattccagaccacatctctttcttattggctgcattggagttagtggcaagacgaagtgggatgtgctcgatggggtggttagacggctgttcaaagaatacatcattcatgtcgacccagtgagtcagctagggctgaattcagacagcgttcttggctacagcattggagaaatcaagcgcagcaacacttccgaaacaccggagctgcttccttgtggctatctggttggagagaacacgaccatctcagtgactgtgaaagggctcgcagaaaacagcctggactcactggtgtttgagtccttgattcccaagcccatcctgcagcgctacgtctccctcctgatagagcaccgtcggatcattctctctggccccagcggcactgggaaaacctacctggccaaccggctgtctgagtatatagtgcttcgagagggacgggagttgacagacggggttatcgccacctttaacgtggaccataagtccagcaaggaattgcgccagtacctgtccaaccttgctgaccagtgcaacagtgagaacaatgctgtggacatgcccctcgtcatcatcctggacaacctacaccacgtgagctctctgggagagatcttcaatgggctgctcaactgcaagtaccacaaatgcccttacataattggcacaatgaaccaggctacctcttcgactcccaacctgcagcttcaccataacttcagatgggtgctttgtgccaaccacacggagcctgtgaagggtttccttggccgattcctgaggaggaagctcatggaaacagagatcagtgggcgggtgcgcaatatggagctggtaaaaatcattgactggattcccaaggtctggcatcacctcaaccgcttcctggaggctcacagttcctcggacgtcaccatcggcccccggctcttcctgtcatgccccatcgatgtggacggctcgagagtgtggttcaccgacttgtggaactattccattatcccctatctcctggaagccgtcagagaaggactccagctctatggaaggcgcgccccctgggaggatcctgccaagtgggtgatggacacatatccatgggcagccagcccacaacagcacgagtggcctcccctgctgcagttacggcctgaggatgtcggcttcgacggctactccatgcctcgggagggatcgacaagcaagcagatgccccccagtgatgctgaaggtgacccgctgatgaacatgctgatgaggctgcaggaggcagccaactactccagcccccagagctatgacagcgactccaacagcaacagccatcacgatgacatcttggactcctctttggagtccactctgtgacaggggcccggagcccagcgccctcctcttctcctcaccgcattccacctgcatcccccacatcaccctgaagatgacttcctgagccagcccccagccacagccttagagctgcgggaacaccgagaccccccgtccttcagcctcgacctgggtgcaggcatcccgggccagctgcctgcggaccgcttccttccacagcgagaactgcactaccttctgttgtactttaattattgttttgccttgttgctgtgacctccctaagacactgaagatacttctcgggaaaggatcatcgccgttgaaatgaaaagagagacagagagaaaaaaaaaaagagaacccacatgaagctctgaaaccaaacagcatcctgccatgagcttcccagagacagaagagactggagcaaagtcggaaacacagagaagcacggcttcccctcagcacagaccctccagactgggtctcagagccgtgccacccaccctcccacacagccggccacagggagaactggtgctaaccagggtgcttgctttggtcacgttcaacgcactacagagctacgacacagggaaaccttaggagcaaataaaccgtgctttcatgttttttaaatggtgctttccttacccgagaggtattttgcctgttccaatcaaaccaccccattcaggtccatcagcctctgattaatatccgtgagagtgagtgacggagtgagagtgtgagcgagtggatgtggctgtcagtgcagaacagcatgtgtctctttccttctgatatatgaatgaatcaggtttttttttttttttttctgcaaacactgtgtatagtgagacttgttctactttggagaacaggttaccttttgaaaatgaggttgagtttcttcctttctgatgcattgatttttgaagatttttttttcccccttcccctcttggtcagaatcaatcctttggtgaaagtaagaaccgcaggagttgagttttggtttggtcctgctcagttttggtttttagttgtccatcctcacagtcctacacactcgcctcctcctgctagggctgggggtatctgtgtcctttaaaatggatgaggacctggtcctcgacatgtgggtgagccatggaccttgccttcccttctcgtccttgagggtttagaacacacaccaacacctccagcgtccccgccccagcttccggtggggtgatgcggtcaccctgcaaaagacttgcactttcctcagaaccaacatgacgcagctcaataagggtgagggtcactccctcccagaagccccgtctggacgagccttgcctgacctcttcggtgctgaccttcccaaagtgatgccttactggttttgtactaactgtgttcattttacataagtgtcgtgcctgcctggggtttgttttttttgtcattgttttccccattgaaacaaacagggctaaaaagtcatctgttcattaggagaactcaagttgctgtgacttttctcatccaaaagactcatttgtgtggatgcgtgaccatgggaaaaagaaaaaaaaaaagatccattttttaggttcttttcggtctccagctgacaacccaactggacaatgatctgtctggtgcaggagaaggcaaaagtttctacaagtctacatgaccttgctgatacttgttctaatagaaacccagtctgctgtgtcttcaacatactggtattttcattacaaagtatggtaaatttttgagttgtttgtttctgttttgtaaagagaatccttattggacaccagtgaaggtgtctctgttttaatgatcagggtttttattccatcttttgcatttcttctatttctgaaggtttgtctcttggcatctttttttagtttcttaccataagagtttgacccgaaactgctcacttcacattggatgacaccatgttcttcctctttgaaaagaaaaggggaatgtgtcccactagtgaaaggaaaacttttcaacactatccctgctttagtctcagcaaactcagactattctgcttagccttcattagtcatctgggtgtgagtgtgtcttgttctgtttttctttttaataaaacttttaaaccatatatttagcctgtgaccaggggggccaaaccctaagatttctggtaaacctgaagggtggccctcctcagacaatttatctcccagcaatgaccctactacactcgcgtactgtgaatttgggaggaggtaaagttgacttctcctcgtgggcagttttccaatcaccttgtgagtagacacctgccaatattgtttgaaacctttttttaatatgacatcctctcttgtcattctcttctcccctttcccacagacttccctcctgggtccaggttcagaaccaagacttctgtacctagtgctgcctgattggtgaacattgacttcaagtagcatagcccttgtgtgactcacaactccgtgtccttcctaaagtttcgggaagcagggttgtctaatatgcacatttcttattttggtcatatttttactttagtgtcactcaccttttacaaagtgactttgtactcatttagggctctatcggaaatgcttccattttgccttttctacagttaggccaattttgaaatatataaattctatgcaacatttatgttgagttaccaatggaagccaaaagttctcttcccaaactgccaagaatgatacaggccataattgaaatgggaataccttttaagtttcattaggggtggggtgggagtgggacaggaacaagacttgcctagatctttgttgtatcttggggacttttactttgttgtttgatgcttaaacttcaaaattctctgtattcaaatttgattgtggcgaatctacttcaaaaaggaaaaataatccaactttgtggatattaaatggaaggtttgctgttttgatctagttgtttccagtggagcagttttatgaaatatgttctataagatgtacattttttcattgtaacatagaaattgtaaataattgattaaagtgctgcattttgatgaattttttctagccatttttaaagagaaaactaggaattgagtattttgtgtacggtatgtttccatcctccctccccttcctcctcccctcctctctctctcttcctacctatttaattttcatttgtcatgaggtttttggatttgccaatgatctgctggacatcatgccccatgtcatagagaataaagctgatgattgtaccagtcttaaattattcatgattcaataaaattgatgcttatttattcagattagtggtttggcttgtctgtgctagagcaagtcctcataggagttttatttcatgctaagagcaagtcagtcttatctggatgcagcaaatgcagggaaaaccccaaacctttgcaaacccatcttggctagtatgccatcaatatcccacatcttctcagtttctcaggtcttcttgccactcctgtggagcttgttagaactgtagaatttcagatcctctcagactttatgaatcaccagggatctagtggatcctcaatttctaacaaactcctaggcaataccagtgctctagtgcctggaccacacattgagtggcaagcaacatcagtgtccagccagccccctaagtcgatcccttggcatgaaaaggatttttttttaatgtattgagtacctactaatttccaaatgctttcccaaatactcagtataatgcaaaatgatgccagagaggtattcttactcccattttacaagtgg

SEQ ID NO: 8811 - protein, 1493 aa, Homo sapiens; identical to SEQ ID NO: 8793

SEQ ID NO: 8812 - DNA, 1190 bp, Homo sapiens
acagctgacttgataccagcactgaggcctgacctctcgatccttcagcacttcagagggccgcaatgtagtgaaatgctctggcctaggaaccttacaagctgggacgacagcagctccgtcagcagcggcatcagcgacaccatagacaacctcagcactgatgacatcaacaccagctcctccatcagctcttatgccaacacacctgcctcctctcgaaaaaacctggatgtgcagactgatgctgagaagcactcacaggtggagaggaattccctgtggtctggtgatgatgtcaagaaatcagacggaggctcagacagcggcataaaaatggagccaggttccaagtggaggcggaatccttctgatgtgtctgacgagtccgacaaaagcacgtcgggcaagaagaatcctgtcatctcccagacaggctcatggcggcgaggcatgacagctcaggtgggcatcaccatgccaaggacgaagccttcagccccggcaggcgcactgaagaccccaggaactggaaaaacagacgacgcaaaggtgtctgagaaaggaaggctttctcctaaagcctcccaggtgaagcgctccccatcagatgcaggccggagcagtggtgacgaatccaaaaagcccctccccagcagctctaggacacctactgccaatgccaacagctttgggttcaagaagcagagtggttccgccgccggcctggccatgatcacagccagcggggtgactgtcaccagcaggtcagccacactgggcaaaatcccaaagtcatctgcactcgtcagtcggtctgctggtcggaagtcaagtatggatggggctcagaatcaggatgacgggtatctagccctaagctcccggacaaaccttcagtaccggagtttgccgaggcccagtaagtccaacagccggaacggggctgggaacaggtctagcaccagcagcatagattccaacattagcagcaagtccgcaggcctgccagtgcccaaactgagggagccttccaaaacagccctaggcagctctctaccaggtctggtcaaccaaacagacaaggagaaaggcatctcatcagacaacgagagtgtggcttcctgtaactcggtgaaagtgaatccggcagcccagcctgtgtccagtccggctcagaccagtctcca

SEQ ID NO: 8813 - protein, 370 aa, Homo sapiens; identical to SEQ ID NO: 8799

SEQ ID NO: 8814 - DNA, 494 bp, Homo sapiens
agctagtcctttagttacagagttgctgggtgcctgggattccctggcccagtgtgggctggctcagctggctaaaggacttgccatcctgtgagattcattcagcttctttgtccgctgttctccaagggccgcaatgtagtgaaatgctctggcctaggaaccttacaagctgggacgacagcagctccgtcagcagcggcatcagcgacaccatagacaacctcagcactgatgacatcaacaccagctcctccatcagctcttatgccaacacacctgcctcctctcgaaaaaacctggatgtgcagactgatgctgagaagcactcacaggtggagaggaattccctgtggtctggtgatgatgtcaagaaatcagacggaggctcagacagcggcataaaaatggagccaggttccaagtggagctccatgtccctggatgagaagagcagaaccatgagccgttcaggctcattccgggatgggttt

SEQ ID NO: 8815 - protein, 115 aa, Homo sapiens
MLWPRNLTSWDDSSSVSSGISDTIDNLSTDDINTSSSISSYANTPASSRKNLDVQTDAEKHSQVERNSLWSGDDVKKSDGGSDSGIKMEPGSKWSSMSLDEKSRTMSRSGSFRDG

SEQ ID NO: 8816 - DNA, 1302 bp, Homo sapiens
agttaggcttgctcactcatccacaccaaaggatctcgttccgctcgggccccggggtttcacgggaacaattgccttgaacaatagccagaaaacgagttccaccagtctggacttttttgcaactgaatgcagctgtctggcggggggcatgggccagccctgtaaatgggctgtgccttgattctggagcagaactggaaaattgagcagctgggacgacagcagctccgtcagcagcggcatcagcgacaccatagacaacctcagcactgatgacatcaacaccagctcctccatcagctcttatgccaacacacctgcctcctctcgaaaaaacctggatgtgcagactgatgctgagaagcactcacaggtggagaggaattccctgtggtctggtgatgatgtcaagaaatcagacggaggctcagacagcggcataaaaatggagccaggttccaagtggaggcggaatccttctgatgtgtctgacgagtccgacaaaagcacgtcgggcaagaagaatcctgtcatctcccagacaggctcatggcggcgaggcatgacagctcaggtgggcatcaccatgccaaggacgaagccttcagccccggcaggcgcactgaagaccccaggaactggaaaaacagacgacgcaaaggtgtctgagaaaggaaggctttctcctaaagcctcccaggtgaagcgctccccatcagatgcaggccggagcagtggtgacgaatccaaaaagcccctccccagcagctctaggacacctactgccaatgccaacagctttgggttcaagaagcagagtggttccgccgccggcctggccatgatcacagccagcggggtgactgtcaccagcaggtcagccacactgggcaaaatcccaaagtcatctgcactcgtcagtcggtctgctggtcggaagtcaagtatggatggggctcagaatcaggatgacgggtatctagccctaagctcccggacaaaccttcagtaccggagtttgccgaggcccagtaagtccaacagccggaacggggctgggaacaggtctagcaccagcagcatagattccaacattagcagcaagtccgcaggcctgccagtgcccaaactgagggagccttccaaaacagccctaggcagctctctaccaggtctggtcaaccaaacagacaaggagaaaggcatctcatcagacaacgagagtgtggcttcctgtaactcggtgaaagtgaatccggcagcccagcctgtgtccagtccggctcagaccagtctcca

SEQ ID NO: 8817 - protein, 283 aa, Homo sapiens
MEPGSKWRRNPSDVSDESDKSTSGKKNPVISQTGSWRRGMTAQVGITMPRTKPSAPAGALKTPGTGKTDDAKVSEKGRLSPKASQVKRSPSDAGRSSGDESKKPLPSSSRTPTANANSFGFKKQSGSAAGLAMITASGVTVTSRSATLGKIPKSSALVSRSAGRKSSMDGAQNQDDGYLALSSRTNLQYRSLPRPSKSNSRNGAGNRSSTSSIDSNISSKSAGLPVPKLREPSKTALGSSLPGLVNQTDKEKGISSDNESVASCNSVKVNPAAQPVSSPAQTS

SEQ ID NO: 8818 - DNA, 1237 bp, Homo sapiens
agactgtttccaaggacagtaagggcctcctggaagcagacccagcctttggagtttggggaggattaggatccttgctttgtgaagactgcttttcagaaccgtagttagagaacctcatctctgctcaccggctgtggttttattactgggacgacagcagctccgtcagcagcggcatcagcgacaccatagacaacctcagcactgatgacatcaacaccagctcctccatcagctcttatgccaacacacctgcctcctctcgaaaaaacctggatgtgcagactgatgctgagaagcactcacaggtggagaggaattccctgtggtctggtgatgatgtcaagaaatcagacggaggctcagacagcggcataaaaatggagccaggttccaagtggaggcggaatccttctgatgtgtctgacgagtccgacaaaagcacgtcgggcaagaagaatcctgtcatctcccagacaggctcatggcggcgaggcatgacagctcaggtgggcatcaccatgccaaggacgaagccttcagccccggcaggcgcactgaagaccccaggaactggaaaaacagacgacgcaaaggtgtctgagaaaggaaggctttctcctaaagcctcccaggtgaagcgctccccatcagatgcaggccggagcagtggtgacgaatccaaaaagcccctccccagcagctctaggacacctactgccaatgccaacagctttgggttcaagaagcagagtggttccgccgccggcctggccatgatcacagccagcggggtgactgtcaccagcaggtcagccacactgggcaaaatcccaaagtcatctgcactcgtcagtcggtctgctggtcggaagtcaagtatggatggggctcagaatcaggatgacgggtatctagccctaagctcccggacaaaccttcagtaccggagtttgccgaggcccagtaagtccaacagccggaacggggctgggaacaggtctagcaccagcagcatagattccaacattagcagcaagtccgcaggcctgccagtgcccaaactgagggagccttccaaaacagccctaggcagctctctaccaggtctggtcaaccaaacagacaaggagaaaggcatctcatcagacaacgagagtgtggcttcctgtaactcggtgaaagtgaatccggcagcccagcctgtgtccagtccggctcagaccagtctcca

SEQ ID NO: 8819 - protein, 283 aa, Homo sapiens; identical to SEQ ID NO: 8817

SEQ ID NO: 8820 - DNA, 4916 bp, Homo sapiens
agactgtttccaaggacagtaagggcctcctggaagcagacccagcctttggagtttggggaggattaggatccttgctttgtgaagactgcttttcagaaccgtagttagagaacctcatctctgctcaccggctgtggttttattactgggacgacagcagctccgtcagcagcggcatcagcgacaccatagacaacctcagcactgatgacatcaacaccagctcctccatcagctcttatgccaacacacctgcctcctctcgaaaaaacctggatgtgcagactgatgctgagaagcactcacaggtggagaggaattccctgtggtctggtgatgatgtcaagaaatcagacggaggctcagacagcggcataaaaatggagccaggttccaagtggaggcggaatccttctgatgtgtctgacgagtccgacaaaagcacgtcgggcaagaagaatcctgtcatctcccagacaggctcatggcggcgaggcatgacagctcaggtgggcatcaccatgccaaggacgaagccttcagccccggcaggcgcactgaagaccccaggaactggaaaaacagacgacgcaaaggtgtctgagaaaggaaggctttctcctaaagcctcccaggtgaagcgctccccatcagatgcaggccggagcagtggtgacgaatccaaaaagcccctccccagcagctctaggacacctactgccaatgccaacagctttgggttcaagaagcagagtggttccgccgccggcctggccatgatcacagccagcggggtgactgtcaccagcaggtcagccacactgggcaaaatcccaaagtcatctgcactcgtcagtcggtctgctggtcggaagtcaagtatggatggggctcagaatcaggatgacgggtatctagccctaagctcccggacaaaccttcagtaccggagtttgccgaggcccagtaagtccaacagccggaacggggctgggaacaggtctagcaccagcagcatagattccaacattagcagcaagtccgcaggcctgccagtgcccaaactgagggagccttccaaaacagccctaggcagctctctaccaggtctggtcaaccaaacagacaaggagaaaggcatctcatcagacaacgagagtgtggcttcctgtaactcggtgaaagtgaatccggcagcccagcctgtgtccagtccggctcagaccagtctccagcctggagccaagtacccagatgtggcctctcccacactccgcagactctttggtgggaagcctaccaagcaagtgcccatcgccacagctgaaaacatgaaaaattcggtggtcatctccaatcctcatgccaccatgactcagcaaggtaacctagactccccgtcaggcagtggcgtcctgagcagtgggagcagcagtcctctctacagcaagaatgtggacctcaaccagtctccgctagcctccagccccagctcagcccactcggccccttccaacagcctcacctggggcaccaacgccagcagctcctccgcagttagcaaggatggcctgggctttcagtctgtcagcagcctccacaccagctgtgagtccatcgacatctccctcagcagtggaggggtccccagccacaattcttccactggcctcatcgcctcctccaaggacgactccttgactccctttgtcagaactaacagtgtgaagaccacactgtcagaaagtgacccgcaccttgataggaacactttgcctaagaaaggactcaggtatactcccacctcccagcttcgcacgcaagaagatgcaaaagaatggttacggtcccattctgcaggaggccttcaggacaccgctgccaattcccccttttcctctggctccagcgtgacttctccctccggaacaagattcaacttttcccagcttgcgagtcccaccactgtcacccagatgagcttgtccaacccgaccatgctgaggactcacagcctctccaatgctgatgggcagtatgatccatacactgacagccgcttccggaatagctccatgtccctggatgagaagagcagaaccatgagccgttcaggctcattccgggatgggtttgaagaagttcatggatcctcactctccttggtttccagcacatcgtcagtttattctacaccagaagaaaaatgccagtcagagattcgcaagctgcggcgggaactggatgcctcccaggagaaagtttcagctttgaccacccagctgacagcaaatgctcaccttgtggcagcctttgaacagagtcttggtaacatgacaatcaggctccagagtctgaccatgacagctgagcagaaggactcagaactgaatgagttaagaaaaaccattgagctgctaaagaaacagaacgcagctgcccaggctgccattaatggagtaattaacacacctgagctcaactgcaaaggaaacggcactgcccagtctgcagacctccgcatccgcaggcagcactcctcagacagcgtctccagcatcaacagtgccaccagccactccagcgtgggcagcaacatagagagtgactcaaagaagaagaagcggaagaactggttacgcagctccttcaagcaagctttcgggaagaagaagtccccaaaatctgcgtcctctcattcagatattgaggagatgacggattcttctttgccttcctcaccaaagttaccgcacaatgggtccacaggttccaccccactgctgaggaattctcactccaactctctaatttcagaatgcatggatagtgaagctgagaccgtcatgcagctccgaaatgagttaagagacaaggagatgaagctgacggatatccgcttagaagctctcagttctgcccaccagctggaccagctccgggaggccatgaacaggatgcagagtgaaatagagaagctgaaagctgagaatgatcggctgaagtcagagtctcaaggcagtggctgcagccgggctccttcccaagtgtccatctctgcctccccgaggcagtccatgggcctctcccagcacagcttgaacctcactgagtcaaccagcctggacatgttgctggatgacactggtgaatgctcggctcggaaggaaggaggcaggcatgttaagatagttgtcagctttcaggaggaaatgaagtggaaggaggattccagaccacatctctttcttattggctgcattggagttagtggcaagacgaagtgggatgtgctcgatggggtggttagacggctgttcaaagaatacatcattcatgtcgacccagtgagtcagctagggctgaattcagacagcgttcttggctacagcattggagaaatcaagcgcagcaacacttccgaaacaccggagctgcttccttgtggctatctggttggagagaacacgaccatctcagtgactgtgaaagggctcgcagaaaacagcctggactcactggtgtttgagtccttgattcccaagcccatcctgcagcgctacgtctccctcctgatagagcaccgtcggatcattctctctggccccagcggcactgggaaaacctacctggccaaccggctgtctgagtatatagtgcttcgagagggacgggagttgacagacggggttatcgccacctttaacgtggaccataagtccagcaaggaattgcgccagtacctgtccaaccttgctgaccagtgcaacagtgagaacaatgctgtggacatgcccctcgtcatcatcctggacaacctacaccacgtgagctctctgggagagatcttcaatgggctgctcaactgcaagtaccacaaatgcccttacataattggcacaatgaaccaggctacctcttcgactcccaacctgcagcttcaccataacttcagatgggtgctttgtgccaaccacacggagcctgtgaagggtttccttggccgattcctgaggaggaagctcatggaaacagagatcagtgggcgggtgcgcaatatggagctggtaaaaatcattgactggattcccaaggtctggcatcacctcaaccgcttcctggaggctcacagttcctcggacgtcaccatcggcccccggctcttcctgtcatgccccatcgatgtggacggctcgagagtgtggttcaccgacttgtggaactattccattatcccctatctcctggaagccgtcagagaaggactccagctctatggaaggcgcgccccctgggaggatcctgccaagtgggtgatggacacatatccatgggcagccagcccacaacagcacgagtggcctcccctgctgcagttacggcctgaggatgtcggcttcgacggctactccatgcctcgggagggatcgacaagcaagcagatgccccccagtgatgctgaaggtgacccgctgatgaacatgctgatgaggctgcaggaggcagccaactactccagcccccagagctatgacagcgactccaacagcaacagccatcacgatgacatcttggactcctctttggagtccactctgtgacaggggcccggagcccagcgccctcctcttctcctcaccgcattccacctgcatcccccacatcaccctgaagatgacttcctgagccagcccccagccacagccttagagctgcgggaacaccgagaccccccgtccttcagcctcgacctgggtgcaggcatcccgggccagctgcctgcggaccgcttccttccacagcgagaactgcactaccttctgttgtactttaattattgttttgccttgttgctgtgacctccctaagacactgaagatacttctcgggaaaggatcatcgccgttgaaatg

SEQ ID NO: 8821 - protein, 1406 aa, Homo sapiens
MEPGSKWRRNPSDVSDESDKSTSGKKNPVISQTGSWRRGMTAQVGITMPRTKPSAPAGALKTPGTGKTDDAKVSEKGRLSPKASQVKRSPSDAGRSSGDESKKPLPSSSRTPTANANSFGFKKQSGSAAGLAMITASGVTVTSRSATLGKIPKSSALVSRSAGRKSSMDGAQNQDDGYLALSSRTNLQYRSLPRPSKSNSRNGAGNRSSTSSIDSNISSKSAGLPVPKLREPSKTALGSSLPGLVNQTDKEKGISSDNESVASCNSVKVNPAAQPVSSPAQTSLQPGAKYPDVASPTLRRLFGGKPTKQVPIATAENMKNSVVISNPHATMTQQGNLDSPSGSGVLSSGSSSPLYSKNVDLNQSPLASSPSSAHSAPSNSLTWGTNASSSSAVSKDGLGFQSVSSLHTSCESIDISLSSGGVPSHNSSTGLIASSKDDSLTPFVRTNSVKTTLSESDPHLDRNTLPKKGLRYTPTSQLRTQEDAKEWLRSHSAGGLQDTAANSPFSSGSSVTSPSGTRFNFSQLASPTTVTQMSLSNPTMLRTHSLSNADGQYDPYTDSRFRNSSMSLDEKSRTMSRSGSFRDGFEEVHGSSLSLVSSTSSVYSTPEEKCQSEIRKLRRELDASQEKVSALTTQLTANAHLVAAFEQSLGNMTIRLQSLTMTAEQKDSELNELRKTIELLKKQNAAAQAAINGVINTPELNCKGNGTAQSADLRIRRQHSSDSVSSINSATSHSSVGSNIESDSKKKKRKNWLRSSFKQAFGKKKSPKSASSHSDIEEMTDSSLPSSPKLPHNGSTGSTPLLRNSHSNSLISECMDSEAETVMQLRNELRDKEMKLTDIRLEALSSAHQLDQLREAMNRMQSEIEKLKAENDRLKSESQGSGCSRAPSQVSISASPRQSMGLSQHSLNLTESTSLDMLLDDTGECSARKEGGRHVKIVVSFQEEMKWKEDSRPHLFLIGCIGVSGKTKWDVLDGVVRRLFKEYIIHVDPVSQLGLNSDSVLGYSIGEIKRSNTSETPELLPCGYLVGENTTISVTVKGLAENSLDSLVFESLIPKPILQRYVSLLIEHRRIILSGPSGTGKTYLANRLSEYIVLREGRELTDGVIATFNVDHKSSKELRQYLSNLADQCNSENNAVDMPLVIILDNLHHVSSLGEIFNGLLNCKYHKCPYIIGTMNQATSSTPNLQLHHNFRWVLCANHTEPVKGFLGRFLRRKLMETEISGRVRNMELVKIIDWIPKVWHHLNRFLEAHSSSDVTIGPRLFLSCPIDVDGSRVWFTDLWNYSIIPYLLEAVREGLQLYGRRAPWEDPAKWVMDTYPWAASPQQHEWPPLLQLRPEDVGFDGYSMPREGSTSKQMPPSDAEGDPLMNMLMRLQEAANYSSPQSYDSDSNSNSHHDDILDSSLESTL

SEQ ID NO: 8822 - DNA, 4982 bp, Homo sapiens
agactgtttccaaggacagtaagggcctcctggaagcagacccagcctttggagtttggggaggattaggatccttgctttgtgaagactgcttttcagaaccgtagttagagaacctcatctctgctcaccggctgtggttttattactgggacgacagcagctccgtcagcagcggcatcagcgacaccatagacaacctcagcactgatgacatcaacaccagctcctccatcagctcttatgccaacacacctgcctcctctcgaaaaaacctggatgtgcagactgatgctgagaagcactcacaggtggagaggaattccctgtggtctggtgatgatgtcaagaaatcagacggaggctcagacagcggcataaaaatggagccaggttccaagtggaggcggaatccttctgatgtgtctgacgagtccgacaaaagcacgtcgggcaagaagaatcctgtcatctcccagacaggctcatggcggcgaggcatgacagctcaggtgggcatcaccatgccaaggacgaagccttcagccccggcaggcgcactgaagaccccaggaactggaaaaacagacgacgcaaaggtgtctgagaaaggaaggctttctcctaaagcctcccaggtgaagcgctccccatcagatgcaggccggagcagtggtgacgaatccaaaaagcccctccccagcagctctaggacacctactgccaatgccaacagctttgggttcaagaagcagagtggttccgccgccggcctggccatgatcacagccagcggggtgactgtcaccagcaggtcagccacactgggcaaaatcccaaagtcatctgcactcgtcagtcggtctgctggtcggaagtcaagtatggatggggctcagaatcaggatgacgggtatctagccctaagctcccggacaaaccttcagtaccggagtttgccgaggcccagtaagtccaacagccggaacggggctgggaacaggtctagcaccagcagcatagattccaacattagcagcaagtccgcaggcctgccagtgcccaaactgagggagccttccaaaacagccctaggcagctctctaccaggtctggtcaaccaaacagacaaggagaaaggcatctcatcagacaacgagagtgtggcttcctgtaactcggtgaaagtgaatccggcagcccagcctgtgtccagtccggctcagaccagtctccagcctggagccaagtacccagatgtggcctctcccacactccgcagactctttggtgggaagcctaccaagcaagtgcccatcgccacagctgaaaacatgaaaaattcggtggtcatctccaatcctcatgccaccatgactcagcaaggtaacctagactccccgtcaggcagtggcgtcctgagcagtgggagcagcagtcctctctacagcaagaatgtggacctcaaccagtctccgctagcctccagccccagctcagcccactcggccccttccaacagcctcacctggggcaccaacgccagcagctcctccgcagttagcaaggatggcctgggctttcagtctgtcagcagcctccacaccagctgtgagtccatcgacatctccctcagcagtggaggggtccccagccacaattcttccactggcctcatcgcctcctccaaggacgactccttgactccctttgtcagaactaacagtgtgaagaccacactgtcagaaagccctctctcttcccctgctgctagccctaagttctgcagaagtactctgcccaggaaacaggacagtgacccgcaccttgataggaacactttgcctaagaaaggactcaggtatactcccacctcccagcttcgcacgcaagaagatgcaaaagaatggttacggtcccattctgcaggaggccttcaggacaccgctgccaattcccccttttcctctggctccagcgtgacttctccctccggaacaagattcaacttttcccagcttgcgagtcccaccactgtcacccagatgagcttgtccaacccgaccatgctgaggactcacagcctctccaatgctgatgggcagtatgatccatacactgacagccgcttccggaatagctccatgtccctggatgagaagagcagaaccatgagccgttcaggctcattccgggatgggtttgaagaagttcatggatcctcactctccttggtttccagcacatcgtcagtttattctacaccagaagaaaaatgccagtcagagattcgcaagctgcggcgggaactggatgcctcccaggagaaagtttcagctttgaccacccagctgacagcaaatgctcaccttgtggcagcctttgaacagagtcttggtaacatgacaatcaggctccagagtctgaccatgacagctgagcagaaggactcagaactgaatgagttaagaaaaaccattgagctgctaaagaaacagaacgcagctgcccaggctgccattaatggagtaattaacacacctgagctcaactgcaaaggaaacggcactgcccagtctgcagacctccgcatccgcaggcagcactcctcagacagcgtctccagcatcaacagtgccaccagccactccagcgtgggcagcaacatagagagtgactcaaagaagaagaagcggaagaactggttacgcagctccttcaagcaagctttcgggaagaagaagtccccaaaatctgcgtcctctcattcagatattgaggagatgacggattcttctttgccttcctcaccaaagttaccgcacaatgggtccacaggttccaccccactgctgaggaattctcactccaactctctaatttcagaatgcatggatagtgaagctgagaccgtcatgcagctccgaaatgagttaagagacaaggagatgaagctgacggatatccgcttagaagctctcagttctgcccaccagctggaccagctccgggaggccatgaacaggatgcagagtgaaatagagaagctgaaagctgagaatgatcggctgaagtcagagtctcaaggcagtggctgcagccgggctccttcccaagtgtccatctctgcctccccgaggcagtccatgggcctctcccagcacagcttgaacctcactgagtcaaccagcctggacatgttgctggatgacactggtgaatgctcggctcggaaggaaggaggcaggcatgttaagatagttgtcagctttcaggaggaaatgaagtggaaggaggattccagaccacatctctttcttattggctgcattggagttagtggcaagacgaagtgggatgtgctcgatggggtggttagacggctgttcaaagaatacatcattcatgtcgacccagtgagtcagctagggctgaattcagacagcgttcttggctacagcattggagaaatcaagcgcagcaacacttccgaaacaccggagctgcttccttgtggctatctggttggagagaacacgaccatctcagtgactgtgaaagggctcgcagaaaacagcctggactcactggtgtttgagtccttgattcccaagcccatcctgcagcgctacgtctccctcctgatagagcaccgtcggatcattctctctggccccagcggcactgggaaaacctacctggccaaccggctgtctgagtatatagtgcttcgagagggacgggagttgacagacggggttatcgccacctttaacgtggaccataagtccagcaaggaattgcgccagtacctgtccaaccttgctgaccagtgcaacagtgagaacaatgctgtggacatgcccctcgtcatcatcctggacaacctacaccacgtgagctctctgggagagatcttcaatgggctgctcaactgcaagtaccacaaatgcccttacataattggcacaatgaaccaggctacctcttcgactcccaacctgcagcttcaccataacttcagatgggtgctttgtgccaaccacacggagcctgtgaagggtttccttggccgattcctgaggaggaagctcatggaaacagagatcagtgggcgggtgcgcaatatggagctggtaaaaatcattgactggattcccaaggtctggcatcacctcaaccgcttcctggaggctcacagttcctcggacgtcaccatcggcccccggctcttcctgtcatgccccatcgatgtggacggctcgagagtgtggttcaccgacttgtggaactattccattatcccctatctcctggaagccgtcagagaaggactccagctctatggaaggcgcgccccctgggaggatcctgccaagtgggtgatggacacatatccatgggcagccagcccacaacagcacgagtggcctcccctgctgcagttacggcctgaggatgtcggcttcgacggctactccatgcctcgggagggatcgacaagcaagcagatgccccccagtgatgctgaaggtgacccgctgatgaacatgctgatgaggctgcaggaggcagccaactactccagcccccagagctatgacagcgactccaacagcaacagccatcacgatgacatcttggactcctctttggagtccactctgtgacaggggcccggagcccagcgccctcctcttctcctcaccgcattccacctgcatcccccacatcaccctgaagatgacttcctgagccagcccccagccacagccttagagctgcgggaacaccgagaccccccgtccttcagcctcgacctgggtgcaggcatcccgggccagctgcctgcggaccgcttccttccacagcgagaactgcactaccttctgttgtactttaattattgttttgccttgttgctgtgacctccctaagacactgaagatacttctcgggaaaggatcatcgccgttgaaatg

SEQ ID NO: 8823 - protein, 1428 aa, Homo sapiens
MEPGSKWRRNPSDVSDESDKSTSGKKNPVISQTGSWRRGMTAQVGITMPRTKPSAPAGALKTPGTGKTDDAKVSEKGRLSPKASQVKRSPSDAGRSSGDESKKPLPSSSRTPTANANSFGFKKQSGSAAGLAMITASGVTVTSRSATLGKIPKSSALVSRSAGRKSSMDGAQNQDDGYLALSSRTNLQYRSLPRPSKSNSRNGAGNRSSTSSIDSNISSKSAGLPVPKLREPSKTALGSSLPGLVNQTDKEKGISSDNESVASCNSVKVNPAAQPVSSPAQTSLQPGAKYPDVASPTLRRLFGGKPTKQVPIATAENMKNSVVISNPHATMTQQGNLDSPSGSGVLSSGSSSPLYSKNVDLNQSPLASSPSSAHSAPSNSLTWGTNASSSSAVSKDGLGFQSVSSLHTSCESIDISLSSGGVPSHNSSTGLIASSKDDSLTPFVRTNSVKTTLSESPLSSPAASPKFCRSTLPRKQDSDPHLDRNTLPKKGLRYTPTSQLRTQEDAKEWLRSHSAGGLQDTAANSPFSSGSSVTSPSGTRFNFSQLASPTTVTQMSLSNPTMLRTHSLSNADGQYDPYTDSRFRNSSMSLDEKSRTMSRSGSFRDGFEEVHGSSLSLVSSTSSVYSTPEEKCQSEIRKLRRELDASQEKVSALTTQLTANAHLVAAFEQSLGNMTIRLQSLTMTAEQKDSELNELRKTIELLKKQNAAAQAAINGVINTPELNCKGNGTAQSADLRIRRQHSSDSVSSINSATSHSSVGSNIESDSKKKKRKNWLRSSFKQAFGKKKSPKSASSHSDIEEMTDSSLPSSPKLPHNGSTGSTPLLRNSHSNSLISECMDSEAETVMQLRNELRDKEMKLTDIRLEALSSAHQLDQLREAMNRMQSEIEKLKAENDRLKSESQGSGCSRAPSQVSISASPRQSMGLSQHSLNLTESTSLDMLLDDTGECSARKEGGRHVKIVVSFQEEMKWKEDSRPHLFLIGCIGVSGKTKWDVLDGVVRRLFKEYIIHVDPVSQLGLNSDSVLGYSIGEIKRSNTSETPELLPCGYLVGENTTISVTVKGLAENSLDSLVFESLIPKPILQRYVSLLIEHRRIILSGPSGTGKTYLANRLSEYIVLREGRELTDGVIATFNVDHKSSKELRQYLSNLADQCNSENNAVDMPLVIILDNLHHVSSLGEIFNGLLNCKYHKCPYIIGTMNQATSSTPNLQLHHNFRWVLCANHTEPVKGFLGRFLRRKLMETEISGRVRNMELVKIIDWIPKVWHHLNRFLEAHSSSDVTIGPRLFLSCPIDVDGSRVWFTDLWNYSIIPYLLEAVREGLQLYGRRAPWEDPAKWVMDTYPWAASPQQHEWPPLLQLRPEDVGFDGYSMPREGSTSKQMPPSDAEGDPLMNMLMRLQEAANYSSPQSYDSDSNSNSHHDDILDSSLESTL

SEQ ID NO: 8824 - DNA, 7946 bp, Homo sapiens
agactgtttccaaggacagtaagggcctcctggaagcagacccagcctttggagtttggggaggattaggatccttgctttgtgaagactgcttttcagaaccgtagttagagaacctcatctctgctcaccggctgtggttttattactgggacgacagcagctccgtcagcagcggcatcagcgacaccatagacaacctcagcactgatgacatcaacaccagctcctccatcagctcttatgccaacacacctgcctcctctcgaaaaaacctggatgtgcagactgatgctgagaagcactcacaggtggagaggaattccctgtggtctggtgatgatgtcaagaaatcagacggaggctcagacagcggcataaaaatggagccaggttccaagtggaggcggaatccttctgatgtgtctgacgagtccgacaaaagcacgtcgggcaagaagaatcctgtcatctcccagacaggctcatggcggcgaggcatgacagctcaggtgggcatcaccatgccaaggacgaagccttcagccccggcaggcgcactgaagaccccaggaactggaaaaacagacgacgcaaaggtgtctgagaaaggaaggctttctcctaaagcctcccaggtgaagcgctccccatcagatgcaggccggagcagtggtgacgaatccaaaaagcccctccccagcagctctaggacacctactgccaatgccaacagctttgggttcaagaagcagagtggttccgccgccggcctggccatgatcacagccagcggggtgactgtcaccagcaggtcagccacactgggcaaaatcccaaagtcatctgcactcgtcagtcggtctgctggtcggaagtcaagtatggatggggctcagaatcaggatgacgggtatctagccctaagctcccggacaaaccttcagtaccggagtttgccgaggcccagtaagtccaacagccggaacggggctgggaacaggtctagcaccagcagcatagattccaacattagcagcaagtccgcaggcctgccagtgcccaaactgagggagccttccaaaacagccctaggcagctctctaccaggtctggtcaaccaaacagacaaggagaaaggcatctcatcagacaacgagagtgtggcttcctgtaactcggtgaaagtgaatccggcagcccagcctgtgtccagtccggctcagaccagtctccagcctggagccaagtacccagatgtggcctctcccacactccgcagactctttggtgggaagcctaccaagcaagtgcccatcgccacagctgaaaacatgaaaaattcggtggtcatctccaatcctcatgccaccatgactcagcaaggtaacctagactccccgtcaggcagtggcgtcctgagcagtgggagcagcagtcctctctacagcaagaatgtggacctcaaccagtctccgctagcctccagccccagctcagcccactcggccccttccaacagcctcacctggggcaccaacgccagcagctcctccgcagttagcaaggatggcctgggctttcagtctgtcagcagcctccacaccagctgtgagtccatcgacatctccctcagcagtggaggggtccccagccacaattcttccactggcctcatcgcctcctccaaggacgactccttgactccctttgtcagaactaacagtgtgaagaccacactgtcagaaagtgacccgcaccttgataggaacactttgcctaagaaaggactcaggtatactcccacctcccagcttcgcacgcaagaagatgcaaaagaatggttacggtcccattctgcaggaggccttcaggacaccgctgccaattcccccttttcctctggctccagcgtgacttctccctccggaacaagattcaacttttcccagcttgcgagtcccaccactgtcacccagatgagcttgtccaacccgaccatgctgaggactcacagcctctccaatgctgatgggcagtatgatccatacactgacagccgcttccggaatagctccatgtccctggatgagaagagcagaaccatgagccgttcaggctcattccgggatgggtttgaagaagttcatggatcctcactctccttggtttccagcacatcgtcagtttattctacaccagaagaaaaatgccagtcagagattcgcaagctgcggcgggaactggatgcctcccaggagaaagtttcagctttgaccacccagctgacagcaaatgctcaccttgtggcagcctttgaacagagtcttggtaacatgacaatcaggctccagagtctgaccatgacagctgagcagaaggactcagaactgaatgagttaagaaaaaccattgagctgctaaagaaacagaacgcagctgcccaggctgccattaatggagtaattaacacacctgagctcaactgcaaaggaaacggcactgcccagtctgcagacctccgcatccgcaggcagcactcctcagacagcgtctccagcatcaacagtgccaccagccactccagcgtgggcagcaacatagagagtgactcaaagaagaagaagcggaagaactggttacgcagctccttcaagcaagctttcgggaagaagaagtccccaaaatctgcgtcctctcattcagatattgaggagatgacggattcttctttgccttcctcaccaaagttaccgcacaatgggtccacaggttccaccccactgctgaggaattctcactccaactctctaatttcagaatgcatggatagtgaagctgagaccgtcatgcagctccgaaatgagttaagagacaaggagatgaagctgacggatatccgcttagaagctctcagttctgcccaccagctggaccagctccgggaggccatgaacaggatgcagagtgaaatagagaagctgaaagctgagaatgatcggctgaagtcagagtctcaaggcagtggctgcagccgggctccttcccaagtgtccatctctgcctccccgaggcagtccatgggcctctcccagcacagcttgaacctcactgagtcaaccagcctggacatgttgctggatgacactggtgaatgctcggctcggaaggaaggaggcaggcatgttaagatagttgtcagctttcaggaggaaatgaagtggaaggaggattccagaccacatctctttcttattggctgcattggagttagtggcaagacgaagtgggatgtgctcgatggggtggttagacggctgttcaaagaatacatcattcatgtcgacccagtgagtcagctagggctgaattcagacagcgttcttggctacagcattggagaaatcaagcgcagcaacacttccgaaacaccggagctgcttccttgtggctatctggttggagagaacacgaccatctcagtgactgtgaaagggctcgcagaaaacagcctggactcactggtgtttgagtccttgattcccaagcccatcctgcagcgctacgtctccctcctgatagagcaccgtcggatcattctctctggccccagcggcactgggaaaacctacctggccaaccggctgtctgagtatatagtgcttcgagagggacgggagttgacagacggggttatcgccacctttaacgtggaccataagtccagcaaggaattgcgccagtacctgtccaaccttgctgaccagtgcaacagtgagaacaatgctgtggacatgcccctcgtcatcatcctggacaacctacaccacgtgagctctctgggagagatcttcaatgggctgctcaactgcaagtaccacaaatgcccttacataattggcacaatgaaccaggctacctcttcgactcccaacctgcagcttcaccataacttcagatgggtgctttgtgccaaccacacggagcctgtgaagggtttccttggccgattcctgaggaggaagctcatggaaacagagatcagtgggcgggtgcgcaatatggagctggtaaaaatcattgactggattcccaaggtctggcatcacctcaaccgcttcctggaggctcacagttcctcggacgtcaccatcggcccccggctcttcctgtcatgccccatcgatgtggacggctcgagagtgtggttcaccgacttgtggaactattccattatcccctatctcctggaagccgtcagagaaggactccagctctatggaaggcgcgccccctgggaggatcctgccaagtgggtgatggacacatatccatgggcagccagcccacaacagcacgagtggcctcccctgctgcagttacggcctgaggatgtcggcttcgacggctactccatgcctcgggagggatcgacaagcaagcagatgccccccagtgatgctgaaggtgacccgctgatgaacatgctgatgaggctgcaggaggcagccaactactccagcccccagagctatgacagcgactccaacagcaacagccatcacgatgacatcttggactcctctttggagtccactctgtgacaggggcccggagcccagcgccctcctcttctcctcaccgcattccacctgcatcccccacatcaccctgaagatgacttcctgagccagcccccagccacagccttagagctgcgggaacaccgagaccccccgtccttcagcctcgacctgggtgcaggcatcccgggccagctgcctgcggaccgcttccttccacagcgagaactgcactaccttctgttgtactttaattattgttttgccttgttgctgtgacctccctaagacactgaagatacttctcgggaaaggatcatcgccgttgaaatgaaaagagagacagagagaaaaaaaaaaagagaacccacatgaagctctgaaaccaaacagcatcctgccatgagcttcccagagacagaagagactggagcaaagtcggaaacacagagaagcacggcttcccctcagcacagaccctccagactgggtctcagagccgtgccacccaccctcccacacagccggccacagggagaactggtgctaaccagggtgcttgctttggtcacgttcaacgcactacagagctacgacacagggaaaccttaggagcaaataaaccgtgctttcatgttttttaaatggtgctttccttacccgagaggtattttgcctgttccaatcaaaccaccccattcaggtccatcagcctctgattaatatccgtgagagtgagtgacggagtgagagtgtgagcgagtggatgtggctgtcagtgcagaacagcatgtgtctctttccttctgatatatgaatgaatcaggtttttttttttttttttctgcaaacactgtgtatagtgagacttgttctactttggagaacaggttaccttttgaaaatgaggttgagtttcttcctttctgatgcattgatttttgaagatttttttttcccccttcccctcttggtcagaatcaatcctttggtgaaagtaagaaccgcaggagttgagttttggtttggtcctgctcagttttggtttttagttgtccatcctcacagtcctacacactcgcctcctcctgctagggctgggggtatctgtgtcctttaaaatggatgaggacctggtcctcgacatgtgggtgagccatggaccttgccttcccttctcgtccttgagggtttagaacacacaccaacacctccagcgtccccgccccagcttccggtggggtgatgcggtcaccctgcaaaagacttgcactttcctcagaaccaacatgacgcagctcaataagggtgagggtcactccctcccagaagccccgtctggacgagccttgcctgacctcttcggtgctgaccttcccaaagtgatgccttactggttttgtactaactgtgttcattttacataagtgtcgtgcctgcctggggtttgttttttttgtcattgttttccccattgaaacaaacagggctaaaaagtcatctgttcattaggagaactcaagttgctgtgacttttctcatccaaaagactcatttgtgtggatgcgtgaccatgggaaaaagaaaaaaaaaaagatccattttttaggttcttttcggtctccagctgacaacccaactggacaatgatctgtctggtgcaggagaaggcaaaagtttctacaagtctacatgaccttgctgatacttgttctaatagaaacccagtctgctgtgtcttcaacatactggtattttcattacaaagtatggtaaatttttgagttgtttgtttctgttttgtaaagagaatccttattggacaccagtgaaggtgtctctgttttaatgatcagggtttttattccatcttttgcatttcttctatttctgaaggtttgtctcttggcatctttttttagtttcttaccataagagtttgacccgaaactgctcacttcacattggatgacaccatgttcttcctctttgaaaagaaaaggggaatgtgtcccactagtgaaaggaaaacttttcaacactatccctgctttagtctcagcaaactcagactattctgcttagccttcattagtcatctgggtgtgagtgtgtcttgttctgtttttctttttaataaaacttttaaaccatatatttagcctgtgaccaggggggccaaaccctaagatttctggtaaacctgaagggtggccctcctcagacaatttatctcccagcaatgaccctactacactcgcgtactgtgaatttgggaggaggtaaagttgacttctcctcgtgggcagttttccaatcaccttgtgagtagacacctgccaatattgtttgaaacctttttttaatatgacatcctctcttgtcattctcttctcccctttcccacagacttccctcctgggtccaggttcagaaccaagacttctgtacctagtgctgcctgattggtgaacattgacttcaagtagcatagcccttgtgtgactcacaactccgtgtccttcctaaagtttcgggaagcagggttgtctaatatgcacatttcttattttggtcatatttttactttagtgtcactcaccttttacaaagtgactttgtactcatttagggctctatcggaaatgcttccattttgccttttctacagttaggccaattttgaaatatataaattctatgcaacatttatgttgagttaccaatggaagccaaaagttctcttcccaaactgccaagaatgatacaggccataattgaaatgggaataccttttaagtttcattaggggtggggtgggagtgggacaggaacaagacttgcctagatctttgttgtatcttggggacttttactttgttgtttgatgcttaaacttcaaaattctctgtattcaaatttgattgtggcgaatctacttcaaaaaggaaaaataatccaactttgtggatattaaatggaaggtttgctgttttgatctagttgtttccagtggagcagttttatgaaatatgttctataagatgtacattttttcattgtaacatagaaattgtaaataattgattaaagtgctgcattttgatgaattttttctagccatttttaaagagaaaactaggaattgagtattttgtgtacggtatgtttccatcctccctccccttcctcctcccctcctctctctctcttcctacctatttaattttcatttgtcatgaggtttttggatttgccaatgatctgctggacatcatgccccatgtcatagagaataaagctgatgattgtaccagtcttaaattattcatgattcaataaaattgatgcttatttattcag

SEQ ID NO: 8825 - protein, 1406 aa, Homo sapiens; identical to SEQ ID NO: 8821

SEQ ID NO: 8826 - DNA, 8012 bp, Homo sapiens
agactgtttccaaggacagtaagggcctcctggaagcagacccagcctttggagtttggggaggattaggatccttgctttgtgaagactgcttttcagaaccgtagttagagaacctcatctctgctcaccggctgtggttttattactgggacgacagcagctccgtcagcagcggcatcagcgacaccatagacaacctcagcactgatgacatcaacaccagctcctccatcagctcttatgccaacacacctgcctcctctcgaaaaaacctggatgtgcagactgatgctgagaagcactcacaggtggagaggaattccctgtggtctggtgatgatgtcaagaaatcagacggaggctcagacagcggcataaaaatggagccaggttccaagtggaggcggaatccttctgatgtgtctgacgagtccgacaaaagcacgtcgggcaagaagaatcctgtcatctcccagacaggctcatggcggcgaggcatgacagctcaggtgggcatcaccatgccaaggacgaagccttcagccccggcaggcgcactgaagaccccaggaactggaaaaacagacgacgcaaaggtgtctgagaaaggaaggctttctcctaaagcctcccaggtgaagcgctccccatcagatgcaggccggagcagtggtgacgaatccaaaaagcccctccccagcagctctaggacacctactgccaatgccaacagctttgggttcaagaagcagagtggttccgccgccggcctggccatgatcacagccagcggggtgactgtcaccagcaggtcagccacactgggcaaaatcccaaagtcatctgcactcgtcagtcggtctgctggtcggaagtcaagtatggatggggctcagaatcaggatgacgggtatctagccctaagctcccggacaaaccttcagtaccggagtttgccgaggcccagtaagtccaacagccggaacggggctgggaacaggtctagcaccagcagcatagattccaacattagcagcaagtccgcaggcctgccagtgcccaaactgagggagccttccaaaacagccctaggcagctctctaccaggtctggtcaaccaaacagacaaggagaaaggcatctcatcagacaacgagagtgtggcttcctgtaactcggtgaaagtgaatccggcagcccagcctgtgtccagtccggctcagaccagtctccagcctggagccaagtacccagatgtggcctctcccacactccgcagactctttggtgggaagcctaccaagcaagtgcccatcgccacagctgaaaacatgaaaaattcggtggtcatctccaatcctcatgccaccatgactcagcaaggtaacctagactccccgtcaggcagtggcgtcctgagcagtgggagcagcagtcctctctacagcaagaatgtggacctcaaccagtctccgctagcctccagccccagctcagcccactcggccccttccaacagcctcacctggggcaccaacgccagcagctcctccgcagttagcaaggatggcctgggctttcagtctgtcagcagcctccacaccagctgtgagtccatcgacatctccctcagcagtggaggggtccccagccacaattcttccactggcctcatcgcctcctccaaggacgactccttgactccctttgtcagaactaacagtgtgaagaccacactgtcagaaagccctctctcttcccctgctgctagccctaagttctgcagaagtactctgcccaggaaacaggacagtgacccgcaccttgataggaacactttgcctaagaaaggactcaggtatactcccacctcccagcttcgcacgcaagaagatgcaaaagaatggttacggtcccattctgcaggaggccttcaggacaccgctgccaattcccccttttcctctggctccagcgtgacttctccctccggaacaagattcaacttttcccagcttgcgagtcccaccactgtcacccagatgagcttgtccaacccgaccatgctgaggactcacagcctctccaatgctgatgggcagtatgatccatacactgacagccgcttccggaatagctccatgtccctggatgagaagagcagaaccatgagccgttcaggctcattccgggatgggtttgaagaagttcatggatcctcactctccttggtttccagcacatcgtcagtttattctacaccagaagaaaaatgccagtcagagattcgcaagctgcggcgggaactggatgcctcccaggagaaagtttcagctttgaccacccagctgacagcaaatgctcaccttgtggcagcctttgaacagagtcttggtaacatgacaatcaggctccagagtctgaccatgacagctgagcagaaggactcagaactgaatgagttaagaaaaaccattgagctgctaaagaaacagaacgcagctgcccaggctgccattaatggagtaattaacacacctgagctcaactgcaaaggaaacggcactgcccagtctgcagacctccgcatccgcaggcagcactcctcagacagcgtctccagcatcaacagtgccaccagccactccagcgtgggcagcaacatagagagtgactcaaagaagaagaagcggaagaactggttacgcagctccttcaagcaagctttcgggaagaagaagtccccaaaatctgcgtcctctcattcagatattgaggagatgacggattcttctttgccttcctcaccaaagttaccgcacaatgggtccacaggttccaccccactgctgaggaattctcactccaactctctaatttcagaatgcatggatagtgaagctgagaccgtcatgcagctccgaaatgagttaagagacaaggagatgaagctgacggatatccgcttagaagctctcagttctgcccaccagctggaccagctccgggaggccatgaacaggatgcagagtgaaatagagaagctgaaagctgagaatgatcggctgaagtcagagtctcaaggcagtggctgcagccgggctccttcccaagtgtccatctctgcctccccgaggcagtccatgggcctctcccagcacagcttgaacctcactgagtcaaccagcctggacatgttgctggatgacactggtgaatgctcggctcggaaggaaggaggcaggcatgttaagatagttgtcagctttcaggaggaaatgaagtggaaggaggattccagaccacatctctttcttattggctgcattggagttagtggcaagacgaagtgggatgtgctcgatggggtggttagacggctgttcaaagaatacatcattcatgtcgacccagtgagtcagctagggctgaattcagacagcgttcttggctacagcattggagaaatcaagcgcagcaacacttccgaaacaccggagctgcttccttgtggctatctggttggagagaacacgaccatctcagtgactgtgaaagggctcgcagaaaacagcctggactcactggtgtttgagtccttgattcccaagcccatcctgcagcgctacgtctccctcctgatagagcaccgtcggatcattctctctggccccagcggcactgggaaaacctacctggccaaccggctgtctgagtatatagtgcttcgagagggacgggagttgacagacggggttatcgccacctttaacgtggaccataagtccagcaaggaattgcgccagtacctgtccaaccttgctgaccagtgcaacagtgagaacaatgctgtggacatgcccctcgtcatcatcctggacaacctacaccacgtgagctctctgggagagatcttcaatgggctgctcaactgcaagtaccacaaatgcccttacataattggcacaatgaaccaggctacctcttcgactcccaacctgcagcttcaccataacttcagatgggtgctttgtgccaaccacacggagcctgtgaagggtttccttggccgattcctgaggaggaagctcatggaaacagagatcagtgggcgggtgcgcaatatggagctggtaaaaatcattgactggattcccaaggtctggcatcacctcaaccgcttcctggaggctcacagttcctcggacgtcaccatcggcccccggctcttcctgtcatgccccatcgatgtggacggctcgagagtgtggttcaccgacttgtggaactattccattatcccctatctcctggaagccgtcagagaaggactccagctctatggaaggcgcgccccctgggaggatcctgccaagtgggtgatggacacatatccatgggcagccagcccacaacagcacgagtggcctcccctgctgcagttacggcctgaggatgtcggcttcgacggctactccatgcctcgggagggatcgacaagcaagcagatgccccccagtgatgctgaaggtgacccgctgatgaacatgctgatgaggctgcaggaggcagccaactactccagcccccagagctatgacagcgactccaacagcaacagccatcacgatgacatcttggactcctctttggagtccactctgtgacaggggcccggagcccagcgccctcctcttctcctcaccgcattccacctgcatcccccacatcaccctgaagatgacttcctgagccagcccccagccacagccttagagctgcgggaacaccgagaccccccgtccttcagcctcgacctgggtgcaggcatcccgggccagctgcctgcggaccgcttccttccacagcgagaactgcactaccttctgttgtactttaattattgttttgccttgttgctgtgacctccctaagacactgaagatacttctcgggaaaggatcatcgccgttgaaatgaaaagagagacagagagaaaaaaaaaaagagaacccacatgaagctctgaaaccaaacagcatcctgccatgagcttcccagagacagaagagactggagcaaagtcggaaacacagagaagcacggcttcccctcagcacagaccctccagactgggtctcagagccgtgccacccaccctcccacacagccggccacagggagaactggtgctaaccagggtgcttgctttggtcacgttcaacgcactacagagctacgacacagggaaaccttaggagcaaataaaccgtgctttcatgttttttaaatggtgctttccttacccgagaggtattttgcctgttccaatcaaaccaccccattcaggtccatcagcctctgattaatatccgtgagagtgagtgacggagtgagagtgtgagcgagtggatgtggctgtcagtgcagaacagcatgtgtctctttccttctgatatatgaatgaatcaggtttttttttttttttttctgcaaacactgtgtatagtgagacttgttctactttggagaacaggttaccttttgaaaatgaggttgagtttcttcctttctgatgcattgatttttgaagatttttttttcccccttcccctcttggtcagaatcaatcctttggtgaaagtaagaaccgcaggagttgagttttggtttggtcctgctcagttttggtttttagttgtccatcctcacagtcctacacactcgcctcctcctgctagggctgggggtatctgtgtcctttaaaatggatgaggacctggtcctcgacatgtgggtgagccatggaccttgccttcccttctcgtccttgagggtttagaacacacaccaacacctccagcgtccccgccccagcttccggtggggtgatgcggtcaccctgcaaaagacttgcactttcctcagaaccaacatgacgcagctcaataagggtgagggtcactccctcccagaagccccgtctggacgagccttgcctgacctcttcggtgctgaccttcccaaagtgatgccttactggttttgtactaactgtgttcattttacataagtgtcgtgcctgcctggggtttgttttttttgtcattgttttccccattgaaacaaacagggctaaaaagtcatctgttcattaggagaactcaagttgctgtgacttttctcatccaaaagactcatttgtgtggatgcgtgaccatgggaaaaagaaaaaaaaaaagatccattttttaggttcttttcggtctccagctgacaacccaactggacaatgatctgtctggtgcaggagaaggcaaaagtttctacaagtctacatgaccttgctgatacttgttctaatagaaacccagtctgctgtgtcttcaacatactggtattttcattacaaagtatggtaaatttttgagttgtttgtttctgttttgtaaagagaatccttattggacaccagtgaaggtgtctctgttttaatgatcagggtttttattccatcttttgcatttcttctatttctgaaggtttgtctcttggcatctttttttagtttcttaccataagagtttgacccgaaactgctcacttcacattggatgacaccatgttcttcctctttgaaaagaaaaggggaatgtgtcccactagtgaaaggaaaacttttcaacactatccctgctttagtctcagcaaactcagactattctgcttagccttcattagtcatctgggtgtgagtgtgtcttgttctgtttttctttttaataaaacttttaaaccatatatttagcctgtgaccaggggggccaaaccctaagatttctggtaaacctgaagggtggccctcctcagacaatttatctcccagcaatgaccctactacactcgcgtactgtgaatttgggaggaggtaaagttgacttctcctcgtgggcagttttccaatcaccttgtgagtagacacctgccaatattgtttgaaacctttttttaatatgacatcctctcttgtcattctcttctcccctttcccacagacttccctcctgggtccaggttcagaaccaagacttctgtacctagtgctgcctgattggtgaacattgacttcaagtagcatagcccttgtgtgactcacaactccgtgtccttcctaaagtttcgggaagcagggttgtctaatatgcacatttcttattttggtcatatttttactttagtgtcactcaccttttacaaagtgactttgtactcatttagggctctatcggaaatgcttccattttgccttttctacagttaggccaattttgaaatatataaattctatgcaacatttatgttgagttaccaatggaagccaaaagttctcttcccaaactgccaagaatgatacaggccataattgaaatgggaataccttttaagtttcattaggggtggggtgggagtgggacaggaacaagacttgcctagatctttgttgtatcttggggacttttactttgttgtttgatgcttaaacttcaaaattctctgtattcaaatttgattgtggcgaatctacttcaaaaaggaaaaataatccaactttgtggatattaaatggaaggtttgctgttttgatctagttgtttccagtggagcagttttatgaaatatgttctataagatgtacattttttcattgtaacatagaaattgtaaataattgattaaagtgctgcattttgatgaattttttctagccatttttaaagagaaaactaggaattgagtattttgtgtacggtatgtttccatcctccctccccttcctcctcccctcctctctctctcttcctacctatttaattttcatttgtcatgaggtttttggatttgccaatgatctgctggacatcatgccccatgtcatagagaataaagctgatgattgtaccagtcttaaattattcatgattcaataaaattgatgcttatttattcag

SEQ ID NO: 8827 - protein, 1428 aa, Homo sapiens; identical to SEQ ID NO: 8823

SEQ ID NO: 8828 - DNA, 8500 bp, Homo sapiens
agactgtttccaaggacagtaagggcctcctggaagcagacccagcctttggagtttggggaggattaggatccttgctttgtgaagactgcttttcagaaccgtagttagagaacctcatctctgctcaccggctgtggttttattactgggacgacagcagctccgtcagcagcggcatcagcgacaccatagacaacctcagcactgatgacatcaacaccagctcctccatcagctcttatgccaacacacctgcctcctctcgaaaaaacctggatgtgcagactgatgctgagaagcactcacaggtggagaggaattccctgtggtctggtgatgatgtcaagaaatcagacggaggctcagacagcggcataaaaatggagccaggttccaagtggaggcggaatccttctgatgtgtctgacgagtccgacaaaagcacgtcgggcaagaagaatcctgtcatctcccagacaggctcatggcggcgaggcatgacagctcaggtgggcatcaccatgccaaggacgaagccttcagccccggcaggcgcactgaagaccccaggaactggaaaaacagacgacgcaaaggtgtctgagaaaggaaggctttctcctaaagcctcccaggtgaagcgctccccatcagatgcaggccggagcagtggtgacgaatccaaaaagcccctccccagcagctctaggacacctactgccaatgccaacagctttgggttcaagaagcagagtggttccgccgccggcctggccatgatcacagccagcggggtgactgtcaccagcaggtcagccacactgggcaaaatcccaaagtcatctgcactcgtcagtcggtctgctggtcggaagtcaagtatggatggggctcagaatcaggatgacgggtatctagccctaagctcccggacaaaccttcagtaccggagtttgccgaggcccagtaagtccaacagccggaacggggctgggaacaggtctagcaccagcagcatagattccaacattagcagcaagtccgcaggcctgccagtgcccaaactgagggagccttccaaaacagccctaggcagctctctaccaggtctggtcaaccaaacagacaaggagaaaggcatctcatcagacaacgagagtgtggcttcctgtaactcggtgaaagtgaatccggcagcccagcctgtgtccagtccggctcagaccagtctccagcctggagccaagtacccagatgtggcctctcccacactccgcagactctttggtgggaagcctaccaagcaagtgcccatcgccacagctgaaaacatgaaaaattcggtggtcatctccaatcctcatgccaccatgactcagcaaggtaacctagactccccgtcaggcagtggcgtcctgagcagtgggagcagcagtcctctctacagcaagaatgtggacctcaaccagtctccgctagcctccagccccagctcagcccactcggccccttccaacagcctcacctggggcaccaacgccagcagctcctccgcagttagcaaggatggcctgggctttcagtctgtcagcagcctccacaccagctgtgagtccatcgacatctccctcagcagtggaggggtccccagccacaattcttccactggcctcatcgcctcctccaaggacgactccttgactccctttgtcagaactaacagtgtgaagaccacactgtcagaaagccctctctcttcccctgctgctagccctaagttctgcagaagtactctgcccaggaaacaggacagtgacccgcaccttgataggaacactttgcctaagaaaggactcaggtatactcccacctcccagcttcgcacgcaagaagatgcaaaagaatggttacggtcccattctgcaggaggccttcaggacaccgctgccaattcccccttttcctctggctccagcgtgacttctccctccggaacaagattcaacttttcccagcttgcgagtcccaccactgtcacccagatgagcttgtccaacccgaccatgctgaggactcacagcctctccaatgctgatgggcagtatgatccatacactgacagccgcttccggaatagctccatgtccctggatgagaagagcagaaccatgagccgttcaggctcattccgggatgggtttgaagaagttcatggatcctcactctccttggtttccagcacatcgtcagtttattctacaccagaagaaaaatgccagtcagagattcgcaagctgcggcgggaactggatgcctcccaggagaaagtttcagctttgaccacccagctgacagcaaatgctcaccttgtggcagcctttgaacagagtcttggtaacatgacaatcaggctccagagtctgaccatgacagctgagcagaaggactcagaactgaatgagttaagaaaaaccattgagctgctaaagaaacagaacgcagctgcccaggctgccattaatggagtaattaacacacctgagctcaactgcaaaggaaacggcactgcccagtctgcagacctccgcatccgcaggcagcactcctcagacagcgtctccagcatcaacagtgccaccagccactccagcgtgggcagcaacatagagagtgactcaaagaagaagaagcggaagaactggttacgcagctccttcaagcaagctttcgggaagaagaagtccccaaaatctgcgtcctctcattcagatattgaggagatgacggattcttctttgccttcctcaccaaagttaccgcacaatgggtccacaggttccaccccactgctgaggaattctcactccaactctctaatttcagaatgcatggatagtgaagctgagaccgtcatgcagctccgaaatgagttaagagacaaggagatgaagctgacggatatccgcttagaagctctcagttctgcccaccagctggaccagctccgggaggccatgaacaggatgcagagtgaaatagagaagctgaaagctgagaatgatcggctgaagtcagagtctcaaggcagtggctgcagccgggctccttcccaagtgtccatctctgcctccccgaggcagtccatgggcctctcccagcacagcttgaacctcactgagtcaaccagcctggacatgttgctggatgacactggtgaatgctcggctcggaaggaaggaggcaggcatgttaagatagttgtcagctttcaggaggaaatgaagtggaaggaggattccagaccacatctctttcttattggctgcattggagttagtggcaagacgaagtgggatgtgctcgatggggtggttagacggctgttcaaagaatacatcattcatgtcgacccagtgagtcagctagggctgaattcagacagcgttcttggctacagcattggagaaatcaagcgcagcaacacttccgaaacaccggagctgcttccttgtggctatctggttggagagaacacgaccatctcagtgactgtgaaagggctcgcagaaaacagcctggactcactggtgtttgagtccttgattcccaagcccatcctgcagcgctacgtctccctcctgatagagcaccgtcggatcattctctctggccccagcggcactgggaaaacctacctggccaaccggctgtctgagtatatagtgcttcgagagggacgggagttgacagacggggttatcgccacctttaacgtggaccataagtccagcaaggaattgcgccagtacctgtccaaccttgctgaccagtgcaacagtgagaacaatgctgtggacatgcccctcgtcatcatcctggacaacctacaccacgtgagctctctgggagagatcttcaatgggctgctcaactgcaagtaccacaaatgcccttacataattggcacaatgaaccaggctacctcttcgactcccaacctgcagcttcaccataacttcagatgggtgctttgtgccaaccacacggagcctgtgaagggtttccttggccgattcctgaggaggaagctcatggaaacagagatcagtgggcgggtgcgcaatatggagctggtaaaaatcattgactggattcccaaggtctggcatcacctcaaccgcttcctggaggctcacagttcctcggacgtcaccatcggcccccggctcttcctgtcatgccccatcgatgtggacggctcgagagtgtggttcaccgacttgtggaactattccattatcccctatctcctggaagccgtcagagaaggactccagctctatggaaggcgcgccccctgggaggatcctgccaagtgggtgatggacacatatccatgggcagccagcccacaacagcacgagtggcctcccctgctgcagttacggcctgaggatgtcggcttcgacggctactccatgcctcgggagggatcgacaagcaagcagatgccccccagtgatgctgaaggtgacccgctgatgaacatgctgatgaggctgcaggaggcagccaactactccagcccccagagctatgacagcgactccaacagcaacagccatcacgatgacatcttggactcctctttggagtccactctgtgacaggggcccggagcccagcgccctcctcttctcctcaccgcattccacctgcatcccccacatcaccctgaagatgacttcctgagccagcccccagccacagccttagagctgcgggaacaccgagaccccccgtccttcagcctcgacctgggtgcaggcatcccgggccagctgcctgcggaccgcttccttccacagcgagaactgcactaccttctgttgtactttaattattgttttgccttgttgctgtgacctccctaagacactgaagatacttctcgggaaaggatcatcgccgttgaaatgaaaagagagacagagagaaaaaaaaaaagagaacccacatgaagctctgaaaccaaacagcatcctgccatgagcttcccagagacagaagagactggagcaaagtcggaaacacagagaagcacggcttcccctcagcacagaccctccagactgggtctcagagccgtgccacccaccctcccacacagccggccacagggagaactggtgctaaccagggtgcttgctttggtcacgttcaacgcactacagagctacgacacagggaaaccttaggagcaaataaaccgtgctttcatgttttttaaatggtgctttccttacccgagaggtattttgcctgttccaatcaaaccaccccattcaggtccatcagcctctgattaatatccgtgagagtgagtgacggagtgagagtgtgagcgagtggatgtggctgtcagtgcagaacagcatgtgtctctttccttctgatatatgaatgaatcaggtttttttttttttttttctgcaaacactgtgtatagtgagacttgttctactttggagaacaggttaccttttgaaaatgaggttgagtttcttcctttctgatgcattgatttttgaagatttttttttcccccttcccctcttggtcagaatcaatcctttggtgaaagtaagaaccgcaggagttgagttttggtttggtcctgctcagttttggtttttagttgtccatcctcacagtcctacacactcgcctcctcctgctagggctgggggtatctgtgtcctttaaaatggatgaggacctggtcctcgacatgtgggtgagccatggaccttgccttcccttctcgtccttgagggtttagaacacacaccaacacctccagcgtccccgccccagcttccggtggggtgatgcggtcaccctgcaaaagacttgcactttcctcagaaccaacatgacgcagctcaataagggtgagggtcactccctcccagaagccccgtctggacgagccttgcctgacctcttcggtgctgaccttcccaaagtgatgccttactggttttgtactaactgtgttcattttacataagtgtcgtgcctgcctggggtttgttttttttgtcattgttttccccattgaaacaaacagggctaaaaagtcatctgttcattaggagaactcaagttgctgtgacttttctcatccaaaagactcatttgtgtggatgcgtgaccatgggaaaaagaaaaaaaaaaagatccattttttaggttcttttcggtctccagctgacaacccaactggacaatgatctgtctggtgcaggagaaggcaaaagtttctacaagtctacatgaccttgctgatacttgttctaatagaaacccagtctgctgtgtcttcaacatactggtattttcattacaaagtatggtaaatttttgagttgtttgtttctgttttgtaaagagaatccttattggacaccagtgaaggtgtctctgttttaatgatcagggtttttattccatcttttgcatttcttctatttctgaaggtttgtctcttggcatctttttttagtttcttaccataagagtttgacccgaaactgctcacttcacattggatgacaccatgttcttcctctttgaaaagaaaaggggaatgtgtcccactagtgaaaggaaaacttttcaacactatccctgctttagtctcagcaaactcagactattctgcttagccttcattagtcatctgggtgtgagtgtgtcttgttctgtttttctttttaataaaacttttaaaccatatatttagcctgtgaccaggggggccaaaccctaagatttctggtaaacctgaagggtggccctcctcagacaatttatctcccagcaatgaccctactacactcgcgtactgtgaatttgggaggaggtaaagttgacttctcctcgtgggcagttttccaatcaccttgtgagtagacacctgccaatattgtttgaaacctttttttaatatgacatcctctcttgtcattctcttctcccctttcccacagacttccctcctgggtccaggttcagaaccaagacttctgtacctagtgctgcctgattggtgaacattgacttcaagtagcatagcccttgtgtgactcacaactccgtgtccttcctaaagtttcgggaagcagggttgtctaatatgcacatttcttattttggtcatatttttactttagtgtcactcaccttttacaaagtgactttgtactcatttagggctctatcggaaatgcttccattttgccttttctacagttaggccaattttgaaatatataaattctatgcaacatttatgttgagttaccaatggaagccaaaagttctcttcccaaactgccaagaatgatacaggccataattgaaatgggaataccttttaagtttcattaggggtggggtgggagtgggacaggaacaagacttgcctagatctttgttgtatcttggggacttttactttgttgtttgatgcttaaacttcaaaattctctgtattcaaatttgattgtggcgaatctacttcaaaaaggaaaaataatccaactttgtggatattaaatggaaggtttgctgttttgatctagttgtttccagtggagcagttttatgaaatatgttctataagatgtacattttttcattgtaacatagaaattgtaaataattgattaaagtgctgcattttgatgaattttttctagccatttttaaagagaaaactaggaattgagtattttgtgtacggtatgtttccatcctccctccccttcctcctcccctcctctctctctcttcctacctatttaattttcatttgtcatgaggtttttggatttgccaatgatctgctggacatcatgccccatgtcatagagaataaagctgatgattgtaccagtcttaaattattcatgattcaataaaattgatgcttatttattcagattagtggtttggcttgtctgtgctagagcaagtcctcataggagttttatttcatgctaagagcaagtcagtcttatctggatgcagcaaatgcagggaaaaccccaaacctttgcaaacccatcttggctagtatgccatcaatatcccacatcttctcagtttctcaggtcttcttgccactcctgtggagcttgttagaactgtagaatttcagatcctctcagactttatgaatcaccagggatctagtggatcctcaatttctaacaaactcctaggcaataccagtgctctagtgcctggaccacacattgagtggcaagcaacatcagtgtccagccagccccctaagtcgatcccttggcatgaaaaggatttttttttaatgtattgagtacctactaatttccaaatgctttcccaaatactcagtataatgcaaaatgatgccagagaggtattcttactcccattttacaagtgg

SEQ ID NO: 8829 - protein, 1428 aa, Homo sapiens; identical to SEQ ID NO: 8823

SEQ ID NO: 8830 - DNA, 8434 bp, Homo sapiens
agactgtttccaaggacagtaagggcctcctggaagcagacccagcctttggagtttggggaggattaggatccttgctttgtgaagactgcttttcagaaccgtagttagagaacctcatctctgctcaccggctgtggttttattactgggacgacagcagctccgtcagcagcggcatcagcgacaccatagacaacctcagcactgatgacatcaacaccagctcctccatcagctcttatgccaacacacctgcctcctctcgaaaaaacctggatgtgcagactgatgctgagaagcactcacaggtggagaggaattccctgtggtctggtgatgatgtcaagaaatcagacggaggctcagacagcggcataaaaatggagccaggttccaagtggaggcggaatccttctgatgtgtctgacgagtccgacaaaagcacgtcgggcaagaagaatcctgtcatctcccagacaggctcatggcggcgaggcatgacagctcaggtgggcatcaccatgccaaggacgaagccttcagccccggcaggcgcactgaagaccccaggaactggaaaaacagacgacgcaaaggtgtctgagaaaggaaggctttctcctaaagcctcccaggtgaagcgctccccatcagatgcaggccggagcagtggtgacgaatccaaaaagcccctccccagcagctctaggacacctactgccaatgccaacagctttgggttcaagaagcagagtggttccgccgccggcctggccatgatcacagccagcggggtgactgtcaccagcaggtcagccacactgggcaaaatcccaaagtcatctgcactcgtcagtcggtctgctggtcggaagtcaagtatggatggggctcagaatcaggatgacgggtatctagccctaagctcccggacaaaccttcagtaccggagtttgccgaggcccagtaagtccaacagccggaacggggctgggaacaggtctagcaccagcagcatagattccaacattagcagcaagtccgcaggcctgccagtgcccaaactgagggagccttccaaaacagccctaggcagctctctaccaggtctggtcaaccaaacagacaaggagaaaggcatctcatcagacaacgagagtgtggcttcctgtaactcggtgaaagtgaatccggcagcccagcctgtgtccagtccggctcagaccagtctccagcctggagccaagtacccagatgtggcctctcccacactccgcagactctttggtgggaagcctaccaagcaagtgcccatcgccacagctgaaaacatgaaaaattcggtggtcatctccaatcctcatgccaccatgactcagcaaggtaacctagactccccgtcaggcagtggcgtcctgagcagtgggagcagcagtcctctctacagcaagaatgtggacctcaaccagtctccgctagcctccagccccagctcagcccactcggccccttccaacagcctcacctggggcaccaacgccagcagctcctccgcagttagcaaggatggcctgggctttcagtctgtcagcagcctccacaccagctgtgagtccatcgacatctccctcagcagtggaggggtccccagccacaattcttccactggcctcatcgcctcctccaaggacgactccttgactccctttgtcagaactaacagtgtgaagaccacactgtcagaaagtgacccgcaccttgataggaacactttgcctaagaaaggactcaggtatactcccacctcccagcttcgcacgcaagaagatgcaaaagaatggttacggtcccattctgcaggaggccttcaggacaccgctgccaattcccccttttcctctggctccagcgtgacttctccctccggaacaagattcaacttttcccagcttgcgagtcccaccactgtcacccagatgagcttgtccaacccgaccatgctgaggactcacagcctctccaatgctgatgggcagtatgatccatacactgacagccgcttccggaatagctccatgtccctggatgagaagagcagaaccatgagccgttcaggctcattccgggatgggtttgaagaagttcatggatcctcactctccttggtttccagcacatcgtcagtttattctacaccagaagaaaaatgccagtcagagattcgcaagctgcggcgggaactggatgcctcccaggagaaagtttcagctttgaccacccagctgacagcaaatgctcaccttgtggcagcctttgaacagagtcttggtaacatgacaatcaggctccagagtctgaccatgacagctgagcagaaggactcagaactgaatgagttaagaaaaaccattgagctgctaaagaaacagaacgcagctgcccaggctgccattaatggagtaattaacacacctgagctcaactgcaaaggaaacggcactgcccagtctgcagacctccgcatccgcaggcagcactcctcagacagcgtctccagcatcaacagtgccaccagccactccagcgtgggcagcaacatagagagtgactcaaagaagaagaagcggaagaactggttacgcagctccttcaagcaagctttcgggaagaagaagtccccaaaatctgcgtcctctcattcagatattgaggagatgacggattcttctttgccttcctcaccaaagttaccgcacaatgggtccacaggttccaccccactgctgaggaattctcactccaactctctaatttcagaatgcatggatagtgaagctgagaccgtcatgcagctccgaaatgagttaagagacaaggagatgaagctgacggatatccgcttagaagctctcagttctgcccaccagctggaccagctccgggaggccatgaacaggatgcagagtgaaatagagaagctgaaagctgagaatgatcggctgaagtcagagtctcaaggcagtggctgcagccgggctccttcccaagtgtccatctctgcctccccgaggcagtccatgggcctctcccagcacagcttgaacctcactgagtcaaccagcctggacatgttgctggatgacactggtgaatgctcggctcggaaggaaggaggcaggcatgttaagatagttgtcagctttcaggaggaaatgaagtggaaggaggattccagaccacatctctttcttattggctgcattggagttagtggcaagacgaagtgggatgtgctcgatggggtggttagacggctgttcaaagaatacatcattcatgtcgacccagtgagtcagctagggctgaattcagacagcgttcttggctacagcattggagaaatcaagcgcagcaacacttccgaaacaccggagctgcttccttgtggctatctggttggagagaacacgaccatctcagtgactgtgaaagggctcgcagaaaacagcctggactcactggtgtttgagtccttgattcccaagcccatcctgcagcgctacgtctccctcctgatagagcaccgtcggatcattctctctggccccagcggcactgggaaaacctacctggccaaccggctgtctgagtatatagtgcttcgagagggacgggagttgacagacggggttatcgccacctttaacgtggaccataagtccagcaaggaattgcgccagtacctgtccaaccttgctgaccagtgcaacagtgagaacaatgctgtggacatgcccctcgtcatcatcctggacaacctacaccacgtgagctctctgggagagatcttcaatgggctgctcaactgcaagtaccacaaatgcccttacataattggcacaatgaaccaggctacctcttcgactcccaacctgcagcttcaccataacttcagatgggtgctttgtgccaaccacacggagcctgtgaagggtttccttggccgattcctgaggaggaagctcatggaaacagagatcagtgggcgggtgcgcaatatggagctggtaaaaatcattgactggattcccaaggtctggcatcacctcaaccgcttcctggaggctcacagttcctcggacgtcaccatcggcccccggctcttcctgtcatgccccatcgatgtggacggctcgagagtgtggttcaccgacttgtggaactattccattatcccctatctcctggaagccgtcagagaaggactccagctctatggaaggcgcgccccctgggaggatcctgccaagtgggtgatggacacatatccatgggcagccagcccacaacagcacgagtggcctcccctgctgcagttacggcctgaggatgtcggcttcgacggctactccatgcctcgggagggatcgacaagcaagcagatgccccccagtgatgctgaaggtgacccgctgatgaacatgctgatgaggctgcaggaggcagccaactactccagcccccagagctatgacagcgactccaacagcaacagccatcacgatgacatcttggactcctctttggagtccactctgtgacaggggcccggagcccagcgccctcctcttctcctcaccgcattccacctgcatcccccacatcaccctgaagatgacttcctgagccagcccccagccacagccttagagctgcgggaacaccgagaccccccgtccttcagcctcgacctgggtgcaggcatcccgggccagctgcctgcggaccgcttccttccacagcgagaactgcactaccttctgttgtactttaattattgttttgccttgttgctgtgacctccctaagacactgaagatacttctcgggaaaggatcatcgccgttgaaatgaaaagagagacagagagaaaaaaaaaaagagaacccacatgaagctctgaaaccaaacagcatcctgccatgagcttcccagagacagaagagactggagcaaagtcggaaacacagagaagcacggcttcccctcagcacagaccctccagactgggtctcagagccgtgccacccaccctcccacacagccggccacagggagaactggtgctaaccagggtgcttgctttggtcacgttcaacgcactacagagctacgacacagggaaaccttaggagcaaataaaccgtgctttcatgttttttaaatggtgctttccttacccgagaggtattttgcctgttccaatcaaaccaccccattcaggtccatcagcctctgattaatatccgtgagagtgagtgacggagtgagagtgtgagcgagtggatgtggctgtcagtgcagaacagcatgtgtctctttccttctgatatatgaatgaatcaggtttttttttttttttttctgcaaacactgtgtatagtgagacttgttctactttggagaacaggttaccttttgaaaatgaggttgagtttcttcctttctgatgcattgatttttgaagatttttttttcccccttcccctcttggtcagaatcaatcctttggtgaaagtaagaaccgcaggagttgagttttggtttggtcctgctcagttttggtttttagttgtccatcctcacagtcctacacactcgcctcctcctgctagggctgggggtatctgtgtcctttaaaatggatgaggacctggtcctcgacatgtgggtgagccatggaccttgccttcccttctcgtccttgagggtttagaacacacaccaacacctccagcgtccccgccccagcttccggtggggtgatgcggtcaccctgcaaaagacttgcactttcctcagaaccaacatgacgcagctcaataagggtgagggtcactccctcccagaagccccgtctggacgagccttgcctgacctcttcggtgctgaccttcccaaagtgatgccttactggttttgtactaactgtgttcattttacataagtgtcgtgcctgcctggggtttgttttttttgtcattgttttccccattgaaacaaacagggctaaaaagtcatctgttcattaggagaactcaagttgctgtgacttttctcatccaaaagactcatttgtgtggatgcgtgaccatgggaaaaagaaaaaaaaaaagatccattttttaggttcttttcggtctccagctgacaacccaactggacaatgatctgtctggtgcaggagaaggcaaaagtttctacaagtctacatgaccttgctgatacttgttctaatagaaacccagtctgctgtgtcttcaacatactggtattttcattacaaagtatggtaaatttttgagttgtttgtttctgttttgtaaagagaatccttattggacaccagtgaaggtgtctctgttttaatgatcagggtttttattccatcttttgcatttcttctatttctgaaggtttgtctcttggcatctttttttagtttcttaccataagagtttgacccgaaactgctcacttcacattggatgacaccatgttcttcctctttgaaaagaaaaggggaatgtgtcccactagtgaaaggaaaacttttcaacactatccctgctttagtctcagcaaactcagactattctgcttagccttcattagtcatctgggtgtgagtgtgtcttgttctgtttttctttttaataaaacttttaaaccatatatttagcctgtgaccaggggggccaaaccctaagatttctggtaaacctgaagggtggccctcctcagacaatttatctcccagcaatgaccctactacactcgcgtactgtgaatttgggaggaggtaaagttgacttctcctcgtgggcagttttccaatcaccttgtgagtagacacctgccaatattgtttgaaacctttttttaatatgacatcctctcttgtcattctcttctcccctttcccacagacttccctcctgggtccaggttcagaaccaagacttctgtacctagtgctgcctgattggtgaacattgacttcaagtagcatagcccttgtgtgactcacaactccgtgtccttcctaaagtttcgggaagcagggttgtctaatatgcacatttcttattttggtcatatttttactttagtgtcactcaccttttacaaagtgactttgtactcatttagggctctatcggaaatgcttccattttgccttttctacagttaggccaattttgaaatatataaattctatgcaacatttatgttgagttaccaatggaagccaaaagttctcttcccaaactgccaagaatgatacaggccataattgaaatgggaataccttttaagtttcattaggggtggggtgggagtgggacaggaacaagacttgcctagatctttgttgtatcttggggacttttactttgttgtttgatgcttaaacttcaaaattctctgtattcaaatttgattgtggcgaatctacttcaaaaaggaaaaataatccaactttgtggatattaaatggaaggtttgctgttttgatctagttgtttccagtggagcagttttatgaaatatgttctataagatgtacattttttcattgtaacatagaaattgtaaataattgattaaagtgctgcattttgatgaattttttctagccatttttaaagagaaaactaggaattgagtattttgtgtacggtatgtttccatcctccctccccttcctcctcccctcctctctctctcttcctacctatttaattttcatttgtcatgaggtttttggatttgccaatgatctgctggacatcatgccccatgtcatagagaataaagctgatgattgtaccagtcttaaattattcatgattcaataaaattgatgcttatttattcagattagtggtttggcttgtctgtgctagagcaagtcctcataggagttttatttcatgctaagagcaagtcagtcttatctggatgcagcaaatgcagggaaaaccccaaacctttgcaaacccatcttggctagtatgccatcaatatcccacatcttctcagtttctcaggtcttcttgccactcctgtggagcttgttagaactgtagaatttcagatcctctcagactttatgaatcaccagggatctagtggatcctcaatttctaacaaactcctaggcaataccagtgctctagtgcctggaccacacattgagtggcaagcaacatcagtgtccagccagccccctaagtcgatcccttggcatgaaaaggatttttttttaatgtattgagtacctactaatttccaaatgctttcccaaatactcagtataatgcaaaatgatgccagagaggtattcttactcccattttacaagtgg

SEQ ID NO: 8831 - protein, 1406 aa, Homo sapiens; identical to SEQ ID NO: 8821

SEQ ID NO: 8832 - DNA, 524 bp, Homo sapiens
agcactgatgacatcaacaccagctcctccatcagctcttatgccaacacacctgcctcctctcgaaaaaacctggatgtgcagactgatgctgagaagcactcacaggtggagaggaattccctgtggtctggtgatgatgtcaagaaatcagacggaggtcctcagacagcgtctccagcatcaacagtgccaccagccactccagcgtgggcagcaacatagagagtgactcaaagaagaagaagcggaagaactgggtgagtgcacatccactctcctggggactgacggacagagtcagttgcagaactggctgctgcatctccccagataaagtccagcccagctactatctgtggaacatagcactttgggcgtagatcccaggaaatggtttgtggatgggtttttactaaaatcaatattgtactcagcaaaacactagaatctgtaacatccctaccactttgtatttttttctctttcatgagacttttcataaagtactcatctttcatttc

SEQ ID NO: 8833 - protein, 74 aa, Homo sapiens [sequence omitted]

SEQ ID NO: 8834 - DNA, 853 bp, Homo sapiens
agaaatcttacaggcaaaggctattcgacatttgggattcctaagctaatctttttatttttggaagggtgtctttctgagaaaggcagccagaggcacagcaccaacctttctgacagtgtggtcttcacactgttagttctgacaaagggagtcaaggagtcgtccttggaggaggcgatgaggccagtggaagaattgtggctggggacccctccactgctgagggagatgtcgatggactcacagctggtgtggaggctgctgacagactgaaagcccaggccatccttgctaactgcggaggagctgctggcgttggtgccccagggccaagacagccccggcctcttaccagttcctggggtcttcagtgcgcctgccggggctgaaggcttcgtccttggcatggtgatgcccacctgagctgtcatgcctcgccgccatgagcctgtctgggagatgacaggattcttcttgcccgacgtgcttttgtcggactcgtcagacacatcagaaggattccgcctccacttggaacctggctccatttttatgccgctgtctgagcctccgtctgatttcttgacatcatcaccagaccacagggaattcctctccacctgtgagtgcttctcagcatcagtctgtggacagagactctctgaattagtccttccccagtcccaggctgggaagcccctcactccaaaggcaaaaatgccaaaacactggagtagttaagggaaaaataagcattactttaaagatgtttggacttttgtactctggttatcttgttagaaagactgattttttttttttggaaaaaaaaataaaaaagtaaataata

SEQ ID NO: 8835 - protein, 103 aa, Homo sapiens
MPRRHEPVWEMTGFFLPDVLLSDSSDTSEGFRLHLEPGSIFMPLSEPPSDFLTSSPDHREFLSTCECFSASVCGQRLSELVLPQSQAGKPLTPKAKMPKHWSS

SEQ ID NO: 8836 - DNA, 3566 bp, Homo sapiens
agcaagtgcccatcgccacagctgaaaacatgaaaaattcggtggtcatctccaatcctcatgccaccatgactcagcaaggtaacctagactccccgtcaggcagtggcgtcctgagcagtgggagcagcagtcctctctacagcaagaatgtggacctcaaccagtctccgctagcctccagccccagctcagcccactcggccccttccaacagcctcacctggggcaccaacgccagcagctcctccgcagttagcaaggatggcctgggctttcagtctgtcagcagcctccacaccagctgtgagtccatcgacatctccctcagcagtggaggggtccccagccacaattcttccactggcctcatcgcctcctccaaggacgactccttgactccctttgtcagaactaacagtgtgaagaccacactgtcagaaaggtatactcccacctcccagcttcgcacgcaagaagatgcaaaagaatggttacggtcccattctgcaggaggccttcaggacaccgctgccaattcccccttttcctctggctccagcgtgacttctccctccggaacaagattcaacttttcccagcttgcgagtcccaccactgtcacccagatgagcttgtccaacccgaccatgctgaggactcacagcctctccaatgctgatgggcagtatgatccatacactgacagccgcttccggaatagctccatgtccctggatgagaagagcagaaccatgagccgttcaggctcattccgggatgggtttgaagaagttcatggatcctcactctccttggtttccagcacatcgtcagtttattctacaccagaagaaaaatgccagtcagagattcgcaagctgcggcgggaactggatgcctcccaggagaaagtttcagctttgaccacccagctgacagcaaatgctcaccttgtggcagcctttgaacagagtcttggtaacatgacaatcaggctccagagtctgaccatgacagctgagcagaaggactcagaactgaatgagttaagaaaaaccattgagctgctaaagaaacagaacgcagctgcccaggctgccattaatggagtaattaacacacctgagctcaactgcaaaggaaacggcactgcccagtctgcagacctccgcatccgcaggcagcactcctcagacagcgtctccagcatcaacagtgccaccagccactccagcgtgggcagcaacatagagagtgactcaaagaagaagaagcggaagaactggttacgcagctccttcaagcaagctttcgggaagaagaagtccccaaaatctgcgtcctctcattcagatattgaggagatgacggattcttctttgccttcctcaccaaagttaccgcacaatgggtccacaggttccaccccactgctgaggaattctcactccaactctctaatttcagaatgcatggatagtgaagctgagaccgtcatgcagctccgaaatgagttaagagacaaggagatgaagctgacggatatccgcttagaagctctcagttctgcccaccagctggaccagctccgggaggccatgaacaggatgcagagtgaaatagagaagctgaaagctgagaatgatcggctgaagtcagagtctcaaggcagtggctgcagccgggctccttcccaagtgtccatctctgcctccccgaggcagtccatgggcctctcccagcacagcttgaacctcactgagtcaaccagcctggacatgttgctggatgacactggtgaatgctcggctcggaaggaaggaggcaggcatgttaagatagttgtcagctttcaggaggaaatgaagtggaaggaggattccagaccacatctctttcttattggctgcattggagttagtggcaagacgaagtgggatgtgctcgatggggtggttagacggctgttcaaagaatacatcattcatgtcgacccagtgagtcagctagggctgaattcagacagcgttcttggctacagcattggagaaatcaagcgcagcaacacttccgaaacaccggagctgcttccttgtggctatctggttggagagaacacgaccatctcagtgactgtgaaagggctcgcagaaaacagcctggactcactggtgtttgagtccttgattcccaagcccatcctgcagcgctacgtctccctcctgatagagcaccgtcggatcattctctctggccccagcggcactgggaaaacctacctggccaaccggctgtctgagtatatagtgcttcgagagggacgggagttgacagacggggttatcgccacctttaacgtggaccataagtccagcaaggaattgcgccagtacctgtccaaccttgctgaccagtgcaacagtgagaacaatgctgtggacatgcccctcgtcatcatcctggacaacctacaccacgtgagctctctgggagagatcttcaatgggctgctcaactgcaagtaccacaaatgcccttacataattggcacaatgaaccaggctacctcttcgactcccaacctgcagcttcaccataacttcagatgggtgctttgtgccaaccacacggagcctgtgaagggtttccttggccgattcctgaggaggaagctcatggaaacagagatcagtgggcgggtgcgcaatatggagctggtaaaaatcattgactggattcccaaggtctggcatcacctcaaccgcttcctggaggctcacagttcctcggacgtcaccatcggcccccggctcttcctgtcatgccccatcgatgtggacggctcgagagtgtggttcaccgacttgtggaactattccattatcccctatctcctggaagccgtcagagaaggactccagctctatggaaggcgcgccccctgggaggatcctgccaagtgggtgatggacacatatccatgggcagccagcccacaacagcacgagtggcctcccctgctgcagttacggcctgaggatgtcggcttcgacggctactccatgcctcgggagggatcgacaagcaagcagatgccccccagtgatgctgaaggtgacccgctgatgaacatgctgatgaggctgcaggaggcagccaactactccagcccccagagctatgacagcgactccaacagcaacagccatcacgatgacatcttggactcctctttggagtccactctgtgacaggggcccggagcccagcgccctcctcttctcctcaccgcattccacctgcatcccccacatcaccctgaagatgacttcctgagccagcccccagccacagccttagagctgcgggaacaccgagaccccccgtccttcagcctcgacctgggtgcaggcatcccgggccagctgcctgcggaccgcttccttccacagcgagaactgcactaccttctgttgtactttaattattgttttgccttgttgctgtgacctccctaagacactgaagatacttctcgggaaaggatcatcgccgttgaaatg

SEQ ID NO: 8837 - protein, 1074 aa, Homo sapiens
MKNSVVISNPHATMTQQGNLDSPSGSGVLSSGSSSPLYSKNVDLNQSPLASSPSSAHSAPSNSLTWGTNASSSSAVSKDGLGFQSVSSLHTSCESIDISLSSGGVPSHNSSTGLIASSKDDSLTPFVRTNSVKTTLSERYTPTSQLRTQEDAKEWLRSHSAGGLQDTAANSPFSSGSSVTSPSGTRFNFSQLASPTTVTQMSLSNPTMLRTHSLSNADGQYDPYTDSRFRNSSMSLDEKSRTMSRSGSFRDGFEEVHGSSLSLVSSTSSVYSTPEEKCQSEIRKLRRELDASQEKVSALTTQLTANAHLVAAFEQSLGNMTIRLQSLTMTAEQKDSELNELRKTIELLKKQNAAAQAAINGVINTPELNCKGNGTAQSADLRIRRQHSSDSVSSINSATSHSSVGSNIESDSKKKKRKNWLRSSFKQAFGKKKSPKSASSHSDIEEMTDSSLPSSPKLPHNGSTGSTPLLRNSHSNSLISECMDSEAETVMQLRNELRDKEMKLTDIRLEALSSAHQLDQLREAMNRMQSEIEKLKAENDRLKSESQGSGCSRAPSQVSISASPRQSMGLSQHSLNLTESTSLDMLLDDTGECSARKEGGRHVKIVVSFQEEMKWKEDSRPHLFLIGCIGVSGKTKWDVLDGVVRRLFKEYIIHVDPVSQLGLNSDSVLGYSIGEIKRSNTSETPELLPCGYLVGENTTISVTVKGLAENSLDSLVFESLIPKPILQRYVSLLIEHRRIILSGPSGTGKTYLANRLSEYIVLREGRELTDGVIATFNVDHKSSKELRQYLSNLADQCNSENNAVDMPLVIILDNLHHVSSLGEIFNGLLNCKYHKCPYIIGTMNQATSSTPNLQLHHNFRWVLCANHTEPVKGFLGRFLRRKLMETEISGRVRNMELVKIIDWIPKVWHHLNRFLEAHSSSDVTIGPRLFLSCPIDVDGSRVWFTDLWNYSIIPYLLEAVREGLQLYGRRAPWEDPAKWVMDTYPWAASPQQHEWPPLLQLRPEDVGFDGYSMPREGSTSKQMPPSDAEGDPLMNMLMRLQEAANYSSPQSYDSDSNSNSHHDDILDSSLESTL

SEQ ID NO: 8838 - DNA, 6596 bp, Homo sapiens
agcaagtgcccatcgccacagctgaaaacatgaaaaattcggtggtcatctccaatcctcatgccaccatgactcagcaaggtaacctagactccccgtcaggcagtggcgtcctgagcagtgggagcagcagtcctctctacagcaagaatgtggacctcaaccagtctccgctagcctccagccccagctcagcccactcggccccttccaacagcctcacctggggcaccaacgccagcagctcctccgcagttagcaaggatggcctgggctttcagtctgtcagcagcctccacaccagctgtgagtccatcgacatctccctcagcagtggaggggtccccagccacaattcttccactggcctcatcgcctcctccaaggacgactccttgactccctttgtcagaactaacagtgtgaagaccacactgtcagaaaggtatactcccacctcccagcttcgcacgcaagaagatgcaaaagaatggttacggtcccattctgcaggaggccttcaggacaccgctgccaattcccccttttcctctggctccagcgtgacttctccctccggaacaagattcaacttttcccagcttgcgagtcccaccactgtcacccagatgagcttgtccaacccgaccatgctgaggactcacagcctctccaatgctgatgggcagtatgatccatacactgacagccgcttccggaatagctccatgtccctggatgagaagagcagaaccatgagccgttcaggctcattccgggatgggtttgaagaagttcatggatcctcactctccttggtttccagcacatcgtcagtttattctacaccagaagaaaaatgccagtcagagattcgcaagctgcggcgggaactggatgcctcccaggagaaagtttcagctttgaccacccagctgacagcaaatgctcaccttgtggcagcctttgaacagagtcttggtaacatgacaatcaggctccagagtctgaccatgacagctgagcagaaggactcagaactgaatgagttaagaaaaaccattgagctgctaaagaaacagaacgcagctgcccaggctgccattaatggagtaattaacacacctgagctcaactgcaaaggaaacggcactgcccagtctgcagacctccgcatccgcaggcagcactcctcagacagcgtctccagcatcaacagtgccaccagccactccagcgtgggcagcaacatagagagtgactcaaagaagaagaagcggaagaactggttacgcagctccttcaagcaagctttcgggaagaagaagtccccaaaatctgcgtcctctcattcagatattgaggagatgacggattcttctttgccttcctcaccaaagttaccgcacaatgggtccacaggttccaccccactgctgaggaattctcactccaactctctaatttcagaatgcatggatagtgaagctgagaccgtcatgcagctccgaaatgagttaagagacaaggagatgaagctgacggatatccgcttagaagctctcagttctgcccaccagctggaccagctccgggaggccatgaacaggatgcagagtgaaatagagaagctgaaagctgagaatgatcggctgaagtcagagtctcaaggcagtggctgcagccgggctccttcccaagtgtccatctctgcctccccgaggcagtccatgggcctctcccagcacagcttgaacctcactgagtcaaccagcctggacatgttgctggatgacactggtgaatgctcggctcggaaggaaggaggcaggcatgttaagatagttgtcagctttcaggaggaaatgaagtggaaggaggattccagaccacatctctttcttattggctgcattggagttagtggcaagacgaagtgggatgtgctcgatggggtggttagacggctgttcaaagaatacatcattcatgtcgacccagtgagtcagctagggctgaattcagacagcgttcttggctacagcattggagaaatcaagcgcagcaacacttccgaaacaccggagctgcttccttgtggctatctggttggagagaacacgaccatctcagtgactgtgaaagggctcgcagaaaacagcctggactcactggtgtttgagtccttgattcccaagcccatcctgcagcgctacgtctccctcctgatagagcaccgtcggatcattctctctggccccagcggcactgggaaaacctacctggccaaccggctgtctgagtatatagtgcttcgagagggacgggagttgacagacggggttatcgccacctttaacgtggaccataagtccagcaaggaattgcgccagtacctgtccaaccttgctgaccagtgcaacagtgagaacaatgctgtggacatgcccctcgtcatcatcctggacaacctacaccacgtgagctctctgggagagatcttcaatgggctgctcaactgcaagtaccacaaatgcccttacataattggcacaatgaaccaggctacctcttcgactcccaacctgcagcttcaccataacttcagatgggtgctttgtgccaaccacacggagcctgtgaagggtttccttggccgattcctgaggaggaagctcatggaaacagagatcagtgggcgggtgcgcaatatggagctggtaaaaatcattgactggattcccaaggtctggcatcacctcaaccgcttcctggaggctcacagttcctcggacgtcaccatcggcccccggctcttcctgtcatgccccatcgatgtggacggctcgagagtgtggttcaccgacttgtggaactattccattatcccctatctcctggaagccgtcagagaaggactccagctctatggaaggcgcgccccctgggaggatcctgccaagtgggtgatggacacatatccatgggcagccagcccacaacagcacgagtggcctcccctgctgcagttacggcctgaggatgtcggcttcgacggctactccatgcctcgggagggatcgacaagcaagcagatgccccccagtgatgctgaaggtgacccgctgatgaacatgctgatgaggctgcaggaggcagccaactactccagcccccagagctatgacagcgactccaacagcaacagccatcacgatgacatcttggactcctctttggagtccactctgtgacaggggcccggagcccagcgccctcctcttctcctcaccgcattccacctgcatcccccacatcaccctgaagatgacttcctgagccagcccccagccacagccttagagctgcgggaacaccgagaccccccgtccttcagcctcgacctgggtgcaggcatcccgggccagctgcctgcggaccgcttccttccacagcgagaactgcactaccttctgttgtactttaattattgttttgccttgttgctgtgacctccctaagacactgaagatacttctcgggaaaggatcatcgccgttgaaatgaaaagagagacagagagaaaaaaaaaaagagaacccacatgaagctctgaaaccaaacagcatcctgccatgagcttcccagagacagaagagactggagcaaagtcggaaacacagagaagcacggcttcccctcagcacagaccctccagactgggtctcagagccgtgccacccaccctcccacacagccggccacagggagaactggtgctaaccagggtgcttgctttggtcacgttcaacgcactacagagctacgacacagggaaaccttaggagcaaataaaccgtgctttcatgttttttaaatggtgctttccttacccgagaggtattttgcctgttccaatcaaaccaccccattcaggtccatcagcctctgattaatatccgtgagagtgagtgacggagtgagagtgtgagcgagtggatgtggctgtcagtgcagaacagcatgtgtctctttccttctgatatatgaatgaatcaggtttttttttttttttttctgcaaacactgtgtatagtgagacttgttctactttggagaacaggttaccttttgaaaatgaggttgagtttcttcctttctgatgcattgatttttgaagatttttttttcccccttcccctcttggtcagaatcaatcctttggtgaaagtaagaaccgcaggagttgagttttggtttggtcctgctcagttttggtttttagttgtccatcctcacagtcctacacactcgcctcctcctgctagggctgggggtatctgtgtcctttaaaatggatgaggacctggtcctcgacatgtgggtgagccatggaccttgccttcccttctcgtccttgagggtttagaacacacaccaacacctccagcgtccccgccccagcttccggtggggtgatgcggtcaccctgcaaaagacttgcactttcctcagaaccaacatgacgcagctcaataagggtgagggtcactccctcccagaagccccgtctggacgagccttgcctgacctcttcggtgctgaccttcccaaagtgatgccttactggttttgtactaactgtgttcattttacataagtgtcgtgcctgcctggggtttgttttttttgtcattgttttccccattgaaacaaacagggctaaaaagtcatctgttcattaggagaactcaagttgctgtgacttttctcatccaaaagactcatttgtgtggatgcgtgaccatgggaaaaagaaaaaaaaaaagatccattttttaggttcttttcggtctccagctgacaacccaactggacaatgatctgtctggtgcaggagaaggcaaaagtttctacaagtctacatgaccttgctgatacttgttctaatagaaacccagtctgctgtgtcttcaacatactggtattttcattacaaagtatggtaaatttttgagttgtttgtttctgttttgtaaagagaatccttattggacaccagtgaaggtgtctctgttttaatgatcagggtttttattccatcttttgcatttcttctatttctgaaggtttgtctcttggcatctttttttagtttcttaccataagagtttgacccgaaactgctcacttcacattggatgacaccatgttcttcctctttgaaaagaaaaggggaatgtgtcccactagtgaaaggaaaacttttcaacactatccctgctttagtctcagcaaactcagactattctgcttagccttcattagtcatctgggtgtgagtgtgtcttgttctgtttttctttttaataaaacttttaaaccatatatttagcctgtgaccaggggggccaaaccctaagatttctggtaaacctgaagggtggccctcctcagacaatttatctcccagcaatgaccctactacactcgcgtactgtgaatttgggaggaggtaaagttgacttctcctcgtgggcagttttccaatcaccttgtgagtagacacctgccaatattgtttgaaacctttttttaatatgacatcctctcttgtcattctcttctcccctttcccacagacttccctcctgggtccaggttcagaaccaagacttctgtacctagtgctgcctgattggtgaacattgacttcaagtagcatagcccttgtgtgactcacaactccgtgtccttcctaaagtttcgggaagcagggttgtctaatatgcacatttcttattttggtcatatttttactttagtgtcactcaccttttacaaagtgactttgtactcatttagggctctatcggaaatgcttccattttgccttttctacagttaggccaattttgaaatatataaattctatgcaacatttatgttgagttaccaatggaagccaaaagttctcttcccaaactgccaagaatgatacaggccataattgaaatgggaataccttttaagtttcattaggggtggggtgggagtgggacaggaacaagacttgcctagatctttgttgtatcttggggacttttactttgttgtttgatgcttaaacttcaaaattctctgtattcaaatttgattgtggcgaatctacttcaaaaaggaaaaataatccaactttgtggatattaaatggaaggtttgctgttttgatctagttgtttccagtggagcagttttatgaaatatgttctataagatgtacattttttcattgtaacatagaaattgtaaataattgattaaagtgctgcattttgatgaattttttctagccatttttaaagagaaaactaggaattgagtattttgtgtacggtatgtttccatcctccctccccttcctcctcccctcctctctctctcttcctacctatttaattttcatttgtcatgaggtttttggatttgccaatgatctgctggacatcatgccccatgtcatagagaataaagctgatgattgtaccagtcttaaattattcatgattcaataaaattgatgcttatttattcag

SEQ ID NO: 8839 - protein, 1074 aa, Homo sapiens; identical to SEQ ID NO: 8837

SEQ ID NO: 8840 - DNA, 2652 bp, Homo sapiens
agcaagtgcccatcgccacagctgaaaacatgaaaaattcggtggtcatctccaatcctcatgccaccatgactcagcaaggtaacctagactccccgtcaggcagtggcgtcctgagcagtgggagcagcagtcctctctacagcaagaatgtggacctcaaccagtctccgctagcctccagccccagctcagcccactcggccccttccaacagcctcacctggggcaccaacgccagcagctcctccgcagttagcaaggatggcctgggctttcagtctgtcagcagcctccacaccagctgtgagtccatcgacatctccctcagcagtggaggggtccccagccacaattcttccactggcctcatcgcctcctccaaggacgactccttgactccctttgtcagaactaacagtgtgaagaccacactgtcagaaagccatggaccttgccttcccttctcgtccttgagggtttagaacacacaccaacacctccagcgtccccgccccagcttccggtggggtgatgcggtcaccctgcaaaagacttgcactttcctcagaaccaacatgacgcagctcaataagggtgagggtcactccctcccagaagccccgtctggacgagccttgcctgacctcttcggtgctgaccttcccaaagtgatgccttactggttttgtactaactgtgttcattttacataagtgtcgtgcctgcctggggtttgttttttttgtcattgttttccccattgaaacaaacagggctaaaaagtcatctgttcattaggagaactcaagttgctgtgacttttctcatccaaaagactcatttgtgtggatgcgtgaccatgggaaaaagaaaaaaaaaaagatccattttttaggttcttttcggtctccagctgacaacccaactggacaatgatctgtctggtgcaggagaaggcaaaagtttctacaagtctacatgaccttgctgatacttgttctaatagaaacccagtctgctgtgtcttcaacatactggtattttcattacaaagtatggtaaatttttgagttgtttgtttctgttttgtaaagagaatccttattggacaccagtgaaggtgtctctgttttaatgatcagggtttttattccatcttttgcatttcttctatttctgaaggtttgtctcttggcatctttttttagtttcttaccataagagtttgacccgaaactgctcacttcacattggatgacaccatgttcttcctctttgaaaagaaaaggggaatgtgtcccactagtgaaaggaaaacttttcaacactatccctgctttagtctcagcaaactcagactattctgcttagccttcattagtcatctgggtgtgagtgtgtcttgttctgtttttctttttaataaaacttttaaaccatatatttagcctgtgaccaggggggccaaaccctaagatttctggtaaacctgaagggtggccctcctcagacaatttatctcccagcaatgaccctactacactcgcgtactgtgaatttgggaggaggtaaagttgacttctcctcgtgggcagttttccaatcaccttgtgagtagacacctgccaatattgtttgaaacctttttttaatatgacatcctctcttgtcattctcttctcccctttcccacagacttccctcctgggtccaggttcagaaccaagacttctgtacctagtgctgcctgattggtgaacattgacttcaagtagcatagcccttgtgtgactcacaactccgtgtccttcctaaagtttcgggaagcagggttgtctaatatgcacatttcttattttggtcatatttttactttagtgtcactcaccttttacaaagtgactttgtactcatttagggctctatcggaaatgcttccattttgccttttctacagttaggccaattttgaaatatataaattctatgcaacatttatgttgagttaccaatggaagccaaaagttctcttcccaaactgccaagaatgatacaggccataattgaaatgggaataccttttaagtttcattaggggtggggtgggagtgggacaggaacaagacttgcctagatctttgttgtatcttggggacttttactttgttgtttgatgcttaaacttcaaaattctctgtattcaaatttgattgtggcgaatctacttcaaaaaggaaaaataatccaactttgtggatattaaatggaaggtttgctgttttgatctagttgtttccagtggagcagttttatgaaatatgttctataagatgtacattttttcattgtaacatagaaattgtaaataattgattaaagtgctgcattttgatgaattttttctagccatttttaaagagaaaactaggaattgagtattttgtgtacggtatgtttccatcctccctccccttcctcctcccctcctctctctctcttcctacctatttaattttcatttgtcatgaggtttttggatttgccaatgatctgctggacatcatgccccatgtcatagagaataaagctgatgattgtaccagtcttaaattattcatgattcaataaaattgatgcttatttattcag

SEQ ID NO: 8841 - protein, 151 aa, Homo sapiens
MKNSVVISNPHATMTQQGNLDSPSGSGVLSSGSSSPLYSKNVDLNQSPLASSPSSAHSAPSNSLTWGTNASSSSAVSKDGLGFQSVSSLHTSCESIDISLSSGGVPSHNSSTGLIASSKDDSLTPFVRTNSVKTTLSESHGPCLPFSSLRV

SEQ ID NO: 8842 - DNA, 7084 bp, Homo sapiens
agcaagtgcccatcgccacagctgaaaacatgaaaaattcggtggtcatctccaatcctcatgccaccatgactcagcaaggtaacctagactccccgtcaggcagtggcgtcctgagcagtgggagcagcagtcctctctacagcaagaatgtggacctcaaccagtctccgctagcctccagccccagctcagcccactcggccccttccaacagcctcacctggggcaccaacgccagcagctcctccgcagttagcaaggatggcctgggctttcagtctgtcagcagcctccacaccagctgtgagtccatcgacatctccctcagcagtggaggggtccccagccacaattcttccactggcctcatcgcctcctccaaggacgactccttgactccctttgtcagaactaacagtgtgaagaccacactgtcagaaaggtatactcccacctcccagcttcgcacgcaagaagatgcaaaagaatggttacggtcccattctgcaggaggccttcaggacaccgctgccaattcccccttttcctctggctccagcgtgacttctccctccggaacaagattcaacttttcccagcttgcgagtcccaccactgtcacccagatgagcttgtccaacccgaccatgctgaggactcacagcctctccaatgctgatgggcagtatgatccatacactgacagccgcttccggaatagctccatgtccctggatgagaagagcagaaccatgagccgttcaggctcattccgggatgggtttgaagaagttcatggatcctcactctccttggtttccagcacatcgtcagtttattctacaccagaagaaaaatgccagtcagagattcgcaagctgcggcgggaactggatgcctcccaggagaaagtttcagctttgaccacccagctgacagcaaatgctcaccttgtggcagcctttgaacagagtcttggtaacatgacaatcaggctccagagtctgaccatgacagctgagcagaaggactcagaactgaatgagttaagaaaaaccattgagctgctaaagaaacagaacgcagctgcccaggctgccattaatggagtaattaacacacctgagctcaactgcaaaggaaacggcactgcccagtctgcagacctccgcatccgcaggcagcactcctcagacagcgtctccagcatcaacagtgccaccagccactccagcgtgggcagcaacatagagagtgactcaaagaagaagaagcggaagaactggttacgcagctccttcaagcaagctttcgggaagaagaagtccccaaaatctgcgtcctctcattcagatattgaggagatgacggattcttctttgccttcctcaccaaagttaccgcacaatgggtccacaggttccaccccactgctgaggaattctcactccaactctctaatttcagaatgcatggatagtgaagctgagaccgtcatgcagctccgaaatgagttaagagacaaggagatgaagctgacggatatccgcttagaagctctcagttctgcccaccagctggaccagctccgggaggccatgaacaggatgcagagtgaaatagagaagctgaaagctgagaatgatcggctgaagtcagagtctcaaggcagtggctgcagccgggctccttcccaagtgtccatctctgcctccccgaggcagtccatgggcctctcccagcacagcttgaacctcactgagtcaaccagcctggacatgttgctggatgacactggtgaatgctcggctcggaaggaaggaggcaggcatgttaagatagttgtcagctttcaggaggaaatgaagtggaaggaggattccagaccacatctctttcttattggctgcattggagttagtggcaagacgaagtgggatgtgctcgatggggtggttagacggctgttcaaagaatacatcattcatgtcgacccagtgagtcagctagggctgaattcagacagcgttcttggctacagcattggagaaatcaagcgcagcaacacttccgaaacaccggagctgcttccttgtggctatctggttggagagaacacgaccatctcagtgactgtgaaagggctcgcagaaaacagcctggactcactggtgtttgagtccttgattcccaagcccatcctgcagcgctacgtctccctcctgatagagcaccgtcggatcattctctctggccccagcggcactgggaaaacctacctggccaaccggctgtctgagtatatagtgcttcgagagggacgggagttgacagacggggttatcgccacctttaacgtggaccataagtccagcaaggaattgcgccagtacctgtccaaccttgctgaccagtgcaacagtgagaacaatgctgtggacatgcccctcgtcatcatcctggacaacctacaccacgtgagctctctgggagagatcttcaatgggctgctcaactgcaagtaccacaaatgcccttacataattggcacaatgaaccaggctacctcttcgactcccaacctgcagcttcaccataacttcagatgggtgctttgtgccaaccacacggagcctgtgaagggtttccttggccgattcctgaggaggaagctcatggaaacagagatcagtgggcgggtgcgcaatatggagctggtaaaaatcattgactggattcccaaggtctggcatcacctcaaccgcttcctggaggctcacagttcctcggacgtcaccatcggcccccggctcttcctgtcatgccccatcgatgtggacggctcgagagtgtggttcaccgacttgtggaactattccattatcccctatctcctggaagccgtcagagaaggactccagctctatggaaggcgcgccccctgggaggatcctgccaagtgggtgatggacacatatccatgggcagccagcccacaacagcacgagtggcctcccctgctgcagttacggcctgaggatgtcggcttcgacggctactccatgcctcgggagggatcgacaagcaagcagatgccccccagtgatgctgaaggtgacccgctgatgaacatgctgatgaggctgcaggaggcagccaactactccagcccccagagctatgacagcgactccaacagcaacagccatcacgatgacatcttggactcctctttggagtccactctgtgacaggggcccggagcccagcgccctcctcttctcctcaccgcattccacctgcatcccccacatcaccctgaagatgacttcctgagccagcccccagccacagccttagagctgcgggaacaccgagaccccccgtccttcagcctcgacctgggtgcaggcatcccgggccagctgcctgcggaccgcttccttccacagcgagaactgcactaccttctgttgtactttaattattgttttgccttgttgctgtgacctccctaagacactgaagatacttctcgggaaaggatcatcgccgttgaaatgaaaagagagacagagagaaaaaaaaaaagagaacccacatgaagctctgaaaccaaacagcatcctgccatgagcttcccagagacagaagagactggagcaaagtcggaaacacagagaagcacggcttcccctcagcacagaccctccagactgggtctcagagccgtgccacccaccctcccacacagccggccacagggagaactggtgctaaccagggtgcttgctttggtcacgttcaacgcactacagagctacgacacagggaaaccttaggagcaaataaaccgtgctttcatgttttttaaatggtgctttccttacccgagaggtattttgcctgttccaatcaaaccaccccattcaggtccatcagcctctgattaatatccgtgagagtgagtgacggagtgagagtgtgagcgagtggatgtggctgtcagtgcagaacagcatgtgtctctttccttctgatatatgaatgaatcaggtttttttttttttttttctgcaaacactgtgtatagtgagacttgttctactttggagaacaggttaccttttgaaaatgaggttgagtttcttcctttctgatgcattgatttttgaagatttttttttcccccttcccctcttggtcagaatcaatcctttggtgaaagtaagaaccgcaggagttgagttttggtttggtcctgctcagttttggtttttagttgtccatcctcacagtcctacacactcgcctcctcctgctagggctgggggtatctgtgtcctttaaaatggatgaggacctggtcctcgacatgtgggtgagccatggaccttgccttcccttctcgtccttgagggtttagaacacacaccaacacctccagcgtccccgccccagcttccggtggggtgatgcggtcaccctgcaaaagacttgcactttcctcagaaccaacatgacgcagctcaataagggtgagggtcactccctcccagaagccccgtctggacgagccttgcctgacctcttcggtgctgaccttcccaaagtgatgccttactggttttgtactaactgtgttcattttacataagtgtcgtgcctgcctggggtttgttttttttgtcattgttttccccattgaaacaaacagggctaaaaagtcatctgttcattaggagaactcaagttgctgtgacttttctcatccaaaagactcatttgtgtggatgcgtgaccatgggaaaaagaaaaaaaaaaagatccattttttaggttcttttcggtctccagctgacaacccaactggacaatgatctgtctggtgcaggagaaggcaaaagtttctacaagtctacatgaccttgctgatacttgttctaatagaaacccagtctgctgtgtcttcaacatactggtattttcattacaaagtatggtaaatttttgagttgtttgtttctgttttgtaaagagaatccttattggacaccagtgaaggtgtctctgttttaatgatcagggtttttattccatcttttgcatttcttctatttctgaaggtttgtctcttggcatctttttttagtttcttaccataagagtttgacccgaaactgctcacttcacattggatgacaccatgttcttcctctttgaaaagaaaaggggaatgtgtcccactagtgaaaggaaaacttttcaacactatccctgctttagtctcagcaaactcagactattctgcttagccttcattagtcatctgggtgtgagtgtgtcttgttctgtttttctttttaataaaacttttaaaccatatatttagcctgtgaccaggggggccaaaccctaagatttctggtaaacctgaagggtggccctcctcagacaatttatctcccagcaatgaccctactacactcgcgtactgtgaatttgggaggaggtaaagttgacttctcctcgtgggcagttttccaatcaccttgtgagtagacacctgccaatattgtttgaaacctttttttaatatgacatcctctcttgtcattctcttctcccctttcccacagacttccctcctgggtccaggttcagaaccaagacttctgtacctagtgctgcctgattggtgaacattgacttcaagtagcatagcccttgtgtgactcacaactccgtgtccttcctaaagtttcgggaagcagggttgtctaatatgcacatttcttattttggtcatatttttactttagtgtcactcaccttttacaaagtgactttgtactcatttagggctctatcggaaatgcttccattttgccttttctacagttaggccaattttgaaatatataaattctatgcaacatttatgttgagttaccaatggaagccaaaagttctcttcccaaactgccaagaatgatacaggccataattgaaatgggaataccttttaagtttcattaggggtggggtgggagtgggacaggaacaagacttgcctagatctttgttgtatcttggggacttttactttgttgtttgatgcttaaacttcaaaattctctgtattcaaatttgattgtggcgaatctacttcaaaaaggaaaaataatccaactttgtggatattaaatggaaggtttgctgttttgatctagttgtttccagtggagcagttttatgaaatatgttctataagatgtacattttttcattgtaacatagaaattgtaaataattgattaaagtgctgcattttgatgaattttttctagccatttttaaagagaaaactaggaattgagtattttgtgtacggtatgtttccatcctccctccccttcctcctcccctcctctctctctcttcctacctatttaattttcatttgtcatgaggtttttggatttgccaatgatctgctggacatcatgccccatgtcatagagaataaagctgatgattgtaccagtcttaaattattcatgattcaataaaattgatgcttatttattcagattagtggtttggcttgtctgtgctagagcaagtcctcataggagttttatttcatgctaagagcaagtcagtcttatctggatgcagcaaatgcagggaaaaccccaaacctttgcaaacccatcttggctagtatgccatcaatatcccacatcttctcagtttctcaggtcttcttgccactcctgtggagcttgttagaactgtagaatttcagatcctctcagactttatgaatcaccagggatctagtggatcctcaatttctaacaaactcctaggcaataccagtgctctagtgcctggaccacacattgagtggcaagcaacatcagtgtccagccagccccctaagtcgatcccttggcatgaaaaggatttttttttaatgtattgagtacctactaatttccaaatgctttcccaaatactcagtataatgcaaaatgatgccagagaggtattcttactcccattttacaagtgg

SEQ ID NO: 8843 - protein, 1074 aa, Homo sapiens; identical to SEQ ID NO: 8837

SEQ ID NO: 8844 - DNA, 3140 bp, Homo sapiens
agcaagtgcccatcgccacagctgaaaacatgaaaaattcggtggtcatctccaatcctcatgccaccatgactcagcaaggtaacctagactccccgtcaggcagtggcgtcctgagcagtgggagcagcagtcctctctacagcaagaatgtggacctcaaccagtctccgctagcctccagccccagctcagcccactcggccccttccaacagcctcacctggggcaccaacgccagcagctcctccgcagttagcaaggatggcctgggctttcagtctgtcagcagcctccacaccagctgtgagtccatcgacatctccctcagcagtggaggggtccccagccacaattcttccactggcctcatcgcctcctccaaggacgactccttgactccctttgtcagaactaacagtgtgaagaccacactgtcagaaagccatggaccttgccttcccttctcgtccttgagggtttagaacacacaccaacacctccagcgtccccgccccagcttccggtggggtgatgcggtcaccctgcaaaagacttgcactttcctcagaaccaacatgacgcagctcaataagggtgagggtcactccctcccagaagccccgtctggacgagccttgcctgacctcttcggtgctgaccttcccaaagtgatgccttactggttttgtactaactgtgttcattttacataagtgtcgtgcctgcctggggtttgttttttttgtcattgttttccccattgaaacaaacagggctaaaaagtcatctgttcattaggagaactcaagttgctgtgacttttctcatccaaaagactcatttgtgtggatgcgtgaccatgggaaaaagaaaaaaaaaaagatccattttttaggttcttttcggtctccagctgacaacccaactggacaatgatctgtctggtgcaggagaaggcaaaagtttctacaagtctacatgaccttgctgatacttgttctaatagaaacccagtctgctgtgtcttcaacatactggtattttcattacaaagtatggtaaatttttgagttgtttgtttctgttttgtaaagagaatccttattggacaccagtgaaggtgtctctgttttaatgatcagggtttttattccatcttttgcatttcttctatttctgaaggtttgtctcttggcatctttttttagtttcttaccataagagtttgacccgaaactgctcacttcacattggatgacaccatgttcttcctctttgaaaagaaaaggggaatgtgtcccactagtgaaaggaaaacttttcaacactatccctgctttagtctcagcaaactcagactattctgcttagccttcattagtcatctgggtgtgagtgtgtcttgttctgtttttctttttaataaaacttttaaaccatatatttagcctgtgaccaggggggccaaaccctaagatttctggtaaacctgaagggtggccctcctcagacaatttatctcccagcaatgaccctactacactcgcgtactgtgaatttgggaggaggtaaagttgacttctcctcgtgggcagttttccaatcaccttgtgagtagacacctgccaatattgtttgaaacctttttttaatatgacatcctctcttgtcattctcttctcccctttcccacagacttccctcctgggtccaggttcagaaccaagacttctgtacctagtgctgcctgattggtgaacattgacttcaagtagcatagcccttgtgtgactcacaactccgtgtccttcctaaagtttcgggaagcagggttgtctaatatgcacatttcttattttggtcatatttttactttagtgtcactcaccttttacaaagtgactttgtactcatttagggctctatcggaaatgcttccattttgccttttctacagttaggccaattttgaaatatataaattctatgcaacatttatgttgagttaccaatggaagccaaaagttctcttcccaaactgccaagaatgatacaggccataattgaaatgggaataccttttaagtttcattaggggtggggtgggagtgggacaggaacaagacttgcctagatctttgttgtatcttggggacttttactttgttgtttgatgcttaaacttcaaaattctctgtattcaaatttgattgtggcgaatctacttcaaaaaggaaaaataatccaactttgtggatattaaatggaaggtttgctgttttgatctagttgtttccagtggagcagttttatgaaatatgttctataagatgtacattttttcattgtaacatagaaattgtaaataattgattaaagtgctgcattttgatgaattttttctagccatttttaaagagaaaactaggaattgagtattttgtgtacggtatgtttccatcctccctccccttcctcctcccctcctctctctctcttcctacctatttaattttcatttgtcatgaggtttttggatttgccaatgatctgctggacatcatgccccatgtcatagagaataaagctgatgattgtaccagtcttaaattattcatgattcaataaaattgatgcttatttattcagattagtggtttggcttgtctgtgctagagcaagtcctcataggagttttatttcatgctaagagcaagtcagtcttatctggatgcagcaaatgcagggaaaaccccaaacctttgcaaacccatcttggctagtatgccatcaatatcccacatcttctcagtttctcaggtcttcttgccactcctgtggagcttgttagaactgtagaatttcagatcctctcagactttatgaatcaccagggatctagtggatcctcaatttctaacaaactcctaggcaataccagtgctctagtgcctggaccacacattgagtggcaagcaacatcagtgtccagccagccccctaagtcgatcccttggcatgaaaaggatttttttttaatgtattgagtacctactaatttccaaatgctttcccaaatactcagtataatgcaaaatgatgccagagaggtattcttactcccattttacaagtgg

SEQ ID NO: 8845 - protein, 151 aa, Homo sapiens; identical to SEQ ID NO: 8841

SEQ ID NO: 8846 - DNA, 3017 bp, Homo sapiens
gacagtcaagagaaaaagtattcagaaggttgaagggaaaaatgcggtaatagaaaagtgacatccttagcaaactattacttatttgtcactgacctatcgccaaaccaggaaaggttgtgtcaaggtgagattaagtcattccaagcctggagtgtcctgtattgctgatgttctcctcccctgtcccctttttggttccataacagccatctatcaattcaccttttttttttcttttaatagttcatggatcctcactctccttggtttccagcacatcgtcagtttattctacaccagaagaaaaatgccagtcagagattcgcaagctgcggcgggaactggatgcctcccaggagaaagtttcagctttgaccacccagctgacagcaaatgctcaccttgtggcagcctttgaacagagtcttggtaacatgacaatcaggctccagagtctgaccatgacagctgagcagaaggactcagaactgaatgagttaagaaaaaccattgagctgctaaagaaacagaacgcagctgcccaggctgccattaatggagtaattaacacacctgagctcaactgcaaaggaaacggcactgcccagtctgcagacctccgcatccgcaggcagcactcctcagacagcgtctccagcatcaacagtgccaccagccactccagcgtgggcagcaacatagagagtgactcaaagaagaagaagcggaagaactggttacgcagctccttcaagcaagctttcgggaagaagaagtccccaaaatctgcgtcctctcattcagatattgaggagatgacggattcttctttgccttcctcaccaaagttaccgcacaatgggtccacaggttccaccccactgctgaggaattctcactccaactctctaatttcagaatgcatggatagtgaagctgagaccgtcatgcagctccgaaatgagttaagagacaaggagatgaagctgacggatatccgcttagaagctctcagttctgcccaccagctggaccagctccgggaggccatgaacaggatgcagagtgaaatagagaagctgaaagctgagaatgatcggctgaagtcagagtctcaaggcagtggctgcagccgggctccttcccaagtgtccatctctgcctccccgaggcagtccatgggcctctcccagcacagcttgaacctcactgagtcaaccagcctggacatgttgctggatgacactggtgaatgctcggctcggaaggaaggaggcaggcatgttaagatagttgtcagctttcaggaggaaatgaagtggaaggaggattccagaccacatctctttcttattggctgcattggagttagtggcaagacgaagtgggatgtgctcgatggggtggttagacggctgttcaaagaatacatcattcatgtcgacccagtgagtcagctagggctgaattcagacagcgttcttggctacagcattggagaaatcaagcgcagcaacacttccgaaacaccggagctgcttccttgtggctatctggttggagagaacacgaccatctcagtgactgtgaaagggctcgcagaaaacagcctggactcactggtgtttgagtccttgattcccaagcccatcctgcagcgctacgtctccctcctgatagagcaccgtcggatcattctctctggccccagcggcactgggaaaacctacctggccaaccggctgtctgagtatatagtgcttcgagagggacgggagttgacagacggggttatcgccacctttaacgtggaccataagtccagcaaggaattgcgccagtacctgtccaaccttgctgaccagtgcaacagtgagaacaatgctgtggacatgcccctcgtcatcatcctggacaacctacaccacgtgagctctctgggagagatcttcaatgggctgctcaactgcaagtaccacaaatgcccttacataattggcacaatgaaccaggctacctcttcgactcccaacctgcagcttcaccataacttcagatgggtgctttgtgccaaccacacggagcctgtgaagggtttccttggccgattcctgaggaggaagctcatggaaacagagatcagtgggcgggtgcgcaatatggagctggtaaaaatcattgactggattcccaaggtctggcatcacctcaaccgcttcctggaggctcacagttcctcggacgtcaccatcggcccccggctcttcctgtcatgccccatcgatgtggacggctcgagagtgtggttcaccgacttgtggaactattccattatcccctatctcctggaagccgtcagagaaggactccagctctatggaaggcgcgccccctgggaggatcctgccaagtgggtgatggacacatatccatgggcagccagcccacaacagcacgagtggcctcccctgctgcagttacggcctgaggatgtcggcttcgacggctactccatgcctcgggagggatcgacaagcaagcagatgccccccagtgatgctgaaggtgacccgctgatgaacatgctgatgaggctgcaggaggcagccaactactccagcccccagagctatgacagcgactccaacagcaacagccatcacgatgacatcttggactcctctttggagtccactctgtgacaggggcccggagcccagcgccctcctcttctcctcaccgcattccacctgcatcccccacatcaccctgaagatgacttcctgagccagcccccagccacagccttagagctgcgggaacaccgagaccccccgtccttcagcctcgacctgggtgcaggcatcccgggccagctgcctgcggaccgcttccttccacagcgagaactgcactaccttctgttgtactttaattattgttttgccttgttgctgtgacctccctaagacactgaagatacttctcgggaaaggatcatcgccgttgaaatg

SEQ ID NO: 8847 - protein, 755 aa, Homo sapiens
MTIRLQSLTMTAEQKDSELNELRKTIELLKKQNAAAQAAINGVINTPELNCKGNGTAQSADLRIRRQHSSDSVSSINSATSHSSVGSNIESDSKKKKRKNWLRSSFKQAFGKKKSPKSASSHSDIEEMTDSSLPSSPKLPHNGSTGSTPLLRNSHSNSLISECMDSEAETVMQLRNELRDKEMKLTDIRLEALSSAHQLDQLREAMNRMQSEIEKLKAENDRLKSESQGSGCSRAPSQVSISASPRQSMGLSQHSLNLTESTSLDMLLDDTGECSARKEGGRHVKIVVSFQEEMKWKEDSRPHLFLIGCIGVSGKTKWDVLDGVVRRLFKEYIIHVDPVSQLGLNSDSVLGYSIGEIKRSNTSETPELLPCGYLVGENTTISVTVKGLAENSLDSLVFESLIPKPILQRYVSLLIEHRRIILSGPSGTGKTYLANRLSEYIVLREGRELTDGVIATFNVDHKSSKELRQYLSNLADQCNSENNAVDMPLVIILDNLHHVSSLGEIFNGLLNCKYHKCPYIIGTMNQATSSTPNLQLHHNFRWVLCANHTEPVKGFLGRFLRRKLMETEISGRVRNMELVKIIDWIPKVWHHLNRFLEAHSSSDVTIGPRLFLSCPIDVDGSRVWFTDLWNYSIIPYLLEAVREGLQLYGRRAPWEDPAKWVMDTYPWAASPQQHEWPPLLQLRPEDVGFDGYSMPREGSTSKQMPPSDAEGDPLMNMLMRLQEAANYSSPQSYDSDSNSNSHHDDILDSSLESTL

SEQ ID NO: 8848 - DNA, 6047 bp, Homo sapiens
gacagtcaagagaaaaagtattcagaaggttgaagggaaaaatgcggtaatagaaaagtgacatccttagcaaactattacttatttgtcactgacctatcgccaaaccaggaaaggttgtgtcaaggtgagattaagtcattccaagcctggagtgtcctgtattgctgatgttctcctcccctgtcccctttttggttccataacagccatctatcaattcaccttttttttttcttttaatagttcatggatcctcactctccttggtttccagcacatcgtcagtttattctacaccagaagaaaaatgccagtcagagattcgcaagctgcggcgggaactggatgcctcccaggagaaagtttcagctttgaccacccagctgacagcaaatgctcaccttgtggcagcctttgaacagagtcttggtaacatgacaatcaggctccagagtctgaccatgacagctgagcagaaggactcagaactgaatgagttaagaaaaaccattgagctgctaaagaaacagaacgcagctgcccaggctgccattaatggagtaattaacacacctgagctcaactgcaaaggaaacggcactgcccagtctgcagacctccgcatccgcaggcagcactcctcagacagcgtctccagcatcaacagtgccaccagccactccagcgtgggcagcaacatagagagtgactcaaagaagaagaagcggaagaactggttacgcagctccttcaagcaagctttcgggaagaagaagtccccaaaatctgcgtcctctcattcagatattgaggagatgacggattcttctttgccttcctcaccaaagttaccgcacaatgggtccacaggttccaccccactgctgaggaattctcactccaactctctaatttcagaatgcatggatagtgaagctgagaccgtcatgcagctccgaaatgagttaagagacaaggagatgaagctgacggatatccgcttagaagctctcagttctgcccaccagctggaccagctccgggaggccatgaacaggatgcagagtgaaatagagaagctgaaagctgagaatgatcggctgaagtcagagtctcaaggcagtggctgcagccgggctccttcccaagtgtccatctctgcctccccgaggcagtccatgggcctctcccagcacagcttgaacctcactgagtcaaccagcctggacatgttgctggatgacactggtgaatgctcggctcggaaggaaggaggcaggcatgttaagatagttgtcagctttcaggaggaaatgaagtggaaggaggattccagaccacatctctttcttattggctgcattggagttagtggcaagacgaagtgggatgtgctcgatggggtggttagacggctgttcaaagaatacatcattcatgtcgacccagtgagtcagctagggctgaattcagacagcgttcttggctacagcattggagaaatcaagcgcagcaacacttccgaaacaccggagctgcttccttgtggctatctggttggagagaacacgaccatctcagtgactgtgaaagggctcgcagaaaacagcctggactcactggtgtttgagtccttgattcccaagcccatcctgcagcgctacgtctccctcctgatagagcaccgtcggatcattctctctggccccagcggcactgggaaaacctacctggccaaccggctgtctgagtatatagtgcttcgagagggacgggagttgacagacggggttatcgccacctttaacgtggaccataagtccagcaaggaattgcgccagtacctgtccaaccttgctgaccagtgcaacagtgagaacaatgctgtggacatgcccctcgtcatcatcctggacaacctacaccacgtgagctctctgggagagatcttcaatgggctgctcaactgcaagtaccacaaatgcccttacataattggcacaatgaaccaggctacctcttcgactcccaacctgcagcttcaccataacttcagatgggtgctttgtgccaaccacacggagcctgtgaagggtttccttggccgattcctgaggaggaagctcatggaaacagagatcagtgggcgggtgcgcaatatggagctggtaaaaatcattgactggattcccaaggtctggcatcacctcaaccgcttcctggaggctcacagttcctcggacgtcaccatcggcccccggctcttcctgtcatgccccatcgatgtggacggctcgagagtgtggttcaccgacttgtggaactattccattatcccctatctcctggaagccgtcagagaaggactccagctctatggaaggcgcgccccctgggaggatcctgccaagtgggtgatggacacatatccatgggcagccagcccacaacagcacgagtggcctcccctgctgcagttacggcctgaggatgtcggcttcgacggctactccatgcctcgggagggatcgacaagcaagcagatgccccccagtgatgctgaaggtgacccgctgatgaacatgctgatgaggctgcaggaggcagccaactactccagcccccagagctatgacagcgactccaacagcaacagccatcacgatgacatcttggactcctctttggagtccactctgtgacaggggcccggagcccagcgccctcctcttctcctcaccgcattccacctgcatcccccacatcaccctgaagatgacttcctgagccagcccccagccacagccttagagctgcgggaacaccgagaccccccgtccttcagcctcgacctgggtgcaggcatcccgggccagctgcctgcggaccgcttccttccacagcgagaactgcactaccttctgttgtactttaattattgttttgccttgttgctgtgacctccctaagacactgaagatacttctcgggaaaggatcatcgccgttgaaatgaaaagagagacagagagaaaaaaaaaaagagaacccacatgaagctctgaaaccaaacagcatcctgccatgagcttcccagagacagaagagactggagcaaagtcggaaacacagagaagcacggcttcccctcagcacagaccctccagactgggtctcagagccgtgccacccaccctcccacacagccggccacagggagaactggtgctaaccagggtgcttgctttggtcacgttcaacgcactacagagctacgacacagggaaaccttaggagcaaataaaccgtgctttcatgttttttaaatggtgctttccttacccgagaggtattttgcctgttccaatcaaaccaccccattcaggtccatcagcctctgattaatatccgtgagagtgagtgacggagtgagagtgtgagcgagtggatgtggctgtcagtgcagaacagcatgtgtctctttccttctgatatatgaatgaatcaggtttttttttttttttttctgcaaacactgtgtatagtgagacttgttctactttggagaacaggttaccttttgaaaatgaggttgagtttcttcctttctgatgcattgatttttgaagatttttttttcccccttcccctcttggtcagaatcaatcctttggtgaaagtaagaaccgcaggagttgagttttggtttggtcctgctcagttttggtttttagttgtccatcctcacagtcctacacactcgcctcctcctgctagggctgggggtatctgtgtcctttaaaatggatgaggacctggtcctcgacatgtgggtgagccatggaccttgccttcccttctcgtccttgagggtttagaacacacaccaacacctccagcgtccccgccccagcttccggtggggtgatgcggtcaccctgcaaaagacttgcactttcctcagaaccaacatgacgcagctcaataagggtgagggtcactccctcccagaagccccgtctggacgagccttgcctgacctcttcggtgctgaccttcccaaagtgatgccttactggttttgtactaactgtgttcattttacataagtgtcgtgcctgcctggggtttgttttttttgtcattgttttccccattgaaacaaacagggctaaaaagtcatctgttcattaggagaactcaagttgctgtgacttttctcatccaaaagactcatttgtgtggatgcgtgaccatgggaaaaagaaaaaaaaaaagatccattttttaggttcttttcggtctccagctgacaacccaactggacaatgatctgtctggtgcaggagaaggcaaaagtttctacaagtctacatgaccttgctgatacttgttctaatagaaacccagtctgctgtgtcttcaacatactggtattttcattacaaagtatggtaaatttttgagttgtttgtttctgttttgtaaagagaatccttattggacaccagtgaaggtgtctctgttttaatgatcagggtttttattccatcttttgcatttcttctatttctgaaggtttgtctcttggcatctttttttagtttcttaccataagagtttgacccgaaactgctcacttcacattggatgacaccatgttcttcctctttgaaaagaaaaggggaatgtgtcccactagtgaaaggaaaacttttcaacactatccctgctttagtctcagcaaactcagactattctgcttagccttcattagtcatctgggtgtgagtgtgtcttgttctgtttttctttttaataaaacttttaaaccatatatttagcctgtgaccaggggggccaaaccctaagatttctggtaaacctgaagggtggccctcctcagacaatttatctcccagcaatgaccctactacactcgcgtactgtgaatttgggaggaggtaaagttgacttctcctcgtgggcagttttccaatcaccttgtgagtagacacctgccaatattgtttgaaacctttttttaatatgacatcctctcttgtcattctcttctcccctttcccacagacttccctcctgggtccaggttcagaaccaagacttctgtacctagtgctgcctgattggtgaacattgacttcaagtagcatagcccttgtgtgactcacaactccgtgtccttcctaaagtttcgggaagcagggttgtctaatatgcacatttcttattttggtcatatttttactttagtgtcactcaccttttacaaagtgactttgtactcatttagggctctatcggaaatgcttccattttgccttttctacagttaggccaattttgaaatatataaattctatgcaacatttatgttgagttaccaatggaagccaaaagttctcttcccaaactgccaagaatgatacaggccataattgaaatgggaataccttttaagtttcattaggggtggggtgggagtgggacaggaacaagacttgcctagatctttgttgtatcttggggacttttactttgttgtttgatgcttaaacttcaaaattctctgtattcaaatttgattgtggcgaatctacttcaaaaaggaaaaataatccaactttgtggatattaaatggaaggtttgctgttttgatctagttgtttccagtggagcagttttatgaaatatgttctataagatgtacattttttcattgtaacatagaaattgtaaataattgattaaagtgctgcattttgatgaattttttctagccatttttaaagagaaaactaggaattgagtattttgtgtacggtatgtttccatcctccctccccttcctcctcccctcctctctctctcttcctacctatttaattttcatttgtcatgaggtttttggatttgccaatgatctgctggacatcatgccccatgtcatagagaataaagctgatgattgtaccagtcttaaattattcatgattcaataaaattgatgcttatttattcag

SEQ ID NO: 8849 - protein, 755 aa, Homo sapiens; identical to SEQ ID NO: 8847

SEQ ID NO: 8850 - DNA, 6535 bp, Homo sapiens
gacagtcaagagaaaaagtattcagaaggttgaagggaaaaatgcggtaatagaaaagtgacatccttagcaaactattacttatttgtcactgacctatcgccaaaccaggaaaggttgtgtcaaggtgagattaagtcattccaagcctggagtgtcctgtattgctgatgttctcctcccctgtcccctttttggttccataacagccatctatcaattcaccttttttttttcttttaatagttcatggatcctcactctccttggtttccagcacatcgtcagtttattctacaccagaagaaaaatgccagtcagagattcgcaagctgcggcgggaactggatgcctcccaggagaaagtttcagctttgaccacccagctgacagcaaatgctcaccttgtggcagcctttgaacagagtcttggtaacatgacaatcaggctccagagtctgaccatgacagctgagcagaaggactcagaactgaatgagttaagaaaaaccattgagctgctaaagaaacagaacgcagctgcccaggctgccattaatggagtaattaacacacctgagctcaactgcaaaggaaacggcactgcccagtctgcagacctccgcatccgcaggcagcactcctcagacagcgtctccagcatcaacagtgccaccagccactccagcgtgggcagcaacatagagagtgactcaaagaagaagaagcggaagaactggttacgcagctccttcaagcaagctttcgggaagaagaagtccccaaaatctgcgtcctctcattcagatattgaggagatgacggattcttctttgccttcctcaccaaagttaccgcacaatgggtccacaggttccaccccactgctgaggaattctcactccaactctctaatttcagaatgcatggatagtgaagctgagaccgtcatgcagctccgaaatgagttaagagacaaggagatgaagctgacggatatccgcttagaagctctcagttctgcccaccagctggaccagctccgggaggccatgaacaggatgcagagtgaaatagagaagctgaaagctgagaatgatcggctgaagtcagagtctcaaggcagtggctgcagccgggctccttcccaagtgtccatctctgcctccccgaggcagtccatgggcctctcccagcacagcttgaacctcactgagtcaaccagcctggacatgttgctggatgacactggtgaatgctcggctcggaaggaaggaggcaggcatgttaagatagttgtcagctttcaggaggaaatgaagtggaaggaggattccagaccacatctctttcttattggctgcattggagttagtggcaagacgaagtgggatgtgctcgatggggtggttagacggctgttcaaagaatacatcattcatgtcgacccagtgagtcagctagggctgaattcagacagcgttcttggctacagcattggagaaatcaagcgcagcaacacttccgaaacaccggagctgcttccttgtggctatctggttggagagaacacgaccatctcagtgactgtgaaagggctcgcagaaaacagcctggactcactggtgtttgagtccttgattcccaagcccatcctgcagcgctacgtctccctcctgatagagcaccgtcggatcattctctctggccccagcggcactgggaaaacctacctggccaaccggctgtctgagtatatagtgcttcgagagggacgggagttgacagacggggttatcgccacctttaacgtggaccataagtccagcaaggaattgcgccagtacctgtccaaccttgctgaccagtgcaacagtgagaacaatgctgtggacatgcccctcgtcatcatcctggacaacctacaccacgtgagctctctgggagagatcttcaatgggctgctcaactgcaagtaccacaaatgcccttacataattggcacaatgaaccaggctacctcttcgactcccaacctgcagcttcaccataacttcagatgggtgctttgtgccaaccacacggagcctgtgaagggtttccttggccgattcctgaggaggaagctcatggaaacagagatcagtgggcgggtgcgcaatatggagctggtaaaaatcattgactggattcccaaggtctggcatcacctcaaccgcttcctggaggctcacagttcctcggacgtcaccatcggcccccggctcttcctgtcatgccccatcgatgtggacggctcgagagtgtggttcaccgacttgtggaactattccattatcccctatctcctggaagccgtcagagaaggactccagctctatggaaggcgcgccccctgggaggatcctgccaagtgggtgatggacacatatccatgggcagccagcccacaacagcacgagtggcctcccctgctgcagttacggcctgaggatgtcggcttcgacggctactccatgcctcgggagggatcgacaagcaagcagatgccccccagtgatgctgaaggtgacccgctgatgaacatgctgatgaggctgcaggaggcagccaactactccagcccccagagctatgacagcgactccaacagcaacagccatcacgatgacatcttggactcctctttggagtccactctgtgacaggggcccggagcccagcgccctcctcttctcctcaccgcattccacctgcatcccccacatcaccctgaagatgacttcctgagccagcccccagccacagccttagagctgcgggaacaccgagaccccccgtccttcagcctcgacctgggtgcaggcatcccgggccagctgcctgcggaccgcttccttccacagcgagaactgcactaccttctgttgtactttaattattgttttgccttgttgctgtgacctccctaagacactgaagatacttctcgggaaaggatcatcgccgttgaaatgaaaagagagacagagagaaaaaaaaaaagagaacccacatgaagctctgaaaccaaacagcatcctgccatgagcttcccagagacagaagagactggagcaaagtcggaaacacagagaagcacggcttcccctcagcacagaccctccagactgggtctcagagccgtgccacccaccctcccacacagccggccacagggagaactggtgctaaccagggtgcttgctttggtcacgttcaacgcactacagagctacgacacagggaaaccttaggagcaaataaaccgtgctttcatgttttttaaatggtgctttccttacccgagaggtattttgcctgttccaatcaaaccaccccattcaggtccatcagcctctgattaatatccgtgagagtgagtgacggagtgagagtgtgagcgagtggatgtggctgtcagtgcagaacagcatgtgtctctttccttctgatatatgaatgaatcaggtttttttttttttttttctgcaaacactgtgtatagtgagacttgttctactttggagaacaggttaccttttgaaaatgaggttgagtttcttcctttctgatgcattgatttttgaagatttttttttcccccttcccctcttggtcagaatcaatcctttggtgaaagtaagaaccgcaggagttgagttttggtttggtcctgctcagttttggtttttagttgtccatcctcacagtcctacacactcgcctcctcctgctagggctgggggtatctgtgtcctttaaaatggatgaggacctggtcctcgacatgtgggtgagccatggaccttgccttcccttctcgtccttgagggtttagaacacacaccaacacctccagcgtccccgccccagcttccggtggggtgatgcggtcaccctgcaaaagacttgcactttcctcagaaccaacatgacgcagctcaataagggtgagggtcactccctcccagaagccccgtctggacgagccttgcctgacctcttcggtgctgaccttcccaaagtgatgccttactggttttgtactaactgtgttcattttacataagtgtcgtgcctgcctggggtttgttttttttgtcattgttttccccattgaaacaaacagggctaaaaagtcatctgttcattaggagaactcaagttgctgtgacttttctcatccaaaagactcatttgtgtggatgcgtgaccatgggaaaaagaaaaaaaaaaagatccattttttaggttcttttcggtctccagctgacaacccaactggacaatgatctgtctggtgcaggagaaggcaaaagtttctacaagtctacatgaccttgctgatacttgttctaatagaaacccagtctgctgtgtcttcaacatactggtattttcattacaaagtatggtaaatttttgagttgtttgtttctgttttgtaaagagaatccttattggacaccagtgaaggtgtctctgttttaatgatcagggtttttattccatcttttgcatttcttctatttctgaaggtttgtctcttggcatctttttttagtttcttaccataagagtttgacccgaaactgctcacttcacattggatgacaccatgttcttcctctttgaaaagaaaaggggaatgtgtcccactagtgaaaggaaaacttttcaacactatccctgctttagtctcagcaaactcagactattctgcttagccttcattagtcatctgggtgtgagtgtgtcttgttctgtttttctttttaataaaacttttaaaccatatatttagcctgtgaccaggggggccaaaccctaagatttctggtaaacctgaagggtggccctcctcagacaatttatctcccagcaatgaccctactacactcgcgtactgtgaatttgggaggaggtaaagttgacttctcctcgtgggcagttttccaatcaccttgtgagtagacacctgccaatattgtttgaaacctttttttaatatgacatcctctcttgtcattctcttctcccctttcccacagacttccctcctgggtccaggttcagaaccaagacttctgtacctagtgctgcctgattggtgaacattgacttcaagtagcatagcccttgtgtgactcacaactccgtgtccttcctaaagtttcgggaagcagggttgtctaatatgcacatttcttattttggtcatatttttactttagtgtcactcaccttttacaaagtgactttgtactcatttagggctctatcggaaatgcttccattttgccttttctacagttaggccaattttgaaatatataaattctatgcaacatttatgttgagttaccaatggaagccaaaagttctcttcccaaactgccaagaatgatacaggccataattgaaatgggaataccttttaagtttcattaggggtggggtgggagtgggacaggaacaagacttgcctagatctttgttgtatcttggggacttttactttgttgtttgatgcttaaacttcaaaattctctgtattcaaatttgattgtggcgaatctacttcaaaaaggaaaaataatccaactttgtggatattaaatggaaggtttgctgttttgatctagttgtttccagtggagcagttttatgaaatatgttctataagatgtacattttttcattgtaacatagaaattgtaaataattgattaaagtgctgcattttgatgaattttttctagccatttttaaagagaaaactaggaattgagtattttgtgtacggtatgtttccatcctccctccccttcctcctcccctcctctctctctcttcctacctatttaattttcatttgtcatgaggtttttggatttgccaatgatctgctggacatcatgccccatgtcatagagaataaagctgatgattgtaccagtcttaaattattcatgattcaataaaattgatgcttatttattcagattagtggtttggcttgtctgtgctagagcaagtcctcataggagttttatttcatgctaagagcaagtcagtcttatctggatgcagcaaatgcagggaaaaccccaaacctttgcaaacccatcttggctagtatgccatcaatatcccacatcttctcagtttctcaggtcttcttgccactcctgtggagcttgttagaactgtagaatttcagatcctctcagactttatgaatcaccagggatctagtggatcctcaatttctaacaaactcctaggcaataccagtgctctagtgcctggaccacacattgagtggcaagcaacatcagtgtccagccagccccctaagtcgatcccttggcatgaaaaggatttttttttaatgtattgagtacctactaatttccaaatgctttcccaaatactcagtataatgcaaaatgatgccagagaggtattcttactcccattttacaagtgg

SEQ ID NO: 8851 - protein, 755 aa, Homo sapiens; identical to SEQ ID NO: 8847

SEQ ID NO: 8852 - DNA, 2897 bp, Homo sapiens
atatgcgagcgcagcacccggcgctgccgagccacctcccccgccgcccgctagcaagtttggcggctccaagccaggcgcgcctcaggatccaggctcatttgcttccacctagcttcggtgccccctgctaggcggggaccctcgagagcgatgccgatggatttgattttagttgtgtggttctgtgtgtgcactgccaggacagtggtgggctttgggatggaccctgaccttcagatggatatcgtcaccgagcttgaccttgtgaacaccacccttggagttgctcaggtgtctggaatgcacaatgccagcaaagcatttttatttcaagacatagaaagagagatccatgcagctcctcatgtgagtgagaaattaattcagctgttccggaacaagagtgaattcaccattttggccactgtacagcagaagccatccacttcaggagtgatactgtccattcgagaactggagcacagctattttgaactggagagcagtggcctgagggatgagattcggtatcactacatacacaatgggaagccaaggacagaggcacttccttaccgcatggcagatggacaatggcacaaggttgcactgtcagttagcgcctctcatctcctgctccatgtcgactgtaacaggatttatgagcgtgtgatagaccctccagataccaaccttcccccaggaatcaatttatggcttggccagcgcaaccaaaagcatggcttattcaaagggatcatccaagatgggaagatcatctttatgccgaatggatatataacacagtgtccaaatctaaatcacacttgcccaacctgcagtgatttcttaagcctggtgcaaggaataatggatttacaagagcttttggccaagatgactgcaaaactaaattatgcagagacaagacttagtcaattggaaaactgtcattgtgagaagacttgtcaagtgagtggactgctctatcgagatcaagactcttgggtagatggtgaccattgcaggaactgcacttgcaaaagtggtgccgtggaatgccgaaggatgtcctgtccccctctcaattgctccccagactccctcccagtgcacattgctggccagtgctgtaaggtctgccgaccaaaatgtatctatggaggaaaagttcttgcagaaggccagcggattttaaccaagagctgtcgggaatgccgaggtggagttttagtaaaaattacagaaatgtgtcctcctttgaactgctcagaaaaggatcacattcttcctgagaatcagtgctgccgtgtctgtagaggtcataacttttgtgcagaaggacctaaatgtggtgaaaactcagagtgcaaaaactggaatacaaaagctacttgtgagtgcaagagtggttacatctctgtccagggagactctgcctactgtgaagatattgatgagtgtgcagctaagatgcattactgtcatgccaatactgtgtgtgtcaaccttcctgggttatatcgctgtgactgtgtcccaggatacattcgtgtggatgacttctcttgtacagaacacgatgaatgtggcagcggccagcacaactgtgatgagaatgccatctgcaccaacactgtccagggacacagctgcacctgcaaaccgggctacgtggggaacgggaccatctgcagagctttctgtgaagagggctgcagatacggtggaacgtgtgtggctcccaacaaatgtgtctgtccatctggattcacaggaagccactgcgagaaagacattgatgaatgtgccttaagaactcacacctgttggaacgattctgcctgcatcaacctggcagggggctttgactgtctctgcccctctgggccctcctgctctggtgactgtcctcatgaaggggggctgaagcacaatggccaggtgtggaccttgaaagaagacaggtgttctgtctgctcctgcaaggatggcaagatattctgccgacggacagcttgtgattgccagaatccaagtgctgacctattctgttgcccagaatgtgacaccagagtcacaagtcaatgtttagaccaaaatggtcacaagctgtatcgaagtggagacaattggacccatagctgtcagcagtgtcggtgtctggaaggagaggtagattgctggccactcacttgccccaacttgagctgtgagtatacagctatcttagaaggggaatgttgtccccgctgtgtcagtgacccctgcctagctgataacatcacctatgacatcagaaaaacttgcctggacagctatggtgtttcacggcttagtggctcagtgtggacgatggctggatctccctgcacaacctgtaaatgcaagaatggaagagtctgttgttctgtggattttgagtgtcttcaaaataattgaagtatttacagtggactcaacgcagaagaatggacgaaatgaccatccaacgtgattaaggataggaatcggtagtttggtttttttgtttgttttgtttttttaaccacagataattgccaaagtttccacctgaggacggtgtttggaggttgccttttggacctaccactttgctcattcttgctaacctagtctaggtgacctacagtgccgtgcatttaagtcaatggttgttaaaagaagtttcccgtgttgtaaatcatgtttcccttatcagatcatttgcaaatacatttaaatgatctcatggtaaatgttgatgtattttttggtttattttgtgtactaacataatagagagagactcagctccttttatttattttgttgatttatggatcaaattctaaaataaagttgcctgttgtgacttttgtcccatctactgc

SEQ ID NO: 8853 - protein, 763 aa, Homo sapiens
MPMDLILVVWFCVCTARTVVGFGMDPDLQMDIVTELDLVNTTLGVAQVSGMHNASKAFLFQDIEREIHAAPHVSEKLIQLFRNKSEFTILATVQQKPSTSGVILSIRELEHSYFELESSGLRDEIRYHYIHNGKPRTEALPYRMADGQWHKVALSVSASHLLLHVDCNRIYERVIDPPDTNLPPGINLWLGQRNQKHGLFKGIIQDGKIIFMPNGYITQCPNLNHTCPTCSDFLSLVQGIMDLQELLAKMTAKLNYAETRLSQLENCHCEKTCQVSGLLYRDQDSWVDGDHCRNCTCKSGAVECRRMSCPPLNCSPDSLPVHIAGQCCKVCRPKCIYGGKVLAEGQRILTKSCRECRGGVLVKITEMCPPLNCSEKDHILPENQCCRVCRGHNFCAEGPKCGENSECKNWNTKATCECKSGYISVQGDSAYCEDIDECAAKMHYCHANTVCVNLPGLYRCDCVPGYIRVDDFSCTEHDECGSGQHNCDENAICTNTVQGHSCTCKPGYVGNGTICRAFCEEGCRYGGTCVAPNKCVCPSGFTGSHCEKDIDECALRTHTCWNDSACINLAGGFDCLCPSGPSCSGDCPHEGGLKHNGQVWTLKEDRCSVCSCKDGKIFCRRTACDCQNPSADLFCCPECDTRVTSQCLDQNGHKLYRSGDNWTHSCQQCRCLEGEVDCWPLTCPNLSCEYTAILEGECCPRCVSDPCLADNITYDIRKTCLDSYGVSRLSGSVWTMAGSPCTTCKCKNGRVCCSVDFECLQNN

SEQ ID NO: 8854 - DNA, 3038 bp, Homo sapiens
atatgcgagcgcagcacccggcgctgccgagccacctcccccgccgcccgctagcaagtttggcggctccaagccaggcgcgcctcaggatccaggctcatttgcttccacctagcttcggtgccccctgctaggcggggaccctcgagagcgatgccgatggatttgattttagttgtgtggttctgtgtgtgcactgccaggacagtggtgggctttgggatggaccctgaccttcagatggatatcgtcaccgagcttgaccttgtgaacaccacccttggagttgctcaggtgtctggaatgcacaatgccagcaaagcatttttatttcaagacatagaaagagagatccatgcagctcctcatgtgagtgagaaattaattcagctgttccggaacaagagtgaattcaccattttggccactgtacagcagaagccatccacttcaggagtgatactgtccattcgagaactggagcacagctattttgaactggagagcagtggcctgagggatgagattcggtatcactacatacacaatgggaagccaaggacagaggcacttccttaccgcatggcagatggacaatggcacaaggttgcactgtcagttagcgcctctcatctcctgctccatgtcgactgtaacaggatttatgagcgtgtgatagaccctccagataccaaccttcccccaggaatcaatttatggcttggccagcgcaaccaaaagcatggcttattcaaagggatcatccaagatgggaagatcatctttatgccgaatggatatataacacagtgtccaaatctaaatcacacttgcccaacctgcagtgatttcttaagcctggtgcaaggaataatggatttacaagagcttttggccaagatgactgcaaaactaaattatgcagagacaagacttagtcaattggaaaactgtcattgtgagaagacttgtcaagtgagtggactgctctatcgagatcaagactcttgggtagatggtgaccattgcaggaactgcacttgcaaaagtggtgccgtggaatgccgaaggatgtcctgtccccctctcaattgctccccagactccctcccagtgcacattgctggccagtgctgtaaggtctgccgaccaaaatgtatctatggaggaaaagttcttgcagaaggccagcggattttaaccaagagctgtcgggaatgccgaggtggagttttagtaaaaattacagaaatgtgtcctcctttgaactgctcagaaaaggatcacattcttcctgagaatcagtgctgccgtgtctgtagaggtcataacttttgtgcagaaggacctaaatgtggtgaaaactcagagtgcaaaaactggaatacaaaagctacttgtgagtgcaagagtggttacatctctgtccagggagactctgcctactgtgaagatattgatgagtgtgcagctaagatgcattactgtcatgccaatactgtgtgtgtcaaccttcctgggttatatcgctgtgactgtgtcccaggatacattcgtgtggatgacttctcttgtacagaacacgatgaatgtggcagcggccagcacaactgtgatgagaatgccatctgcaccaacactgtccagggacacagctgcacctgcaaaccgggctacgtggggaacgggaccatctgcagagctttctgtgaagagggctgcagatacggtggaacgtgtgtggctcccaacaaatgtgtctgtccatctggattcacaggaagccactgcgagaaagatattgatgaatgttcagagggaatcattgagtgccacaaccattcccgctgcgttaacctgccagggtggtaccactgtgagtgcagaagcggtttccatgacgatgggacctattcactgtccggggagtcctgtattgacattgatgaatgtgccttaagaactcacacctgttggaacgattctgcctgcatcaacctggcagggggctttgactgtctctgcccctctgggccctcctgctctggtgactgtcctcatgaaggggggctgaagcacaatggccaggtgtggaccttgaaagaagacaggtgttctgtctgctcctgcaaggatggcaagatattctgccgacggacagcttgtgattgccagaatccaagtgctgacctattctgttgcccagaatgtgacaccagagtcacaagtcaatgtttagaccaaaatggtcacaagctgtatcgaagtggagacaattggacccatagctgtcagcagtgtcggtgtctggaaggagaggtagattgctggccactcacttgccccaacttgagctgtgagtatacagctatcttagaaggggaatgttgtccccgctgtgtcagtgacccctgcctagctgataacatcacctatgacatcagaaaaacttgcctggacagctatggtgtttcacggcttagtggctcagtgtggacgatggctggatctccctgcacaacctgtaaatgcaagaatggaagagtctgttgttctgtggattttgagtgtcttcaaaataattgaagtatttacagtggactcaacgcagaagaatggacgaaatgaccatccaacgtgattaaggataggaatcggtagtttggtttttttgtttgttttgtttttttaaccacagataattgccaaagtttccacctgaggacggtgtttggaggttgccttttggacctaccactttgctcattcttgctaacctagtctaggtgacctacagtgccgtgcatttaagtcaatggttgttaaaagaagtttcccgtgttgtaaatcatgtttcccttatcagatcatttgcaaatacatttaaatgatctcatggtaaatgttgatgtattttttggtttattttgtgtactaacataatagagagagactcagctccttttatttattttgttgatttatggatcaaattctaaaataaagttgcctgttgtgacttttgtcccatctactgc

SEQ ID NO: 8855 - protein, 810 aa, Homo sapiens
MPMDLILVVWFCVCTARTVVGFGMDPDLQMDIVTELDLVNTTLGVAQVSGMHNASKAFLFQDIEREIHAAPHVSEKLIQLFRNKSEFTILATVQQKPSTSGVILSIRELEHSYFELESSGLRDEIRYHYIHNGKPRTEALPYRMADGQWHKVALSVSASHLLLHVDCNRIYERVIDPPDTNLPPGINLWLGQRNQKHGLFKGIIQDGKIIFMPNGYITQCPNLNHTCPTCSDFLSLVQGIMDLQELLAKMTAKLNYAETRLSQLENCHCEKTCQVSGLLYRDQDSWVDGDHCRNCTCKSGAVECRRMSCPPLNCSPDSLPVHIAGQCCKVCRPKCIYGGKVLAEGQRILTKSCRECRGGVLVKITEMCPPLNCSEKDHILPENQCCRVCRGHNFCAEGPKCGENSECKNWNTKATCECKSGYISVQGDSAYCEDIDECAAKMHYCHANTVCVNLPGLYRCDCVPGYIRVDDFSCTEHDECGSGQHNCDENAICTNTVQGHSCTCKPGYVGNGTICRAFCEEGCRYGGTCVAPNKCVCPSGFTGSHCEKDIDECSEGIIECHNHSRCVNLPGWYHCECRSGFHDDGTYSLSGESCIDIDECALRTHTCWNDSACINLAGGFDCLCPSGPSCSGDCPHEGGLKHNGQVWTLKEDRCSVCSCKDGKIFCRRTACDCQNPSADLFCCPECDTRVTSQCLDQNGHKLYRSGDNWTHSCQQCRCLEGEVDCWPLTCPNLSCEYTAILEGECCPRCVSDPCLADNITYDIRKTCLDSYGVSRLSGSVWTMAGSPCTTCKCKNGRVCCSVDFECLQNN

SEQ ID NO: 8856 - DNA, 3245 bp, Homo sapiens
atatgcgagcgcagcacccggcgctgccgagccacctcccccgccgcccgctagcaagtttggcggctccaagccaggcgcgcctcaggatccaggctcatttgcttccacctagcttcggtgccccctgctaggcggggaccctcgagagcgatgccgatggatttgattttagttgtgtggttctgtgtgtgcactgccaggacagtggtgggctttgggatggaccctgaccttcagatggatatcgtcaccgagcttgaccttgtgaacaccacccttggagttgctcaggtgtctggaatgcacaatgccagcaaagcatttttatttcaagacatagaaagagagatccatgcagctcctcatgtgagtgagaaattaattcagctgttccggaacaagagtgaattcaccattttggccactgtacagcagaagccatccacttcaggagtgatactgtccattcgagaactggagcacagctattttgaactggagagcagtggcctgagggatgagattcggtatcactacatacacaatgggaagccaaggacagaggcacttccttaccgcatggcagatggacaatggcacaaggttgcactgtcagttagcgcctctcatctcctgctccatgtcgactgtaacaggatttatgagcgtgtgatagaccctccagataccaaccttcccccaggaatcaatttatggcttggccagcgcaaccaaaagcatggcttattcaaagggatcatccaagatgggaagatcatctttatgccgaatggatatataacacagtgtccaaatctaaatcacacttgcccaacctgcagtgatttcttaagcctggtgcaaggaataatggatttacaagagcttttggccaagatgactgcaaaactaaattatgcagagacaagacttagtcaattggaaaactgtcattgtgagaagacttgtcaagtgagtggactgctctatcgagatcaagactcttgggtagatggtgaccattgcaggaactgcacttgcaaaagtggtgccgtggaatgccgaaggatgtcctgtccccctctcaattgctccccagactccctcccagtgcacattgctggccagtgctgtaaggtctgccgaccaaaatgtatctatggaggaaaagttcttgcagaaggccagcggattttaaccaagagctgtcgggaatgccgaggtggagttttagtaaaaattacagaaatgtgtcctcctttgaactgctcagaaaaggatcacattcttcctgagaatcagtgctgccgtgtctgtagaggtcataacttttgtgcagaaggacctaaatgtggtgaaaactcagagtgcaaaaactggaatacaaaagctacttgtgagtgcaagagtggttacatctctgtccagggagactctgcctactgtgaagatattgatgagtgtgcagctaagatgcattactgtcatgccaatactgtgtgtgtcaaccttcctgggttatatcgctgtgactgtgtcccaggatacattcgtgtggatgacttctcttgtacagaacacgatgaatgtggcagcggccagcacaactgtgatgagaatgccatctgcaccaacactgtccagggacacagctgcacctgcaaaccgggctacgtggggaacgggaccatctgcagagctttctgtgaagagggctgcagatacggtggaacgtgtgtggctcccaacaaatgtgtctgtccatctggattcacaggaagccactgcgagaaagatattgatgaatgttcagagggaatcattgagtgccacaaccattcccgctgcgttaacctgccagggtggtaccactgtgagtgcagaagcggtttccatgacgatgggacctattcactgtccggggagtcctgtattgacattgatgaatgtgccttaagaactcacacctgttggaacgattctgcctgcatcaacctggcagggggctttgactgtctctgcccctctgggccctcctgctctggtgactgtcctcatgaaggggggctgaagcacaatggccaggtgtggaccttgaaagaagacaggtgttctgtctgctcctgcaaggatggcaagatattctgccgacggacagcttgtgattgccagaatccaagtgctgacctattctgttgcccagaatgtgacaccagagtcacaagtcaatgtttagaccaaaatggtcacaagctgtatcgaagtggagacaattggacccatagctgtcagcagtgtcggtgtctggaaggagaggtagattgctggccactcacttgccccaacttgagctgtgagtatacagctatcttagaaggggaatgttgtccccgctgtgtcagtgacccctgcctagctgataacatcacctatgacatcagaaaaacttgcctggacagctatggtgtttcacggcttagtggctcagtgtggacgatggctggatctccctgcacaacctgtaaatgcaagaatggaagagtctgttgttctgtggattttgagtgtcttcaaaataattgaagtatttacagtggactcaacgcagaagaatggacgaaatgaccatccaacgtgattaaggataggaatcggtagtttggtttttttgtttgttttgtttttttaaccacagataattgccaaagtttccacctgaggacggtgtttggaggttgccttttggacctaccactttgctcattcttgctaacctagtctaggtgacctacagtgccgtgcatttaagtcaatggttgttaaaagaagtttcccgtgttgtaaatcatgtttcccttatcagatcatttgcaaatacatttaaatgatctcatggtaaatgttgatgtattttttggtttattttgtgtactaacataatagagagagactcagctccttttatttattttgttgatttatggatcaaattctaaaataaagttgcctgttgtgacttttgtcccatctactgcatacttagtgctgagatccctgtaaaatgttttgatgaaaatatgtatgtagagtccagtcgcattatacatacatttcatagtgctgaaccttcttaaatgcctactcattcagcttaaacaggctgaagccaagtatgacaaagaggggaagggccaaaaacataatcaaagaataattttaaagagaattcttgtctctcttgc

SEQ ID NO: 8857 - protein, 810 aa, Homo sapiens; identical to SEQ ID NO: 8855

SEQ ID NO: 8858 - DNA, 3104 bp, Homo sapiens
atatgcgagcgcagcacccggcgctgccgagccacctcccccgccgcccgctagcaagtttggcggctccaagccaggcgcgcctcaggatccaggctcatttgcttccacctagcttcggtgccccctgctaggcggggaccctcgagagcgatgccgatggatttgattttagttgtgtggttctgtgtgtgcactgccaggacagtggtgggctttgggatggaccctgaccttcagatggatatcgtcaccgagcttgaccttgtgaacaccacccttggagttgctcaggtgtctggaatgcacaatgccagcaaagcatttttatttcaagacatagaaagagagatccatgcagctcctcatgtgagtgagaaattaattcagctgttccggaacaagagtgaattcaccattttggccactgtacagcagaagccatccacttcaggagtgatactgtccattcgagaactggagcacagctattttgaactggagagcagtggcctgagggatgagattcggtatcactacatacacaatgggaagccaaggacagaggcacttccttaccgcatggcagatggacaatggcacaaggttgcactgtcagttagcgcctctcatctcctgctccatgtcgactgtaacaggatttatgagcgtgtgatagaccctccagataccaaccttcccccaggaatcaatttatggcttggccagcgcaaccaaaagcatggcttattcaaagggatcatccaagatgggaagatcatctttatgccgaatggatatataacacagtgtccaaatctaaatcacacttgcccaacctgcagtgatttcttaagcctggtgcaaggaataatggatttacaagagcttttggccaagatgactgcaaaactaaattatgcagagacaagacttagtcaattggaaaactgtcattgtgagaagacttgtcaagtgagtggactgctctatcgagatcaagactcttgggtagatggtgaccattgcaggaactgcacttgcaaaagtggtgccgtggaatgccgaaggatgtcctgtccccctctcaattgctccccagactccctcccagtgcacattgctggccagtgctgtaaggtctgccgaccaaaatgtatctatggaggaaaagttcttgcagaaggccagcggattttaaccaagagctgtcgggaatgccgaggtggagttttagtaaaaattacagaaatgtgtcctcctttgaactgctcagaaaaggatcacattcttcctgagaatcagtgctgccgtgtctgtagaggtcataacttttgtgcagaaggacctaaatgtggtgaaaactcagagtgcaaaaactggaatacaaaagctacttgtgagtgcaagagtggttacatctctgtccagggagactctgcctactgtgaagatattgatgagtgtgcagctaagatgcattactgtcatgccaatactgtgtgtgtcaaccttcctgggttatatcgctgtgactgtgtcccaggatacattcgtgtggatgacttctcttgtacagaacacgatgaatgtggcagcggccagcacaactgtgatgagaatgccatctgcaccaacactgtccagggacacagctgcacctgcaaaccgggctacgtggggaacgggaccatctgcagagctttctgtgaagagggctgcagatacggtggaacgtgtgtggctcccaacaaatgtgtctgtccatctggattcacaggaagccactgcgagaaagacattgatgaatgtgccttaagaactcacacctgttggaacgattctgcctgcatcaacctggcagggggctttgactgtctctgcccctctgggccctcctgctctggtgactgtcctcatgaaggggggctgaagcacaatggccaggtgtggaccttgaaagaagacaggtgttctgtctgctcctgcaaggatggcaagatattctgccgacggacagcttgtgattgccagaatccaagtgctgacctattctgttgcccagaatgtgacaccagagtcacaagtcaatgtttagaccaaaatggtcacaagctgtatcgaagtggagacaattggacccatagctgtcagcagtgtcggtgtctggaaggagaggtagattgctggccactcacttgccccaacttgagctgtgagtatacagctatcttagaaggggaatgttgtccccgctgtgtcagtgacccctgcctagctgataacatcacctatgacatcagaaaaacttgcctggacagctatggtgtttcacggcttagtggctcagtgtggacgatggctggatctccctgcacaacctgtaaatgcaagaatggaagagtctgttgttctgtggattttgagtgtcttcaaaataattgaagtatttacagtggactcaacgcagaagaatggacgaaatgaccatccaacgtgattaaggataggaatcggtagtttggtttttttgtttgttttgtttttttaaccacagataattgccaaagtttccacctgaggacggtgtttggaggttgccttttggacctaccactttgctcattcttgctaacctagtctaggtgacctacagtgccgtgcatttaagtcaatggttgttaaaagaagtttcccgtgttgtaaatcatgtttcccttatcagatcatttgcaaatacatttaaatgatctcatggtaaatgttgatgtattttttggtttattttgtgtactaacataatagagagagactcagctccttttatttattttgttgatttatggatcaaattctaaaataaagttgcctgttgtgacttttgtcccatctactgcatacttagtgctgagatccctgtaaaatgttttgatgaaaatatgtatgtagagtccagtcgcattatacatacatttcatagtgctgaaccttcttaaatgcctactcattcagcttaaacaggctgaagccaagtatgacaaagaggggaagggccaaaaacataatcaaagaataattttaaagagaattcttgtctctcttgc

SEQ ID NO: 8859 - protein, 763 aa, Homo sapiens; identical to SEQ ID NO: 8853

SEQ ID NO: 8860 - DNA, 3108 bp, Homo sapiens
atatgcgagcgcagcacccggcgctgccgagccacctcccccgccgcccgctagcaagtttggcggctccaagccaggcgcgcctcaggatccaggctcatttgcttccacctagcttcggtgccccctgctaggcggggaccctcgagagcgatgccgatggatttgattttagttgtgtggttctgtgtgtgcactgccaggacagcagaagatatgaagccacccgtgttatcgctgatatggagaactagagttctgaagtctctgtctttgttcctttccagtggtgggctttgggatggaccctgaccttcagatggatatcgtcaccgagcttgaccttgtgaacaccacccttggagttgctcaggtgtctggaatgcacaatgccagcaaagcatttttatttcaagacatagaaagagagatccatgcagctcctcatgtgagtgagaaattaattcagctgttccggaacaagagtgaattcaccattttggccactgtacagcagaagccatccacttcaggagtgatactgtccattcgagaactggagcacagctattttgaactggagagcagtggcctgagggatgagattcggtatcactacatacacaatgggaagccaaggacagaggcacttccttaccgcatggcagatggacaatggcacaaggttgcactgtcagttagcgcctctcatctcctgctccatgtcgactgtaacaggatttatgagcgtgtgatagaccctccagataccaaccttcccccaggaatcaatttatggcttggccagcgcaaccaaaagcatggcttattcaaagggatcatccaagatgggaagatcatctttatgccgaatggatatataacacagtgtccaaatctaaatcacacttgcccaacctgcagtgatttcttaagcctggtgcaaggaataatggatttacaagagcttttggccaagatgactgcaaaactaaattatgcagagacaagacttagtcaattggaaaactgtcattgtgagaagacttgtcaagtgagtggactgctctatcgagatcaagactcttgggtagatggtgaccattgcaggaactgcacttgcaaaagtggtgccgtggaatgccgaaggatgtcctgtccccctctcaattgctccccagactccctcccagtgcacattgctggccagtgctgtaaggtctgccgaccaaaatgtatctatggaggaaaagttcttgcagaaggccagcggattttaaccaagagctgtcgggaatgccgaggtggagttttagtaaaaattacagaaatgtgtcctcctttgaactgctcagaaaaggatcacattcttcctgagaatcagtgctgccgtgtctgtagaggtcataacttttgtgcagaaggacctaaatgtggtgaaaactcagagtgcaaaaactggaatacaaaagctacttgtgagtgcaagagtggttacatctctgtccagggagactctgcctactgtgaagacagaacacgatgaatgtggcagcggccagcacaactgtgatgagaatgccatctgcaccaacactgtccagggacacagctgcacctgcaaaccgggctacgtggggaacgggaccatctgcagagagatattgatgaatgttcagagggaatcattgagtgccacaaccattcccgctgcgttaacctgccagggtggtaccactgtgagtgcagaagcggtttccatgacgatgggacctattcactgtccggggagtcctgtattgacattgatgaatgtgccttaagaactcacacctgttggaacgattctgcctgcatcaacctggcagggggctttgactgtctctgcccctctgggccctcctgctctggtgactgtcctcatgaaggggggctgaagcacaatggccaggtgtggaccttgaaagaagacaggtgttctgtctgctcctgcaaggatggcaagatattctgccgacggacagcttgtgattgccagaatccaagtgctgacctattctgttgcccagaatgtgacaccagagtcacaagtcaatgtttagaccaaaatggtcacaagctgtatcgaagtggagacaattggacccatagctgtcagcagtgtcggtgtctggaaggagaggtagattgctggccactcacttgccccaacttgagctgtgagtatacagctatcttagaaggggaatgttgtccccgctgtgtcagtgacccctgcctagctgataacatcacctatgacatcagaaaaacttgcctggacagctatggtgtttcacggcttagtggctcagtgtggacgatggctggatctccctgcacaacctgtaaatgcaagaatggaagagtctgttgttctgtggattttgagtgtcttcaaaataattgaagtatttacagtggactcaacgcagaagaatggacgaaatgaccatccaacgtgattaaggataggaatcggtagtttggtttttttgtttgttttgtttttttaaccacagataattgccaaagtttccacctgaggacggtgtttggaggttgccttttggacctaccactttgctcattcttgctaacctagtctaggtgacctacagtgccgtgcatttaagtcaatggttgttaaaagaagtttcccgtgttgtaaatcatgtttcccttatcagatcatttgcaaatacatttaaatgatctcatggtaaatgttgatgtattttttggtttattttgtgtactaacataatagagagagactcagctccttttatttattttgttgatttatggatcaaattctaaaataaagttgcctgttgtgacttttgtcccatctactgcatacttagtgctgagatccctgtaaaatgttttgatgaaaatatgtatgtagagtccagtcgcattatacatacatttcatagtgctgaaccttcttaaatgcctactcattcagcttaaacaggctgaagccaagtatgacaaagaggggaagggccaaaaacataatcaaagaataattttaaagagaattcttgtctctcttgc

SEQ ID NO: 8861 - protein, 414 aa, Homo sapiens
MDPDLQMDIVTELDLVNTTLGVAQVSGMHNASKAFLFQDIEREIHAAPHVSEKLIQLFRNKSEFTILATVQQKPSTSGVILSIRELEHSYFELESSGLRDEIRYHYIHNGKPRTEALPYRMADGQWHKVALSVSASHLLLHVDCNRIYERVIDPPDTNLPPGINLWLGQRNQKHGLFKGIIQDGKIIFMPNGYITQCPNLNHTCPTCSDFLSLVQGIMDLQELLAKMTAKLNYAETRLSQLENCHCEKTCQVSGLLYRDQDSWVDGDHCRNCTCKSGAVECRRMSCPPLNCSPDSLPVHIAGQCCKVCRPKCIYGGKVLAEGQRILTKSCRECRGGVLVKITEMCPPLNCSEKDHILPENQCCRVCRGHNFCAEGPKCGENSECKNWNTKATCECKSGYISVQGDSAYCEDRTR

SEQ ID NO: 8862 - DNA, 528 bp, Homo sapiens
acctagcttcggtgccccctgctaggcggggaccctcgagagcgatgccgatggatttgattttagttgtgtggttctgtgtgtgcactgccaggacagtggtgggctttgggatggaccctgaccttcagatggatatcgtcaccgagcttgaccttgtgaacaccacccttggagttgctcaggtgtctggaatgcacaatgccagcaaagcatttttatttcaagagtgaattcaccattttggccactgtacagcagaagccatccacttcaggagtgatactgtccattcgagaactggagcacagctattttgaactggagagcagtggcctgagggatgagattcggtatcactacatacacaatgggaagccaaggacagaggcacttccttaccgcatggcagatggacaatggcacaaggttgcactgtcagttagcgcctctcatctcctgctccatgtcgactgtaacaggatttatgagcgtgtgatagaccctccagataccaaccttccccca

SEQ ID NO: 8863 - protein, 108 aa, Homo sapiens
MPAKHFYFKSEFTILATVQQKPSTSGVILSIRELEHSYFELESSGLRDEIRYHYIHNGKPRTEALPYRMADGQWHKVALSVSASHLLLHVDCNRIYERVIDPPDTNLP

SEQ ID NO: 8864 - DNA, 1113 bp, Homo sapiens
agagagaattatgacccaagcaagaatcatgggtccagaattccacccaaggaagctagttcaaagccagagaaagagcacagcttttcacacaattgaatagatctcaacttcatgattttggtattgaagatgctgacagtagccagtggctctgtgaaggcaattttccaacctaccattcttggctactcctgggatattttacttggctgtgagatccccctgagaagcttctctttttctcacacaattcctccatcagcgaagtgtggtgggcagcacacagtgactatgattcctggagatggcactgggactgaacttatgctgcctgtcaagattatgttcagacatgtgtgtgtgcctgtggactttgagggaatgtcagtgacctccacctctgcctcacatgaagaggaaattcataatgccatcatggcagttcattgaaaccgtgtggctttgaagagtagcgttaaaactgacgacaccctgccaccatcatacaaatccttcaacaacatgttgcataccaccctagatctctatgccagtgtcattcatttaaaaaatttgccaaacgtggagacctggcacaaagatgtagacatcctagttgtttgggaaaacacagagggtgagtatagcaatctggagcatgagagtgtgaaaggagtgacagagagcctaaagatcatgactaaggccaagtctttgtgcattgctgaatatgccttccagctggcccagaagatgggatgcaaaaaagtgatggctgtgcacaaggtcaacatcacgaaactgggagatggtctcttcctccagtgctgtgggggaggtggcatcccgctatcctcagctcaccttagaagacatgattgtggagaatgccacaatgcactttctgtgaagagggctgcagatacggtggaacgtgtgtggctcccaacaaatgtgtctgtccatctggattcacaggaagccactgcgagaaagtggtgagaatgctggctccatgaaagaggtctgcgagagcagggaccttgtttgctctccagggcttactgcaacagactggcacataagtgtctaataaatattccgacagaa

SEQ ID NO: 8865 - protein, 159 aa, Homo sapiens
MLHTTLDLYASVIHLKNLPNVETWHKDVDILVVWENTEGEYSNLEHESVKGVTESLKIMTKAKSLCIAEYAFQLAQKMGCKKVMAVHKVNITKLGDGLFLQCCGGGGIPLSSAHLRRHDCGECHNALSVKRAADTVERVWLPTNVSVHLDSQEATARKW

SEQ ID NO: 8866 - DNA, 2045 bp, Homo sapiens
agagagaattatgacccaagcaagaatcatgggtccagaattccacccaaggaagctagttcaaagccagagaaagagcacagcttttcacacaattgaatagatctcaacttcatgattttggtattgaagatgctgacagtagccagtggctctgtgaaggcaattttccaacctaccattcttggctactcctgggatattttacttggctgtgagatccccctgagaagcttctctttttctcacacaattcctccatcagcgaagtgtggtgggcagcacacagtgactatgattcctggagatggcactgggactgaacttatgctgcctgtcaagattatgttcagacatgtgtgtgtgcctgtggactttgagggaatgtcagtgacctccacctctgcctcacatgaagaggaaattcataatgccatcatggcagttcattgaaaccgtgtggctttgaagagtagcgttaaaactgacgacaccctgccaccatcatacaaatccttcaacaacatgttgcataccaccctagatctctatgccagtgtcattcatttaaaaaatttgccaaacgtggagacctggcacaaagatgtagacatcctagttgtttgggaaaacacagagggtgagtatagcaatctggagcatgagagtgtgaaaggagtgacagagagcctaaagatcatgactaaggccaagtctttgtgcattgctgaatatgccttccagctggcccagaagatgggatgcaaaaaagtgatggctgtgcacaaggtcaacatcacgaaactgggagatggtctcttcctccagtgctgtgggggaggtggcatcccgctatcctcagctcaccttagaagacatgattgtggagaatgccacaatgcactttctgtgaagagggctgcagatacggtggaacgtgtgtggctcccaacaaatgtgtctgtccatctggattcacaggaagccactgcgagaaagatattgatgaatgttcagagggaatcattgagtgccacaaccattcccgctgcgttaacctgccagggtggtaccactgtgagtgcagaagcggtttccatgacgatgggacctattcactgtccggggagtcctgtattggatggcaagatattctgccgacggacagcttgtgattgccagaatccaagtgctgacctattctgttgcccagaatgtgacaccagagtcacaagtcaatgtttagaccaaaatggtcacaagctgtatcgaagtggagacaattggacccatagctgtcagcagtgtcggtgtctggaaggagaggtagattgctggccactcacttgccccaacttgagctgtgagtatacagctatcttagaaggggaatgttgtccccgctgtgtcagtgacccctgcctagctgataacatcacctatgacatcagaaaaacttgcctggacagctatggtgtttcacggcttagtggctcagtgtggacgatggctggatctccctgcacaacctgtaaatgcaagaatggaagagtctgttgttctgtggattttgagtgtcttcaaaataattgaagtatttacagtggactcaacgcagaagaatggacgaaatgaccatccaacgtgattaaggataggaatcggtagtttggtttttttgtttgttttgtttttttaaccacagataattgccaaagtttccacctgaggacggtgtttggaggttgccttttggacctaccactttgctcattcttgctaacctagtctaggtgacctacagtgccgtgcatttaagtcaatggttgttaaaagaagtttcccgtgttgtaaatcatgtttcccttatcagatcatttgcaaatacatttaaatgatctcatggtaaatgttgatgtattttttggtttattttgtgtactaacataatagagagagactcagctccttttatttattttgttgatttatggatcaaattctaaaataaagttgcctgttgtgacttttgtcccatctactgc

SEQ ID NO: 8867 - protein, 355 aa, Homo sapiens
MLHTTLDLYASVIHLKNLPNVETWHKDVDILVVWENTEGEYSNLEHESVKGVTESLKIMTKAKSLCIAEYAFQLAQKMGCKKVMAVHKVNITKLGDGLFLQCCGGGGIPLSSAHLRRHDCGECHNALSVKRAADTVERVWLPTNVSVHLDSQEATARKILMNVQRESLSATTIPAALTCQGGTTVSAEAVSMTMGPIHCPGSPVLDGKIFCRRTACDCQNPSADLFCCPECDTRVTSQCLDQNGHKLYRSGDNWTHSCQQCRCLEGEVDCWPLTCPNLSCEYTAILEGECCPRCVSDPCLADNITYDIRKTCLDSYGVSRLSGSVWTMAGSPCTTCKCKNGRVCCSVDFECLQNN

SEQ ID NO: 8868 - DNA, 2252 bp, Homo sapiens
agagagaattatgacccaagcaagaatcatgggtccagaattccacccaaggaagctagttcaaagccagagaaagagcacagcttttcacacaattgaatagatctcaacttcatgattttggtattgaagatgctgacagtagccagtggctctgtgaaggcaattttccaacctaccattcttggctactcctgggatattttacttggctgtgagatccccctgagaagcttctctttttctcacacaattcctccatcagcgaagtgtggtgggcagcacacagtgactatgattcctggagatggcactgggactgaacttatgctgcctgtcaagattatgttcagacatgtgtgtgtgcctgtggactttgagggaatgtcagtgacctccacctctgcctcacatgaagaggaaattcataatgccatcatggcagttcattgaaaccgtgtggctttgaagagtagcgttaaaactgacgacaccctgccaccatcatacaaatccttcaacaacatgttgcataccaccctagatctctatgccagtgtcattcatttaaaaaatttgccaaacgtggagacctggcacaaagatgtagacatcctagttgtttgggaaaacacagagggtgagtatagcaatctggagcatgagagtgtgaaaggagtgacagagagcctaaagatcatgactaaggccaagtctttgtgcattgctgaatatgccttccagctggcccagaagatgggatgcaaaaaagtgatggctgtgcacaaggtcaacatcacgaaactgggagatggtctcttcctccagtgctgtgggggaggtggcatcccgctatcctcagctcaccttagaagacatgattgtggagaatgccacaatgcactttctgtgaagagggctgcagatacggtggaacgtgtgtggctcccaacaaatgtgtctgtccatctggattcacaggaagccactgcgagaaagatattgatgaatgttcagagggaatcattgagtgccacaaccattcccgctgcgttaacctgccagggtggtaccactgtgagtgcagaagcggtttccatgacgatgggacctattcactgtccggggagtcctgtattggatggcaagatattctgccgacggacagcttgtgattgccagaatccaagtgctgacctattctgttgcccagaatgtgacaccagagtcacaagtcaatgtttagaccaaaatggtcacaagctgtatcgaagtggagacaattggacccatagctgtcagcagtgtcggtgtctggaaggagaggtagattgctggccactcacttgccccaacttgagctgtgagtatacagctatcttagaaggggaatgttgtccccgctgtgtcagtgacccctgcctagctgataacatcacctatgacatcagaaaaacttgcctggacagctatggtgtttcacggcttagtggctcagtgtggacgatggctggatctccctgcacaacctgtaaatgcaagaatggaagagtctgttgttctgtggattttgagtgtcttcaaaataattgaagtatttacagtggactcaacgcagaagaatggacgaaatgaccatccaacgtgattaaggataggaatcggtagtttggtttttttgtttgttttgtttttttaaccacagataattgccaaagtttccacctgaggacggtgtttggaggttgccttttggacctaccactttgctcattcttgctaacctagtctaggtgacctacagtgccgtgcatttaagtcaatggttgttaaaagaagtttcccgtgttgtaaatcatgtttcccttatcagatcatttgcaaatacatttaaatgatctcatggtaaatgttgatgtattttttggtttattttgtgtactaacataatagagagagactcagctccttttatttattttgttgatttatggatcaaattctaaaataaagttgcctgttgtgacttttgtcccatctactgcatacttagtgctgagatccctgtaaaatgttttgatgaaaatatgtatgtagagtccagtcgcattatacatacatttcatagtgctgaaccttcttaaatgcctactcattcagcttaaacaggctgaagccaagtatgacaaagaggggaagggccaaaaacataatcaaagaataattttaaagagaattcttgtctctcttgc

SEQ ID NO: 8869 - protein, 355 aa, Homo sapiens; identical to SEQ ID NO: 8867

SEQ ID NO: 8870 - DNA, 2106 bp, Homo sapiens
gagacttttaatcatctatcccttgtgctttacgcagaccctacaatacactagaggcttcaaagaggtcaaaaattcacatgtgtagacaaattaggtcccttaagatgccaggcaaacgaagtgctaccaaaacacgcaatgactgtcctaaaagtgcgttctgggatacacctgtaaacttggatcaagttccctcccctctcctcaaaatatatcgacttgtgctgaaagaaatcacgaccgatgctcacaattctgacctcgtaattatatagggggtggttttggtttctgcgtctttccctgattcagtggcaggtaacatatttcatgtacaaaatgaactgcaacaccacggcaaacaagggacaggccctcaaagttgtcggtagggagccaggaccccgccagtggcgtggggagacaccgtactaaacaagcttgcaaacagcaggcaccttcctgccactgaggaggaagggctggctaagggaggccggggcggaggaagccaagctctgcaggccctgacaaagtcctcccggcctccacgcgtcgccatggcaacgcggggtctgtgctggccgggattggccggcctggcgcgcgcagggcccgctgggaaagcgcgtccccgccgcggctccgccagtttgaacttggcgggccagatgtgggcggcggggcgctgggggcctacttttccctcttcctacgccggtttctctgctgactgcagacccaggtctcggccctcctcggactcctgctcagtccctatgacgggcgcacgtgggcaggggctggaggtggtgcgctcgccgtcgccgccgctgccgctgagctgcagcaattccaccaggtcgctgttgtctccccttggccaccagagcttccagtttgacgaggacgacggtgacggggaggatgaggaagacgtggatgatgaggaagacgtggatgaagatgcccatgattcagaggccaaagtggcgagcctgagaggaatggagttacaggggtgcgccagcactcaggttgaatcagaaaataaccaagaagaacagaaacaggtgcgcttaccagaaagccgcctgacaccatgggaggtgtggtttattggcaaagaaaaagaagaacgtgaccggctgcaactgaaagctctagaggaattaaatcaacaactagaaaaaagaaaagaaatggaagaacgtgaaaaaagaaagataattgctgaagaaaagcacaaggaatgggttcagaaaaagaatgagcaaaaaagaaaagaaagagaacaaaaaattaataaagaaatggaggaaaaagcagcaaaggaactggagaaagaatacttgcaagaaaaagcaaaagaaaaatatcaagaatggttaaagaaaaaaaatgctgaagaatgtgagaggaagaagaaagaaaaggaaaaagaaaaacaacagcaagctgaaatacaggagaaaaaggaaatagcagaaaaaaagtttcaagaatggttggaaaatgcgaaacataaacctcgtccagctgcaaagagctatggttatgccaatggaaaacttacaggtttttacagtggaaattcctatccagaaccagccttttataatccaattccgtggaaaccaattcatatgccacctcccaaagaagctaaggatctatcaggaaggaagagtaaaagacctgtgataagtcagccacacaagtcatcatctctggtaattcataaagccaggagcaatctttgccttggaactctgtgcagaatacaaagatagcgtatgtggaaaataacatgcttttatctggagctatttaatttaaaaatcagaaattgttttttactgctcagtcaataactcaacacttaatgtgattattgacaaatagcaatttttgcatttgtatatggagtccttagagttgaggaagatattttctggattttggtttttataaactttttaaggttgatcttggcatgttgttttgcagaataagtggctgaatatgtaagaattgtgtttgtatttagcttgtattaaaagtacactgtaataccaataaaactaacaatttttcttgtat

SEQ ID NO: 8871 - protein, 410 aa, Homo sapiens
MATRGLCWPGLAGLARAGPAGKARPRRGSASLNLAGQMWAAGRWGPTFPSSYAGFSADCRPRSRPSSDSCSVPMTGARGQGLEVVRSPSPPLPLSCSNSTRSLLSPLGHQSFQFDEDDGDGEDEEDVDDEEDVDEDAHDSEAKVASLRGMELQGCASTQVESENNQEEQKQVRLPESRLTPWEVWFIGKEKEERDRLQLKALEELNQQLEKRKEMEEREKRKIIAEEKHKEWVQKKNEQKRKEREQKINKEMEEKAAKELEKEYLQEKAKEKYQEWLKKKNAEECERKKKEKEKEKQQQAEIQEKKEIAEKKFQEWLENAKHKPRPAAKSYGYANGKLTGFYSGNSYPEPAFYNPIPWKPIHMPPPKEAKDLSGRKSKRPVISQPHKSSSLVIHKARSNLCLGTLCRIQR

SEQ ID NO: 8872 - DNA, 2122 bp, Homo sapiens
gctgggaaagcgcgtccccgccgcggctccgccagtttgaacttggcgggccagatgtgggcggcggggcgctgggggcctacttttccctcttcctacgccggtttctctgctgactgcagacccaggtctcggccctcctcggactcctgctcagtccctatgacgggcgcacgtgggcaggggctggaggtggtgcgctcgccgtcgccgccgctgccgctgagctgcagcaattccaccaggtcgctgttgtctccccttggccaccagagcttccagtttgacgaggacgacggtgacggggaggatgaggaagacgtggatgatgaggaagacgtggatgaagatgcccatgattcagaggccaaagtggcgagcctgagaggaatggagttacaggggtgcgccagcactcaggttgaatcagaaaataaccaagaagaacagaaacaggtgcgcttaccagaaagccgcctgacaccatgggaggtgtggtttattggcaaagaaaaagaagaacgtgaccggctgcaactgaaagctctagaggaattaaatcaacaactagaaaaaagaaaagaaatggaagaacgtgaaaaaagaaagataattgctgaagaaaagcacaaggaatgggttcagaaaaagaatgagcaagtaaggaggggaaaatggatacacacattgacatctcttttgcaaaatatttcttcctattatacttcattacctaggttttaaaaaatacttctcttagagtctttcttctttggcttgttttgtttttctatcctggtggacatttatcaagtctctatcttctgccctttgccctctacttttctcctttttccctcctgtggcttgcactaatatttgcctgcaggcagtcaccaagtctgtatttctaggcctgaccttttggatccttatggcaagtgcctccaagtctgcaaatctaaaacaacccattttgcccatttctccttcgtaaatccatcctcccatttctctgtttcattcagctgtcttctcggtcatcaaggcttaattagaattcttctgttgttcctaatcatctcctccttttctttacaattactactcccctgtttgtgatctctttccattatatctttcaacttgttgtttacttcttatactggattgtaagctacataagggcagggatttttgcctcttttgttcagttttccaggagctagatgaatacctgcgcatgatatatgtccaaaaatagtttaattgagtgaagatgttcattgaatggctgcattttttccttttaattttaatatattcttctatggatcacacacattcgaaattttaaaaatacttattctgtggtcaatttgtcttctgttgtgatttttacatatttagagtggtactgcttttattattataatccagttttacaaatgtggaaaaatgtttaaattgtaggacaatattttaaattttaattctaactttttatctttattgttgaatctaatgcctaatggtattaataagagtactaagtaaataatttcagtaaattgaagatgatataaccttcttcatccaagtattataagaaggaaattggttagatgtatgtgtgttataaccatatttgtttagaagtcaattactttgtttttttaaaaaagtttacttcatcccatgatataacatgaaagagatctttgtgaataaattcaaaaatcaaaataaatctctgtgactgttataaaactttgggtaatatctttttgaaatttgtaactataaaacaaaattattttacacatgcagaatagtttgctctttcctctaaaagtccttcttatcttctaactccattaagctaattttaccatgccaatcaaacctagttgttgtttgtctaggaatgtaagatacttctgggagacaatatattcactgttttaattagtggcagtagacctaatccaattatttgaagaaaaaaaaaattatttcttttggagggaagtggcttgccctgacataaatcactagttattgaaggcaaaattccgtaatgttgagaattatttaaaaataaaactgagacgttatattt

SEQ ID NO: 8873 - protein, 229 aa, Homo sapiens; identical to SEQ ID NO: 1274

SEQ ID NO: 8874 - DNA, 442 bp, Homo sapiens
ctgccgctgagctgcagcaattccaccaggtcgctgttgtctccccttggccaccagagcttccagtttgacgaggacgacggtgacggggaggatgaggaagacgtggatgatgaggaagacgtggatgaagatgcccatgattcagaggccaaagtggcgagcctgagaggaatggagttacaggggtgcgccagcactcaggttgaatcagaaaataaccaagaagaacagaaacaggtgcgcttaccagaaagccgcctgacaccatgggaggtgtggtttattggcaaagaaaaagaagaacgtgaccggctgcaactgaaagctctagaggaattaaatcaacaactagaaaaaagaaaagaaatggaagaacgtgaaaaaagaaagataattgctgaagaaaagcacaaggaatgggttcagaaaaagaatgagc

SEQ ID NO: 8875 - protein, 88 aa, Homo sapiens
MELQGCASTQVESENNQEEQKQVRLPESRLTPWEVWFIGKEKEERDRLQLKALEELNQQLEKRKEMEEREKRKIIAEEKHKEWVQKKN

SEQ ID NO: 8876 - DNA, 658 bp, Homo sapiens
gctgggaaagcgcgtccccgccgcggctccgccagtttgaacttggcgggccagatgtgggcggcggggcgctgggggcctacttttccctcttcctacgccggtttctctgctgactgcagacccaggtctcggccctcctcggactcctgctcagtccctatgacgggcgcacgtgggcaggggctggaggtggtgcgctcgccgtcgccgccgctgccgctgagctgcagcaattccaccaggtcgctgttgtctccccttggccaccagagcttccagtttgacgaggacgacggtgacggggaggatgaggaagacgtggatgatgaggaagacgtggatgaagatgcccatgattcagaggccaaagtggcgagcctgagaggaatggagttacaggggtgcgccagcactcaggttgaatcagaaaataaccaagaagaacagaaacaggtgcgcttaccagaaagccgcctgacaccatgggaggtgtggtttattggcaaagaaaaagaagaacgtgaccggctgcaactgaaagctctagaggaattaaatcaacaactagaaaaaagaaaagaaatggaagaacgtgaaaaaagaaagataattgctgaagaaaagcacaaggaatgggttcagaaaaagaatgagc

SEQ ID NO: 8877 - protein, 200 aa, Homo sapiens
MWAAGRWGPTFPSSYAGFSADCRPRSRPSSDSCSVPMTGARGQGLEVVRSPSPPLPLSCSNSTRSLLSPLGHQSFQFDEDDGDGEDEEDVDDEEDVDEDAHDSEAKVASLRGMELQGCASTQVESENNQEEQKQVRLPESRLTPWEVWFIGKEKEERDRLQLKALEELNQQLEKRKEMEEREKRKIIAEEKHKEWVQKKN

SEQ ID NO: 8878 - DNA, 6477 bp, Homo sapiens
ataagccagcggccgggggtttgggaaccagagcgtgcaaccctagaagggaaaaggacgggaagagattgagccgcggctgggagacagcgagccagagtctgggtgtttgtgcgagagccacggcgggggctggggcgagtggccggcatggctgaaggctgcgctctgcaaccttgaagagccgctgcattgagaggccagggacagggagaccggtgcgatggcagagcgcggcccccgccgctgcgccgggccggcccggctggcgtgagccgccggaggagcggggctgcctctgcgcgtccatggagcagcgggaagggcgaaactccggagcgccgcgtccctgcgccgctgcggcggactgctgaaggggccgagcccgcgcggaccgccgaggaagagacccccgctccagcccgcaggccggctgcccgggggcggcgggggacatcggagggcagcggagcgagcagcgccgcgggagaggccggcgcgggaggcggccgcagcaatgccgggcccgctagggctgctctgcttcctcgccctggggctgctcggctcggccgggcccagcggcgcggcgccgcctctctgcgcggcgccctgcagctgcgacggcgaccgtcgggtggactgctccgggaaggggctgacggccgtgcccgaggggctcagcgccttcacccaagcgctggatatcagtatgaacaacattactcagttgccagaagatgcatttaagaactttccttttctagaagagctacaattggcgggcaacgacctttcttttatccacccaaaggccttgtctgggttgaaagaactcaaagttctaacgctccagaataatcagttgaaaacagtacccagtgaagccattcgagggctgagtgctttgcagtctttgcgtttagatgccaaccatattacctcagtccccgaggacagttttgaaggacttgttcagttacggcatctgtggctggatgacaacagcttgacggaggtgcctgtgcaccccctcagcaatctgcccaccctacaggcgctgaccctggctctcaacaagatctcaagcatccctgactttgcatttaccaacctttcaagcctggtagttctgcatcttcataacaataaaattagaagcctgagtcaacactgttttgatggactagataacctggagaccttagacttgaattataataacttgggggaatttcctcaggctattaaagcccttcctagccttaaagagctaggatttcatagtaattctatttctgttatccctgatggagcatttgatggtaatccactcttaagaactatacatttgtatgataatcctctgtcttttgtggggaactcagcatttcacaatttatctgatcttcattccctagtcattcgtggtgcaagcatggtgcagcagttccccaatcttacaggaactgtccacctggaaagtctgactttgacaggtacaaagataagcagcatacctaataatttgtgtcaagaacaaaagatgcttaggactttggacttgtcttacaataatataagagaccttccaagttttaatggttgccatgctctggaagaaatttctttacagcgtaatcaaatctaccaaataaaggaaggcacctttcaaggcctgatatctctaaggattctagatctgagtagaaacctgatacatgaaattcacagtagagcttttgccacacttgggccaataactaacctagatgtaagtttcaatgaattaacttcctttcctacggaaggcctgaatgggctaaatcaactgaaacttgtgggcaacttcaagctgaaagaagccttagcagcaaaagactttgttaacctcaggtctttatcagtaccatatgcttatcagtgctgtgcattttggggttgtgactcttatgcaaatttaaacacagaagataacagcctccaggaccacagtgtggcacaggagaaaggtactgctgatgcagcaaatgtcacaagcactcttgaaaatgaagaacatagtcaaataattatccattgtacaccttcaacaggtgcttttaagccctgtgaatatttactgggaagctggatgattcgtcttactgtgtggttcattttcttggttgcattatttttcaacctgcttgttattttaacaacatttgcatcttgtacatcactgccttcgtccaaattgtttataggcttgatttctgtgtctaacttattcatgggaatctatactggcatcctaacttttcttgatgctgtgtcctggggcagattcgctgaatttggcatttggtgggaaactggcagtggctgcaaagtagctgggtttcttgcagttttctcctcagaaagtgccatatttttattaatgctagcaactgtcgaaagaagcttatctgcaaaagatataatgaaaaatgggaagagcaatcatctcaaacagttccgggttgctgcccttttggctttcctaggtgctacagtagcaggctgttttccccttttccatagaggggaatattctgcatcacccctttgtttgccatttcctacaggtgaaacgccatcattaggattcactgtaacgttagtgctattaaactcactagcatttttattaatggccgttatctacactaaactatactgcaacttggaaaaagaggacctctcagaaaactcacaatctagcatgattaagcatgtcgcttggctaatcttcaccaattgcatctttttctgccctgtggcgtttttttcatttgcaccattgatcactgcaatctctatcagccccgaaataatgaagtctgttactctgatattttttccattgcctgcttgcctgaatccagtcctgtatgttttcttcaacccaaagtttaaagaagactggaagttactgaagcgacgtgttaccaagaaaagtggatcagtttcagtttccatcagtagccaaggtggttgtctggaacaggatttctactacgactgtggcatgtactcacatttgcagggcaacctgactgtttgcgactgctgcgaatcgtttcttttaacaaagccagtatcatgcaaacacttgataaaatcacacagctgtcctgcattggcagtggcttcttgccaaagacctgagggctactggtccgactgtggcacacagtcggcccactctgattatgcagatgaagaagattcctttgtctcagacagttctgaccaggtgcaggcctgtggacgagcctgcttctaccagagtagaggattccctttggtgcgctatgcttacaatctaccaagagttaaagactgaactactgtgtgtgtaaccgtttcccccgtcaaccaaaatcagtgtttatagagtgaaccctattctcatctttcatctgggaagcacttctgtaatcactgcctggtgtcacttagaagaaggagaggtggcagtttatttctcaaaccagtcattttcaaagaacaggtgcctaaattataaattggtgaaaaatgcaatgtccaagcaatgtatgatctgtttgaaacaaatatatgacttgaaaaggatcttaggtgtagtagagcaatataatgttagttttttctgatccataagaagcaaatttatacctatttgtgtattaagcacaagataaagaacagctgttaatattttttaaaaatctattttaaaatgtgattttctataactgaagaaaatatcttgctaattttacctaatgtttcatccttaatctcaggacaacttactgcagggccaaaaaagggactgtcccagctagaactgtgagagtatacataggcattactttattatgttttcacttgccatccttgacataagagaactataaattttgtttaagcaatttataaatctaaaacctgaagatgtttttaaaacaatattaacagctgttaggttaaaaaaatagctggacatttgttttcagtcattatacattgctttggtccaatcagtaattttttcttaagtgttttgtgattacactactagaaaaaaagtaaaaggctaattgctgtgtgggtttagtcgatttggctaaactactaactaatgtgggggtttaatagtatctgagggatttggtggcttcatgtaatgttctcattaatgaatacttcctaatatcgttggctctactaatattttccaatttgctgggatgtcacctagcaatagcttggattatatagaaagtaaactgtggtcaatacttgcatttaattagacgaaacggggagtaattatgacacgaagtacttatgtttatttcttagtgagctggattatcttgaacctgtgctattaaatggaaatttccatacatcttccccatactattttttataaaagagcctattcaatagctcagaggttgaactctggttaaacaagataatatgttattaataaaaatagaagaagaaagaataaagcttagtcctgtgtctttaaaaattaaaaattttacttgattcccatctatgggctttagacctattactgggtggagtcttaaagttataattgttcaatatgttttttgaacagtgtgctaaatcaatagcaaacccactgccatattagttattctgaatatactaaaaaaatccagctagattgcagtttaataattaaactgtacatactgtgcatataatgaatttttatcttatgtaaattatttttagaacacaagttgggaaatgtggcttctgttcatttcgtttaattaaagctacctcctaaactatagtggctgccagtagcagactgttaaattgtggtttatatactttttgcattgtaaatagtctttgttgtacattgtcagtgtaataaaaacagaatctttgtatatcaaaatcatgtagtttgtataaaatgtgggaaggatttatttacagtgtgttgtaattttgtaaggccaactatttacaagttttaaaaattgctatcatgtatatttacacatctgataaatattaaatcataacttggtaagaaactcctaattaaaaggttttttccaaaattcaggttattgaaaacttttcattttattcatttaaaaactagaataacagatatataaaagtgttaatctttgtgctatatggtatgaaatacaatattgtactcagtgttttgaattattaaagtttctagaaagcaatctattttgccttaatttaaaactaggtatattaatgaatttagttttaaagtaagcaaattaaatatttgtaagtggacagtattagaagaaatgttggaagtaaccattagaaaacactattttgatatttatttgtaaacatataagaacattttgctgaaacttagaaataaggttttatcctaagtctgaactatactcatggaaaacagattatgaaatttcagaaaaaccattgattcaatctttatctaaaaagcaaatgattaaaaaatctgcatgatattaaatgtagtcagttgcccagatgcttagaaatacttcagtatttacaatcattaagtcctcattttacagatgagaaaacaaaaggcttaatgaaatttaagtgaatccctgagtcacagcaaatttgaccccaaaccagaacccaatgcctcttcatttgggacataattttgtgtgtgtgtttgttttaaatttcatatatgcttgaaatttccataacaaaaagtagagtagtataattaccccacctccctacccttcaccccatacctgtcactgctttgacaattatctgcagcatgtagtgaaccttgtttcatcttcatcctattcactaatcccctccaatccctctgccccttgcattattttgaagcaaatttaagacattatattgtttcatctgtaaatactaatgtctagggataaatttttaaagttgcataatatatgccacagggctaactggtgatggaattatttaagcaaaagtgactcttatataagtttccagagccagcaaaacataattacctcaaatataccatggccaaagtactaattgtatgaaaagatgtcactaagtcaataccctaaaacttaaagggagagacactcttttatacatttgtacatttatatataattctacccatctcgattatggcttctcagctccagtaatgaaaaggcactgtaagaaatgaggccgctggacttaattatgttcaaacaccagcaccagcaccatctgactctgcctcatacccttgggggggtccagcattgctagtgcataatgtcacagttggtcataatgatgaccctggcgcatcaagaaaagggtatactttgtttaggaaaacattttaaggggacaaagaagtatatgacatttagattccca

SEQ ID NO: 8879 - protein, 951 aa, Homo sapiens; identical to SEQ ID NO: 1276

SEQ ID NO: 8880 - DNA, 5277 bp, Homo sapiens
ataagccagcggccgggggtttgggaaccagagcgtgcaaccctagaagggaaaaggacgggaagagattgagccgcggctgggagacagcgagccagagtctgggtgtttgtgcgagagccacggcgggggctggggcgagtggccggcatggctgaaggctgcgctctgcaaccttgaagagccgctgcattgagaggccagggacagggagaccggtgcgatggcagagcgcggcccccgccgctgcgccgggccggcccggctggcgtgagccgccggaggagcggggctgcctctgcgcgtccatggagcagcgggaagggcgaaactccggagcgccgcgtccctgcgccgctgcggcggactgctgaaggggccgagcccgcgcggaccgccgaggaagagacccccgctccagcccgcaggccggctgcccgggggcggcgggggacatcggagggcagcggagcgagcagcgccgcgggagaggccggcgcgggaggcggccgcagcaatgccgggcccgctagggctgctctgcttcctcgccctggggctgctcggctcggccgggcccagcggcgcggcgccgcctctctgcgcggcgccctgcagctgcgacggcgaccgtcgggtggactgctccgggaaggggctgacggccgtgcccgaggggctcagcgccttcacccaagcgctggatatcagtatgaacaacattactcagttgccagaagatgcatttaagaactttccttttctagaagagctacaattggcgggcaacgacctttcttttatccacccaaaggccttgtctgggttgaaagaactcaaagttctaacgctccagaataatcagttgaaaacagtacccagtgaagccattcgagggctgagtgctttgcagtctttgcgtttagatgccaaccatattacctcagtccccgaggacagttttgaaggacttgttcagttacggcatctgtggctggatgacaacagcttgacggaggtgcctgtgcaccccctcagcaatctgcccaccctacaggcgctgaccctggctctcaacaagatctcaagcatccctgactttgcatttaccaacctttcaagcctggtagttctgcatcttcataacaataaaattagaagcctgagtcaacactgttttgatggactagataacctggagaccttagacttgaattataataacttgggggaatttcctcaggctattaaagcccttcctagccttaaagagctaggatttcatagtaattctatttctgttatccctgatggagcatttgatggtaatccactcttaagaactatacatttgtatgataatcctctgtcttttgtggggaactcagcatttcacaatttatctgatcttcattccctagtcattcgtggtgcaagcatggtgcagcagttccccaatcttacaggaactgtccacctggaaagtctgactttgacaggtacaaagataagcagcatacctaataatttgtgtcaagaacaaaagatgcttaggactttggacttgtcttacaataatataagagaccttccaagttttaatggttgccatgctctggaagaaatttctttacagcgtaatcaaatctaccaaataaaggaaggcacctttcaaggcctgatatctctaaggattctagatctgagtagaaacctgatacatgaaattcacagtagagcttttgccacacttgggccaataactaacctagatgtaagtttcaatgaattaacttcctttcctacggaaggcctgaatgggctaaatcaactgaaacttgtgggcaacttcaagctgaaagaagccttagcagcaaaagactttgttaacctcaggtctttatcagtaccatatgcttatcagtgctgtgcattttggggttgtgactcttatgcaaatttaaacacagaagataacagcctccaggaccacagtgtggcacaggagaaaggtactgctgatgcagcaaatgtcacaagcactcttgaaaatgaagaacatagtcaaataattatccattgtacaccttcaacaggtgcttttaagccctgtgaatatttactgggaagctggatgattcgtcttactgtgtggttcattttcttggttgcattatttttcaacctgcttgttattttaacaacatttgcatcttgtacatcactgccttcgtccaaattgtttataggcttgatttctgtgtctaacttattcatgggaatctatactggcatcctaacttttcttgatgctgtgtcctggggcagattcgctgaatttggcatttggtgggaaactggcagtggctgcaaagtagctgggtttcttgcagttttctcctcagaaagtgccatatttttattaatgctagcaactgtcgaaagaagcttatctgcaaaagatataatgaaaaatgggaagagcaatcatctcaaacagttccgggttgctgcccttttggctttcctaggtgctacagtagcaggctgttttccccttttccatagaggggaatattctgcatcacccctttgtttgccatttcctacaggtgaaacgccatcattaggattcactgtaacgttagtgctattaaactcactagcatttttattaatggccgttatctacactaaactatactgcaacttggaaaaagaggacctctcagaaaactcacaatctagcatgattaagcatgtcgcttggctaatcttcaccaattgcatctttttctgccctgtggcgtttttttcatttgcaccattgatcactgcaatctctatcagccccgaaataatgaagtctgttactctgatattttttccattgcctgcttgcctgaatccagtcctgtatgttttcttcaacccaaagtttaaagaagactggaagttactgaagcgacgtgttaccaagaaaagtggatcagtttcagtttccatcagtagccaaggtggttgtctggaacaggatttctactacgactgtggcatgtactcacatttgcagggcaacctgactgtttgcgactgctgcgaatcgtttcttttaacaaagccagtatcatgcaaacacttgataaaatcacacagctgtcctgcattggcagtggcttcttgccaaagacctgagggctactggtccgactgtggcacacagtcggcccactctgattatgcagatgaagaagattcctttgtctcagacagttctgaccaggtgcaggcctgtggacgagcctgcttctaccagagtagaggattccctttggtgcgctatgcttacaatctaccaagagttaaagactgaactactgtgtgtgtaaccgtttcccccgtcaaccaaaatcagtgtttatagagtgaaccctattctcatctttcatctgggaagcacttctgtaatcactgcctggtgtcacttagaagaaggagaggtggcagtttatttctcaaaccagtcattttcaaagaacaggtgcctaaattataaattggtgaaaaatgcaatgtccaagcaatgtatgatctgtttgaaacaaatatatgacttgaaaaggatcttaggtgtagtagagcaatataatgttagttttttctgatccataagaagcaaatttatacctatttgtgtattaagcacaagataaagaacagctgttaatattttttaaaaatctattttaaaatgtgattttctataactgaagaaaatatcttgctaattttacctaatgtttcatccttaatctcaggacaacttactgcagggccaaaaaagggactgtcccagctagaactgtgagagtatacataggcattactttattatgttttcacttgccatccttgacataagagaactataaattttgtttaagcaatttataaatctaaaacctgaagatgtttttaaaacaatattaacagctgttaggttaaaaaaatagctggacatttgttttcagtcattatacattgctttggtccaatcagtaattttttcttaagtgttttgtgattacactactagaaaaaaagtaaaaggctaattgctgtgtgggtttagtcgatttggctaaactactaactaatgtgggggtttaatagtatctgagggatttggtggcttcatgtaatgttctcattaatgaatacttcctaatatcgttggctctactaatattttccaatttgctgggatgtcacctagcaatagcttggattatatagaaagtaaactgtggtcaatacttgcatttaattagacgaaacggggagtaattatgacacgaagtacttatgtttatttcttagtgagctggattatcttgaacctgtgctattaaatggaaatttccatacatcttccccatactattttttataaaagagcctattcaatagctcagaggttgaactctggttaaacaagataatatgttattaataaaaatagaagaagaaagaataaagcttagtcctgtgtctttaaaaattaaaaattttacttgattcccatctatgggctttagacctattactgggtggagtcttaaagttataattgttcaatatgttttttgaacagtgtgctaaatcaatagcaaacccactgccatattagttattctgaatatactaaaaaaatccagctagattgcagtttaataattaaactgtacatactgtgcatataatgaatttttatcttatgtaaattatttttagaacacaagttgggaaatgtggcttctgttcatttcgtttaattaaagctacctcctaaactatagtggctgccagtagcagactgttaaattgtggtttatatactttttgcattgtaaatagtctttgttgtacattgtcagtgtaataaaaacagaatctttgtatatcaaaatcatgtagtttgtataaaatgtgggaaggatttatttacagtgtgttgtaattttgtaaggccaactatttacaagttttaaaaattgctatcatgtatatttacacatctgataaatattaaatcataacttggtaagaaactcctaattaaaaggttttttccaaaattcaggttattgaaaacttttcattttattcatttaaaaactagaataacagatatataaaagtgttaatctttgtgctatatggtatgaaatacaatattgtactcagtgttttgaattattaaagtttctagaaagc

SEQ ID NO: 8881 - protein, 951 aa, Homo sapiens; identical to SEQ ID NO: 1276

SEQ ID NO: 8882 - DNA, 5150 bp, Homo sapiens
ataagccagcggccgggggtttgggaaccagagcgtgcaaccctagaagggaaaaggacgggaagagattgagccgcggctgggagacagcgagccagagtctgggtgtttgtgcgagagccacggcgggggctggggcgagtggccggcatggctgaaggctgcgctctgcaaccttgaagagccgctgcattgagaggccagggacagggagaccggtgcgatggcagagcgcggcccccgccgctgcgccgggccggcccggctggcgtgagccgccggaggagcggggctgcctctgcgcgtccatggagcagcgggaagggcgaaactccggagcgccgcgtccctgcgccgctgcggcggactgctgaaggggccgagcccgcgcggaccgccgaggaagagacccccgctccagcccgcaggccggctgcccgggggcggcgggggacatcggagggcagcggagcgagcagcgccgcgggagaggccggcgcgggaggcggccgcagcaatgccgggcccgctagggctgctctgcttcctcgccctggggctgctcggctcggccgggcccagcggcgcggcgccgcctctctgcgcggcgccctgcagctgcgacggcgaccgtcgggtggactgctccgggaaggggctgacggccgtgcccgaggggctcagcgccttcacccaagcgctggatatcagtatgaacaacattactcagttgccagaagatgcatttaagaactttccttttctagaagagctacaattggcgggcaacgacctttcttttatccacccaaaggccttgtctgggttgaaagaactcaaagttctaacgctccagaataatcagttgaaaacagtacccagtgaagccattcgagggctgagtgctttgcagtctttgcgtttagatgccaaccatattacctcagtccccgaggacagttttgaaggacttgttcagttacggcatctgtggctggatgacaacagcttgacggaggtgcctgtgcaccccctcagcaatctgcccaccctacaggcgctgaccctggctctcaacaagatctcaagcatccctgactttgcatttaccaacctttcaagcctggtagttctgcatcttcataacaataaaattagaagcctgagtcaacactgttttgatggactagataacctggagaccttagacttgaattataataacttgggggaatttcctcaggctattaaagcccttcctagccttaaagagctaggatttcatagtaattctatttctgttatccctgatggagcatttgatggtaatccactcttaagaactatacatttgtatgataatcctctgtcttttgtggggaactcagcatttcacaatttatctgatcttcattccctagtcattcgtggtgcaagcatggtgcagcagttccccaatcttacaggaactgtccacctggaaagtctgactttgacaggtacaaagataagcagcatacctaataatttgtgtcaagaacaaaagatgcttaggactttggacttgtcttacaataatataagagaccttccaagttttaatggttgccatgctctggaagaaatttctttacagcgtaatcaaatctaccaaataaaggaaggcacctttcaaggcctgatatctctaaggattctagatctgagtagaaacctgatacatgaaattcacagtagagcttttgccacacttgggccaataactaacctagatgtaagtttcaatgaattaacttcctttcctacggaaggcctgaatgggctaaatcaactgaaacttgtgggcaacttcaagctgaaagaagccttagcagcaaaagactttgttaacctcaggtctttatcagtaccatatgcttatcagtgctgtgcattttggggttgtgactcttatgcaaatttaaacacagaagataacagcctccaggaccacagtgtggcacaggagaaaggtactgctgatgcagcaaatgtcacaagcactcttgaaaatgaagaacatagtcaaataattatccattgtacaccttcaacaggtgcttttaagccctgtgaatatttactgggaagctggatgattcgtcttactgtgtggttcattttcttggttgcattatttttcaacctgcttgttattttaacaacatttgcatcttgtacatcactgccttcgtccaaattgtttataggcttgatttctgtgtctaacttattcatgggaatctatactggcatcctaacttttcttgatgctgtgtcctggggcagattcgctgaatttggcatttggtgggaaactggcagtggctgcaaagtagctgggtttcttgcagttttctcctcagaaagtgccatatttttattaatgctagcaactgtcgaaagaagcttatctgcaaaagatataatgaaaaatgggaagagcaatcatctcaaacagttccgggttgctgcccttttggctttcctaggtgctacagtagcaggctgttttccccttttccatagaggggaatattctgcatcacccctttgtttgccatttcctacaggtgaaacgccatcattaggattcactgtaacgttagtgctattaaactcactagcatttttattaatggccgttatctacactaaactatactgcaacttggaaaaagaggacctctcagaaaactcacaatctagcatgattaagcatgtcgcttggctaatcttcaccaattgcatctttttctgccctgtggcgtttttttcatttgcaccattgatcactgcaatctctatcagccccgaaataatgaagtctgttactctgatattttttccattgcctgcttgcctgaatccagtcctgtatgttttcttcaacccaaagtttaaagaagactggaagttactgaagcgacgtgttaccaagaaaagtggatcagtttcagtttccatcagtagccaaggtggttgtctggaacaggatttctactacgactgtggcatgtactcacatttgcagggcaacctgactgtttgcgactgctgcgaatcgtttcttttaacaaagccagtatcatgcaaacacttgataaaatcacacagctgtcctgcattggcagtggcttcttgccaaagacctgagggctactggtccgactgtggcacacagtcggcccactctgattatgcagatgaagaagattcctttgtctcagacagttctgaccaggtgcaggcctgtggacgagcctgcttctaccagagtagaggattccctttggtgcgctatgcttacaatctaccaagagttaaagactgaactactgtgtgtgtaaccgtttcccccgtcaaccaaaatcagtgtttatagagtgaaccctattctcatctttcatctgggaagcacttctgtaatcactgcctggtgtcacttagaagaaggagaggtggcagtttatttctcaaaccagtcattttcaaagaacaggtgcctaaattataaattggtgaaaaatgcaatgtccaagcaatgtatgatctgtttgaaacaaatatatgacttgaaaaggatcttaggtgtagtagagcaatataatgttagttttttctgatccataagaagcaaatttatacctatttgtgtattaagcacaagataaagaacagctgttaatattttttaaaaatctattttaaaatgtgattttctataactgaagaaaatatcttgctaattttacctaatgtttcatccttaatctcaggacaacttactgcagggccaaaaaagggactgtcccagctagaactgtgagagtatacataggcattactttattatgttttcacttgccatccttgacataagagaactataaattttgtttaagcaatttataaatctaaaacctgaagatgtttttaaaacaatattaacagctgttaggttaaaaaaatagctggacatttgttttcagtcattatacattgctttggtccaatcagtaattttttcttaagtgttttgtgattacactactagaaaaaaagtaaaaggctaattgctgtgtgggtttagtcgatttggctaaactactaactaatgtgggggtttaatagtatctgagggatttggtggcttcatgtaatgttctcattaatgaatacttcctaatatcgttggctctactaatattttccaatttgctgggatgtcacctagcaatagcttggattatatagaaagtaaactgtggtcaatacttgcatttaattagacgaaacggggagtaattatgacacgaagtacttatgtttatttcttagtgagctggattatcttgaacctgtgctattaaatggaaatttccatacatcttccccatactattttttataaaagagcctattcaatagctcagaggttgaactctggttaaacaagataatatgttattaataaaaatagaagaagaaagaataaagcttagtcctgtgtctttaaaaattaaaaattttacttgattcccatctatgggctttagacctattactgggtggagtcttaaagttataattgttcaatatgttttttgaacagtgtgctaaatcaatagcaaacccactgccatattagttattctgaatatactaaaaaaatccagctagattgcagtttaataattaaactgtacatactgtgcatataatgaatttttatcttatgtaaattatttttagaacacaagttgggaaatgtggcttctgttcatttcgtttaattaaagctacctcctaaactatagtggctgccagtagcagactgttaaattgtggtttatatactttttgcattgtaaatagtctttgttgtacattgtcagtgtaataaaaacagaatctttgtatatcaaaatcatgtagtttgtataaaatgtgggaaggatttatttacagtgtgttgtaattttgtaaggccaactatttacaagttttaaaaattgctatcatgtatatttacacatctgataaatattaaatcataacttggtaagaaactcctaattaaaaggttttttccaaaattcaggttattg

SEQ ID NO: 8883 - protein, 951 aa, Homo sapiens; identical to SEQ ID NO: 1276

SEQ ID NO: 8884 - DNA, 5078 bp, Homo sapiens
ataagccagcggccgggggtttgggaaccagagcgtgcaaccctagaagggaaaaggacgggaagagattgagccgcggctgggagacagcgagccagagtctgggtgtttgtgcgagagccacggcgggggctggggcgagtggccggcatggctgaaggctgcgctctgcaaccttgaagagccgctgcattgagaggccagggacagggagaccggtgcgatggcagagcgcggcccccgccgctgcgccgggccggcccggctggcgtgagccgccggaggagcggggctgcctctgcgcgtccatggagcagcgggaagggcgaaactccggagcgccgcgtccctgcgccgctgcggcggactgctgaaggggccgagcccgcgcggaccgccgaggaagagacccccgctccagcccgcaggccggctgcccgggggcggcgggggacatcggagggcagcggagcgagcagcgccgcgggagaggccggcgcgggaggcggccgcagcaatgccgggcccgctagggctgctctgcttcctcgccctggggctgctcggctcggccgggcccagcggcgcggcgccgcctctctgcgcggcgccctgcagctgcgacggcgaccgtcgggtggactgctccgggaaggggctgacggccgtgcccgaggggctcagcgccttcacccaagcgctacaattggcgggcaacgacctttcttttatccacccaaaggccttgtctgggttgaaagaactcaaagttctaacgctccagaataatcagttgaaaacagtacccagtgaagccattcgagggctgagtgctttgcagtctttgcgtttagatgccaaccatattacctcagtccccgaggacagttttgaaggacttgttcagttacggcatctgtggctggatgacaacagcttgacggaggtgcctgtgcaccccctcagcaatctgcccaccctacaggcgctgaccctggctctcaacaagatctcaagcatccctgactttgcatttaccaacctttcaagcctggtagttctgcatcttcataacaataaaattagaagcctgagtcaacactgttttgatggactagataacctggagaccttagacttgaattataataacttgggggaatttcctcaggctattaaagcccttcctagccttaaagagctaggatttcatagtaattctatttctgttatccctgatggagcatttgatggtaatccactcttaagaactatacatttgtatgataatcctctgtcttttgtggggaactcagcatttcacaatttatctgatcttcattccctagtcattcgtggtgcaagcatggtgcagcagttccccaatcttacaggaactgtccacctggaaagtctgactttgacaggtacaaagataagcagcatacctaataatttgtgtcaagaacaaaagatgcttaggactttggacttgtcttacaataatataagagaccttccaagttttaatggttgccatgctctggaagaaatttctttacagcgtaatcaaatctaccaaataaaggaaggcacctttcaaggcctgatatctctaaggattctagatctgagtagaaacctgatacatgaaattcacagtagagcttttgccacacttgggccaataactaacctagatgtaagtttcaatgaattaacttcctttcctacggaaggcctgaatgggctaaatcaactgaaacttgtgggcaacttcaagctgaaagaagccttagcagcaaaagactttgttaacctcaggtctttatcagtaccatatgcttatcagtgctgtgcattttggggttgtgactcttatgcaaatttaaacacagaagataacagcctccaggaccacagtgtggcacaggagaaaggtactgctgatgcagcaaatgtcacaagcactcttgaaaatgaagaacatagtcaaataattatccattgtacaccttcaacaggtgcttttaagccctgtgaatatttactgggaagctggatgattcgtcttactgtgtggttcattttcttggttgcattatttttcaacctgcttgttattttaacaacatttgcatcttgtacatcactgccttcgtccaaattgtttataggcttgatttctgtgtctaacttattcatgggaatctatactggcatcctaacttttcttgatgctgtgtcctggggcagattcgctgaatttggcatttggtgggaaactggcagtggctgcaaagtagctgggtttcttgcagttttctcctcagaaagtgccatatttttattaatgctagcaactgtcgaaagaagcttatctgcaaaagatataatgaaaaatgggaagagcaatcatctcaaacagttccgggttgctgcccttttggctttcctaggtgctacagtagcaggctgttttccccttttccatagaggggaatattctgcatcacccctttgtttgccatttcctacaggtgaaacgccatcattaggattcactgtaacgttagtgctattaaactcactagcatttttattaatggccgttatctacactaaactatactgcaacttggaaaaagaggacctctcagaaaactcacaatctagcatgattaagcatgtcgcttggctaatcttcaccaattgcatctttttctgccctgtggcgtttttttcatttgcaccattgatcactgcaatctctatcagccccgaaataatgaagtctgttactctgatattttttccattgcctgcttgcctgaatccagtcctgtatgttttcttcaacccaaagtttaaagaagactggaagttactgaagcgacgtgttaccaagaaaagtggatcagtttcagtttccatcagtagccaaggtggttgtctggaacaggatttctactacgactgtggcatgtactcacatttgcagggcaacctgactgtttgcgactgctgcgaatcgtttcttttaacaaagccagtatcatgcaaacacttgataaaatcacacagctgtcctgcattggcagtggcttcttgccaaagacctgagggctactggtccgactgtggcacacagtcggcccactctgattatgcagatgaagaagattcctttgtctcagacagttctgaccaggtgcaggcctgtggacgagcctgcttctaccagagtagaggattccctttggtgcgctatgcttacaatctaccaagagttaaagactgaactactgtgtgtgtaaccgtttcccccgtcaaccaaaatcagtgtttatagagtgaaccctattctcatctttcatctgggaagcacttctgtaatcactgcctggtgtcacttagaagaaggagaggtggcagtttatttctcaaaccagtcattttcaaagaacaggtgcctaaattataaattggtgaaaaatgcaatgtccaagcaatgtatgatctgtttgaaacaaatatatgacttgaaaaggatcttaggtgtagtagagcaatataatgttagttttttctgatccataagaagcaaatttatacctatttgtgtattaagcacaagataaagaacagctgttaatattttttaaaaatctattttaaaatgtgattttctataactgaagaaaatatcttgctaattttacctaatgtttcatccttaatctcaggacaacttactgcagggccaaaaaagggactgtcccagctagaactgtgagagtatacataggcattactttattatgttttcacttgccatccttgacataagagaactataaattttgtttaagcaatttataaatctaaaacctgaagatgtttttaaaacaatattaacagctgttaggttaaaaaaatagctggacatttgttttcagtcattatacattgctttggtccaatcagtaattttttcttaagtgttttgtgattacactactagaaaaaaagtaaaaggctaattgctgtgtgggtttagtcgatttggctaaactactaactaatgtgggggtttaatagtatctgagggatttggtggcttcatgtaatgttctcattaatgaatacttcctaatatcgttggctctactaatattttccaatttgctgggatgtcacctagcaatagcttggattatatagaaagtaaactgtggtcaatacttgcatttaattagacgaaacggggagtaattatgacacgaagtacttatgtttatttcttagtgagctggattatcttgaacctgtgctattaaatggaaatttccatacatcttccccatactattttttataaaagagcctattcaatagctcagaggttgaactctggttaaacaagataatatgttattaataaaaatagaagaagaaagaataaagcttagtcctgtgtctttaaaaattaaaaattttacttgattcccatctatgggctttagacctattactgggtggagtcttaaagttataattgttcaatatgttttttgaacagtgtgctaaatcaatagcaaacccactgccatattagttattctgaatatactaaaaaaatccagctagattgcagtttaataattaaactgtacatactgtgcatataatgaatttttatcttatgtaaattatttttagaacacaagttgggaaatgtggcttctgttcatttcgtttaattaaagctacctcctaaactatagtggctgccagtagcagactgttaaattgtggtttatatactttttgcattgtaaatagtctttgttgtacattgtcagtgtaataaaaacagaatctttgtatatcaaaatcatgtagtttgtataaaatgtgggaaggatttatttacagtgtgttgtaattttgtaaggccaactatttacaagttttaaaaattgctatcatgtatatttacacatctgataaatattaaatcataacttggtaagaaactcctaattaaaaggttttttccaaaattcaggttattg

SEQ ID NO: 8885 - protein, 927 aa, Homo sapiens
MPGPLGLLCFLALGLLGSAGPSGAAPPLCAAPCSCDGDRRVDCSGKGLTAVPEGLSAFTQALQLAGNDLSFIHPKALSGLKELKVLTLQNNQLKTVPSEAIRGLSALQSLRLDANHITSVPEDSFEGLVQLRHLWLDDNSLTEVPVHPLSNLPTLQALTLALNKISSIPDFAFTNLSSLVVLHLHNNKIRSLSQHCFDGLDNLETLDLNYNNLGEFPQAIKALPSLKELGFHSNSISVIPDGAFDGNPLLRTIHLYDNPLSFVGNSAFHNLSDLHSLVIRGASMVQQFPNLTGTVHLESLTLTGTKISSIPNNLCQEQKMLRTLDLSYNNIRDLPSFNGCHALEEISLQRNQIYQIKEGTFQGLISLRILDLSRNLIHEIHSRAFATLGPITNLDVSFNELTSFPTEGLNGLNQLKLVGNFKLKEALAAKDFVNLRSLSVPYAYQCCAFWGCDSYANLNTEDNSLQDHSVAQEKGTADAANVTSTLENEEHSQIIIHCTPSTGAFKPCEYLLGSWMIRLTVWFIFLVALFFNLLVILTTFASCTSLPSSKLFIGLISVSNLFMGIYTGILTFLDAVSWGRFAEFGIWWETGSGCKVAGFLAVFSSESAIFLLMLATVERSLSAKDIMKNGKSNHLKQFRVAALLAFLGATVAGCFPLFHRGEYSASPLCLPFPTGETPSLGFTVTLVLLNSLAFLLMAVIYTKLYCNLEKEDLSENSQSSMIKHVAWLIFTNCIFFCPVAFFSFAPLITAISISPEIMKSVTLIFFPLPACLNPVLYVFFNPKFKEDWKLLKRRVTKKSGSVSVSISSQGGCLEQDFYYDCGMYSHLQGNLTVCDCCESFLLTKPVSCKHLIKSHSCPALAVASCQRPEGYWSDCGTQSAHSDYADEEDSFVSDSSDQVQACGRACFYQSRGFPLVRYAYNLPRVKD

SEQ ID NO: 8886 - DNA, 958 bp, Homo sapiens
gccacacttgggccaataactaacctagatgtaagtttcaatgaattaacttcctttcctacggaaggcctgaatgggctaaatcaactgaaacttgtgggcaacttcaagctgaaagaagccttagcagcaaaagactttgttaacctcaggtgtgtttttgcttatttttcttttttgttgaagttatggtaggctccaaaattacagagtgtcctggttttttgctctggttctcagattttctgataggctataatttaagggtgttttctacgtcagtctttgcaaatttggtgaaaaatagaatatgaacattattccacagtctttaagaatgtgaactggagcccttgatggcctcaaagagataatacagctattcaccagaatggttttttaatacagtggacttttcattagcaataagatggcagaaaccatgtaaatgtgaacctgcagaaaacaatgctataatacttcatgaaggttttagagttatgggggactgcattaaatataatagagagtattgttacgaggccgagcgtggtggctcgcacctgtaatcccagtactttggggaaggccaaggtgggctgatcacttgacaccagcagttcaagaccagcctgggcaacatgctgagaccctgtctctacaaaaaatataaaagttagctggatgtggtggcacgtgcctgtagtcccagctacttgggaggctgaaatgggaggatcacttcagcctgggagttctaggctgcactgagctgtgattgcgccattacactatagcctgggtgacagggcaagaccctgtctctaaaaaaaagagagagaatattattgttggagaagagaataaatattttcattacatttatttaaaccaagtaaatatatttaatggtataaagtcacaaatgacctggggcattaattttaagtgaaactat

SEQ ID NO: 8887 - protein, 41 aa, Homo sapiens
MVGSKITECPGFLLWFSDFLIGYNLRVFSTSVFANLVKNRI

SEQ ID NO: 8888 - DNA, 1156 bp, Homo sapiens
ggagaattgtttggtattagactttgaaatgacaagctttgaacgttgcacatttggttgtggcagtttcccagtgagtggtctgtgcatgagtttacaggtgcacttaagatcttgatgacctcagccctccagacagtcagttggggcctgaggcagctaggacctctagccacaggagtcttactgcagcgtgccatttaaatgttacaatggtcacatgtgacaagatattttttaaaaaagaatttgggaagcactgaggtaaggagtttaaacttgactcttaaggcagttggaggtgttgagaatgtttaagcaggtaatgtgaggagggtaaggagaaagagactagagatggggagaacagtgaggcggctgtgggaatagtctacctgaccagatgaacacattgaattatgacagctccaggtctttaatccatcactggatttgcaccaggacaaatagcatggtctgtctgagagtcctctatccctctctgcctcacttcactctttttctgaaagaattagatgctagaaacacaacagaggaagaaataacaggaactggtgatagactacagaagggaggggaataagagaacattttcgaatgctgagccagtttgactgaaagaaaagacagaaacaagatttgggggcagaatgcaagttggtttcaaaggtcttgggtgtaagaaggtgacaacttgcaattaactgtgatcagactgtgtgactgtagattagtgttttcctcctggtccatgtgggaaatcaagcccagtatcaacatctaatgtcacaagtgtttttgagttactgtgaagatgatatcagaattggggttcagttcaccttcttgcatgtctaactttatggaataattaggccatgggatgtatagaatctagtccatatgtaaatatgtgagcacttattctatatgggaataaattttgcttactatcttgagttgaattatttcttacatgaataatgtttttccgcaggactttgacaggtacaaagataagcagcatacctaataatttgtgtcaagaacaaaagatgcttaggactttggacttgtcttacaataatataagagaccttccaagttttaatggttgccatgctctggaagaaat

SEQ ID NO: 8889 - protein, 49 aa, Homo sapiens
MFFRRTLTGTKISSIPNNLCQEQKMLRTLDLSYNNIRDLPSFNGCHALE

SEQ ID NO: 8890 - DNA, 420 bp, Homo sapiens
agacttgaactgactcatttcactagaatttgttactgaacatggttgtttttgtttctgttaggcgtttagatgccaaccatattacctcagtccccgaggacagttttgaaggacttgttcagttacggcatctgtggctggatgacaacagcttgacggaggtgcctgtgcaccccctcagcaatctgcccaccctacaggcgctgaccctggctctcaacaagatctcaagcatccctgactttgcatttaccaacctttcaagcctggtagttctgcatcttcataacaataaaattagaagcctgagtcaacactgttttgatggactagataacctggagaccttgtaagtatattcatattttgggcaactgcattgtgatattgaaagtataattttatacttcactgcag

SEQ ID NO: 8891 - protein, 104 aa, Homo sapiens
MVVFVSVRRLDANHITSVPEDSFEGLVQLRHLWLDDNSLTEVPVHPLSNLPTLQALTLALNKISSIPDFAFTNLSSLVVLHLHNNKIRSLSQHCFDGLDNLETL

SEQ ID NO: 8892 - DNA, 1348 bp, Homo sapiens
ccgctgagcgagggccctcatgagaagggaaggtcgcgtggacaggctgccaggggcaagcgtttttagattacttcctccttcttggccccagatgcacttggttgcacgctctggttcccaaacccccggccgctggcttatgcaaatcacttaggtacatgcaaaagtatcccttctcccggagcgccattggcccggggaggtctcgagctcattactatgcagagaggagagccgccattggccaagaggaggaccagaggggcgtgtttctcgggcaaattggatctcctaaattggatgacctggtaagtagaacttccctccagcgttcagttaagttttaaatgactctccgctgttccaaagggcgaggacgtctggagctctgcaaacggaaaaaagattttgaagaggaggaaaaaagtttccctcgatctgacacacatctttgggttttagctatacactaagttaaaagtgtaccctctccagtgcctcacttcacctgggatctttacacctatcttgatacacatttggtagctaagtcttagcaattcattctccccagtcctctctctgtatttggtgtttttggtgactgcaaattagactcctttctcacgcactttaaaatcctgaaacacaggaattttgtaaaaggtcagagaaagtgatgtttctgaacactggacaatttccaaaacatctgagtgggaggtgactacggctgagaagccagcagcaacgttggtgttagggctgaaagacaacttaaagacccccagaaaactctggttttatagataagaaatctgaggctcgagagagagtgtgttctgcccaacatcatcacggaacagctcctgggctcctggctcctaatctgagcacacaggacttgttgactgatggataagctggacttcggttctaccacccctttacccaagaactcttgtaaacatagaacctgaacaagtatatgcagaggccctacctgttgggtgaacggttcaaggtgccctgttacaacaacagctcagatacagtgggggctctgagtgctgtaatgattgactggataaaagtcctcaaacatgtagaatttcactttttatgaactatttcgacttagaaaaagagttaacagcaatcagcttaagaaatattacgaatgtagttgaagctccctttgtaccactccccaatcatattccttttcttcctctccctgagaagtaagcagtttcctaaactttgtagttaattcccatgcatattttcatgcttttcgtatgcatgtatccctaaacaataaacagcattgtttttcatatat

SEQ ID NO: 8893 - protein, 62 aa, Homo sapiens
MQKYPFSRSAIGPGRSRAHYYAERRAAIGQEEDQRGVFLGQIGSPKLDDLVSRTSLQRSVKF

SEQ ID NO: 8894 - DNA, 470 bp, Homo sapiens
agattacttcctccttcttggccccagatgcacttggttgcacgctctggttcccaaacccccggccgctggcttatgcaaatcacttaggtacatgcaaaagtatcccttctcccggagcgccattggcccggggaggtctcgagctcattactatgcagagaggagagccgccattggccaagaggaggaccagaggggcgtgtttctcgggcaaattggatctcctaaattggatgacctggctaatgttaaaacatacttcgtgatctgtagaacgtaagagaaaatttagaaaatgtttgatatgaaagagaaaatgaaggatgttgcgataatagggaaaaactttatagtaattctaccaatttgccccttttattctaaaataacacaaacttgtcaagcttttcaacattttttgaattttttttttttttttttgagatggagtttcactctgttgccca

SEQ ID NO: 8895 - protein, 62 aa, Homo sapiens
MQKYPFSRSAIGPGRSRAHYYAERRAAIGQEEDQRGVFLGQIGSPKLDDLANVKTYFVICRT

SEQ ID NO: 8896 - DNA, 1476 bp, Homo sapiens
aaagggacaaatacttcattttaacaaggtatatgtaaggcctctcctaatttcattctaaccaatagggatagaaattttagcccctgcagcaggtaagtttcctgtatatggcagttactgaaagtaattcatttcatcagagggtattaaaaacccaaaactaattttgtgtttgttttttatttggcaaagaaatgcaataaaaccatgaagtaggaagttattactggtatctcttaaatgacataattttgagcccagactttaaatgatatctaacctttgtgttttacagtgttatgggttgaactgtgttcccctaagataggttggagtcctaacccccagtacctcagaatgtgacctcatttggagataagatctttacagaggtaatccaattaaaatgaggtcattagggtgggccctaattcagtatggctagtgtccatattttttgaaaagttgggagagatttgaacacagacgcacacccagggagaacaccatgggtagatgaaggcaaagattggggtgatgcttctacaaatcaagaaatattgaagattaccaacaaactaccagaagcaagaagaaaggcatagaccaaattctccctcacacttagaaggaaccaagtctcctgacactttgatcttggacttaacagcctccagaactgtgaaacaattaactttcacttaagccacccagtttgtggtactttgttatgccagccctagaaaattaatatgtgagagaatccacctttcagcggcatcactaccaaaactgggtacagaagcaaaattaaatgtgggttctccagtgtgtgataaaaacattccagtagaagtggctttggctaagaaaggatgagattcctggcccttggggatgaggagaatgctggtttctttgctttctgtggttgaaatgcttccttggatacctgtgcagctgtgtaactgagcttgtgcctccacgttggccccctggactcatgagcacctaagcacctagccgtttcttcactttaggttgtcagttactgcatggatgcgtcttaactccaggactcgtcaggagttggtatcgtcagggcattgtctccttcagcactgagagtagtttatgcagcagtccttgctccagctgggtgagatgaggatttgtctttgacatgggacattcagcctgtaaaggtttgtacaggttccttatgatccatgggcctggtaccaagcattaattaagccagaaccaattgtgttgctccctttttaaaactctgcattgtacttaggataaaatccaaataccttgccatgacctcaaaggttctgcataatccctgccctacttcctctcaggcctcatctcagtccactgccctacttgttctgctccacagcctattcccttgctggaaggcttccctctggttcttccactaactggctgcccctcatt

SEQ ID NO: 8897 - protein, 42 aa, Homo sapiens
MTSKVLHNPCPTSSQASSQSTALLVLLHSLFPCWKASLWFFH

SEQ ID NO: 8898 - DNA, 5087 bp, Homo sapiens
tttcctgtgggtctgtaggttaagggagaagatggcggcgctaggggaacccgtgcggctggagagagatatttgtagagcaattgaattattggaaaaactacaaaggagtggagaagtaccaccacagaaacttcaggctttgcaaagagtccttcaaagtgaattctgcaatgctgtgagagaggtatatgaacatgtctatgagactgtggacatcagtagcagtcctgaagtgagagcgaacgctactgcaaaggctactgttgctgcatttgctgccagtgaaggacattctcatcctcgagttgttgagctaccaaaaacagaagagggccttggattcaatattatgggaggcaaagaacaaaactctccaatctatatatcccgaataattccaggtggaattgctgatagacatgggggcctcaaacgtggagatcaactcctctctgttaatggagtgagtgttgaaggagaacatcatgaaaaagctgtagaactgctgaaagccgcacaaggaaaggttaaattagtggtacgatacacacccaaagtcttagaagaaatggagtcgcgctttgaaaaaatgagatcagcaaaacgcaggcaacagacctaatacatttcaaaacttgatatttcattttgcgttttagctagagaagttttccttgtgacttactaatggctgcaatgccaatgattgtaagaaaacaaacaaatttatcatgaaattctccttgtcattttataaatgcctattttaacatcatttatggttccagagatgcatacacttttttctgacaagaaaaagtaaaaggtgatgagggcaattctgtcctactgtttttacaggcctttttcaaatgcagattttgtcataaagttgttatagattttttaaaatgcttttttaatattaaaatgtacttttacattcttaatctttttttagaaaggaaaagttttcttcatttagctgctgatttaaaagtaaagttctccaattctttttttttgcttactctattttttttaacctgtgaaatttctttacagttttccaagaaattaagcataacagtctcatctacggcagttcattacactgtcaatgttaacatcattgctgcattttgtactttgaacacacacataatatatataaccagtggtaaatcatgactcagtacagtgcaagttttttcacttttacttaaacataatatataatggatattcatttatactgatttatgaaagtaagtttttaaacactgaaacaatcattgctaaaatacatattcttaatatttgagcattgaggcaagaggatgtaattgatagcattacttattacatccctatttatgttcaaccgtacatcaaattataaatgcaaaacaggttcagatttcatcttttgtgatttcttttaaatactattcatttttatttaaatgcacagtatttcccctatattttagtccttccattcctagagacaaaccagttatttggtggtgggaagtagctgaagcaaagaaggaaaagtaatacctttaacctcactagcttcaagagtagacattcttactagctcaatttaaataattgattttaaataggaagaaaagaggatatatttaagatacatagaaattatgatgtgaagtattcatgagaatctgtagattccatcaaaataagtaggaactcatactaaaattgttggatttaaagaggcaacttttgtttatgattcaaatatgggaatttgagaaatatttcatttgtccactggatgtcactattttactaaaaggcagctattagtgtgggactgtgactgaggtcttaaagactgaaagagttggggttcattttctgttacaacttacaggaacatttgtactttaagaaaaatttaagtgacaaatgttagaagatgatggattgaaaaatataagtaatttggcatattgaccctatataaaaaagtgggcattttgtaacattccttcaggaagaatagaattgtatgcttttttctgcatgtttgtgatcactgtgagtctcagatgattattccagttttcaatgatttttcaaaataaaagtcaatcagcattgttatttatcattaaggtattgaacactggattgcatggttgaatgtgtctttaatccactacaaaatgtgcttgttattgataggatcatgttgttaaattgtaaattttcaaaattaattgatgttttaaaaatgttgagaccaaagtagtatagaagtatggacttaatttaattgtaaaattattagaggtatttgttgtagagctttatatattaaagagaggtattggtgcatataaaaacagtaatattattgttatgcttgtattcttgcatttcagggtaagtaaaccctgaagaaatcttattttagtatagctacagctgcagtagcttttaagtatgtatcaacatttcattataaattatagcttcctggttctgtgtctcagctgtttcagaactttcagccaagttaaatcttttttggtgttgaaacttttagtaagttgagtaagctatttttttccctacggtaatccacaatctgttctttgtgtgggttgacacctatttataattcttaaaataagggtagctcaaaggagccaagtacagtagtttagcttgctactgttgagcatgaatagcagtaggttgttttcattaatgcagttttcataatgtatcccagaattttaaatcttgaccatagaaaaatacagtcattcattggcaaagatgtacagtggtggtttagtgcagtgaggaaatgatgggaatttttatcttagaaatggatgattcgtgaataaaactaggtacatagtaagtgtatgatagatgtttgatttgtaaattacaaatataaattatcacccccatttccatttattttcttgatatatcaaaatgtgttgacttagtgattctcaatcttagctacatattagcctggcagagctttaaaaaattgatacctgggtcctattccataacaactaaatcaaaatcacccttttttttttttttgtaaagctttccaggtggttctaaaggacacctagggtcaataacccattataaaatgatctgattacactggacactcttaggaagtatcaaaatagaacagttcaatttgcagctacttaatgattaattacatttcttaggttttttttttgttttttttttggtttgtttgttttttgttttaaaagagacaggatcttgctttgtctcccaggctggaacacagtggtgtgatcatagctcactgcagcctgaaactccttggcttccacctcagcctcccaaagcattaggattataggcgtgagccactgcacctggccaagtaatttcttttaggaataaaaggtacttggcattccttatttgggaagtaattacagtcttatctttttttttcttttttcttttttttaataaaatctaccagtaatttaaatgtgagctttttatgtctgtcatcattctgccccctttgcctttaaaacttacaaaaatacgtgtttgttatttgagaaagcatgtttaaaaattgcagatgagaaatattgtcgttaataattatgtactgtcttaatgtgggcacttcatttgttagtataatactagataatagcagcctagttctttaggatttgacgattcaaattttttttttgttttttgtttttgtttttttttgagacagagtcttgctctgttgcccaggctggcgtgcagtggtgtgatctcggctcacttcagcctccgccacctcaaggcagttcaagcaattctcctgcctcagcctcccgagtagctaggactacaggcgtgtgccacctctcccggctaatttttttgtatttttagtagagacggggtttcaccgtgttagccaggatgatctcgatctcctgacctcgtgattcgcccgcctcggcctcccaaagtgctggaattactggcgtgagccaccatgcccagcctcaaatatgtttttaaaaaatatcattgtcctcctcctcttaagatttttttaagttattttgctcaagtacttaagtagtctggctcaagtactttgtttacaattaaaatggatattatagcatttaatagaagaaatggttatggcttatccaaaaagaatgtcagcatgacctggtgtagacttaaaaaactacatgtttgtgaatattttataatgtggaatgatcattgaaatatcaaggattctagtaattgtatttcctgaataaatgtatgtttatgaattttctaacttacattttgttgtgtcctctgccaacaatctggttttataattgttgtctaaagtttgctagtagtgtttcttcaaaggttattccaggtatggttaagtagtgagaaaaatcacttattaattttcaagaactttgagactaatttgtattgactcggttttttaaaataactggcaaatgctatgcttctacttttaaaatttgtggtaatacccagaatggatgtaaaataacatttttcaatagattacttcatttatcaatttaattctgattttaaggcttatttaaaataaatttgtatgagttatgtcctcgttctttggatttgaaaaaagttgatataactacacaatagataacgtttatgaaaggtatgtataaaaaaacataattcctggtggctgctgaaatgaaactttgaatttctatattttgctttgtctttcataaaatttaaagaaaacattttcttgtgttatttcaagagcggcagtatgacgtgattgagagcacagattctgaagccaaacaactctggtttcaatcccagttccaccattaccgtgtgtcaccttagacaggttgcttgatttctttgtgccttagttccctcacctgtcatttgttaataagaatgcctgtaagtgtcatgccattttctgtaaggcccttaaaaaggtgcctggcatagtaaat

SEQ ID NO: 8899 - protein, 197 aa, Homo sapiens; identical to SEQ ID NO: 1278

SEQ ID NO: 8900 - DNA, 4708 bp, Homo sapiens
tttcctgtgggtctgtaggttaagggagaagatggcggcgctaggggaacccgtgcggctggagagagatatttgtagagcaattgaattattggaaaaactacaaaggagtggagaagtaccaccacagaaacttcaggctttgcaaagagtccttcaaagtgaattctgcaatgctgtgagagaggtatatgaacatgtctatgagactgtggacatcagtagcagtcctgaagtgagagcgaacgctactgcaaaggctactgttgctgcatttgctgccagtgaaggacattctcatcctcgagttgttgagctaccaaaaacagaagagggccttggattcaatattatgggaggcaaagaacaaaactctccaatctatatatcccgaataattccaggtggaattgctgatagacatgggggcctcaaacgtggagatcaactcctctctgttaatggagtgagtgttgaaggagaacatcatgaaaaagctgtagaactgctgaaagccgcacaaggaaaggttaaattagtggtacgatacacacccaaagtcttagaagaaatggagtcgcgctttgaaaaaatgagatcagcaaaacgcaggcaacagacctaatacatttcaaaacttgatatttcattttgcgttttagctagagaagttttccttgtgacttactaatggctgcaatgccaatgattgtaagaaaacaaacaaatttatcatgaaattctccttgtcattttataaatgcctattttaacatcatttatggttccagagatgcatacacttttttctgacaagaaaaagtaaaaggtgatgagggcaattctgtcctactgtttttacaggcctttttcaaatgcagattttgtcataaagttgttatagattttttaaaatgcttttttaatattaaaatgtacttttacattcttaatctttttttagaaaggaaaagttttcttcatttagctgctgatttaaaagtaaagttctccaattctttttttttgcttactctattttttttaacctgtgaaatttctttacagttttccaagaaattaagcataacagtctcatctacggcagttcattacactgtcaatgttaacatcattgctgcattttgtactttgaacacacacataatatatataaccagtggtaaatcatgactcagtacagtgcaagttttttcacttttacttaaacataatatataatggatattcatttatactgatttatgaaagtaagtttttaaacactgaaacaatcattgctaaaatacatattcttaatatttgagcattgaggcaagaggatgtaattgatagcattacttattacatccctatttatgttcaaccgtacatcaaattataaatgcaaaacaggttcagatttcatcttttgtgatttcttttaaatactattcatttttatttaaatgcacagtatttcccctatattttagtccttccattcctagagacaaaccagttatttggtggtgggaagtagctgaagcaaagaaggaaaagtaatacctttaacctcactagcttcaagagtagacattcttactagctcaatttaaataattgattttaaataggaagaaaagaggatatatttaagatacatagaaattatgatgtgaagtattcatgagaatctgtagattccatcaaaataagtaggaactcatactaaaattgttggatttaaagaggcaacttttgtttatgattcaaatatgggaatttgagaaatatttcatttgtccactggatgtcactattttactaaaaggcagctattagtgtgggactgtgactgaggtcttaaagactgaaagagttggggttcattttctgttacaacttacaggaacatttgtactttaagaaaaatttaagtgacaaatgttagaagatgatggattgaaaaatataagtaatttggcatattgaccctatataaaaaagtgggcattttgtaacattccttcaggaagaatagaattgtatgcttttttctgcatgtttgtgatcactgtgagtctcagatgattattccagttttcaatgatttttcaaaataaaagtcaatcagcattgttatttatcattaaggtattgaacactggattgcatggttgaatgtgtctttaatccactacaaaatgtgcttgttattgataggatcatgttgttaaattgtaaattttcaaaattaattgatgttttaaaaatgttgagaccaaagtagtatagaagtatggacttaatttaattgtaaaattattagaggtatttgttgtagagctttatatattaaagagaggtattggtgcatataaaaacagtaatattattgttatgcttgtattcttgcatttcagggtaagtaaaccctgaagaaatcttattttagtatagctacagctgcagtagcttttaagtatgtatcaacatttcattataaattatagcttcctggttctgtgtctcagctgtttcagaactttcagccaagttaaatcttttttggtgttgaaacttttagtaagttgagtaagctatttttttccctacggtaatccacaatctgttctttgtgtgggttgacacctatttataattcttaaaataagggtagctcaaaggagccaagtacagtagtttagcttgctactgttgagcatgaatagcagtaggttgttttcattaatgcagttttcataatgtatcccagaattttaaatcttgaccatagaaaaatacagtcattcattggcaaagatgtacagtggtggtttagtgcagtgaggaaatgatgggaatttttatcttagaaatggatgattcgtgaataaaactaggtacatagtaagtgtatgatagatgtttgatttgtaaattacaaatataaattatcacccccatttccatttattttcttgatatatcaaaatgtgttgacttagtgattctcaatcttagctacatattagcctggcagagctttaaaaaattgatacctgggtcctattccataacaactaaatcaaaatcacccttttttttttttttgtaaagctttccaggtggttctaaaggacacctagggtcaataacccattataaaatgatctgattacactggacactcttaggaagtatcaaaatagaacagttcaatttgcagctacttaatgattaattacatttcttaggttttttttttgttttttttttggtttgtttgttttttgttttaaaagagacaggatcttgctttgtctcccaggctggaacacagtggtgtgatcatagctcactgcagcctgaaactccttggcttccacctcagcctcccaaagcattaggattataggcgtgagccactgcacctggccaagtaatttcttttaggaataaaaggtacttggcattccttatttgggaagtaattacagtcttatctttttttttcttttttcttttttttaataaaatctaccagtaatttaaatgtgagctttttatgtctgtcatcattctgccccctttgcctttaaaacttacaaaaatacgtgtttgttatttgagaaagcatgtttaaaaattgcagatgagaaatattgtcgttaataattatgtactgtcttaatgtgggcacttcatttgttagtataatactagataatagcagcctagttctttaggatttgacgattcaaattttttttttgttttttgtttttgtttttttttgagacagagtcttgctctgttgcccaggctggcgtgcagtggtgtgatctcggctcacttcagcctccgccacctcaaggcagttcaagcaattctcctgcctcagcctcccgagtagctaggactacaggcgtgtgccacctctcccggctaatttttttgtatttttagtagagacggggtttcaccgtgttagccaggatgatctcgatctcctgacctcgtgattcgcccgcctcggcctcccaaagtgctggaattactggcgtgagccaccatgcccagcctcaaatatgtttttaaaaaatatcattgtcctcctcctcttaagatttttttaagttattttgctcaagtacttaagtagtctggctcaagtactttgtttacaattaaaatggatattatagcatttaatagaagaaatggttatggcttatccaaaaagaatgtcagcatgacctggtgtagacttaaaaaactacatgtttgtgaatattttataatgtggaatgatcattgaaatatcaaggattctagtaattgtatttcctgaataaatgtatgtttatgaattttctaacttacattttgttgtgtcctctgccaacaatctggttttataattgttgtctaaagtttgctagtagtgtttcttcaaaggttattccaggtatggttaagtagtgagaaaaatcacttattaattttcaagaactttgagactaatttgtattgactcggttttttaaaataactggcaaatgctatgcttctacttttaaaatttgtggtaatacccagaatggatgtaaaataacatttttcaatagattacttcatttatcaatttaattctgattttaaggcttatttaaaataaatttgtatgagttatgtcctcgtt

SEQ ID NO: 8901 - protein, 197 aa, Homo sapiens; identical to SEQ ID NO: 1278

SEQ ID NO: 8902 - DNA, 4314 bp, Homo sapiens
gtaggttaagggagaagatggcggcgctaggggaacccgtgcggctggagagagatatttgtagagcaattgaattattggaaaaactacaaaggagtggagaagtaccaccacagaaacttcaggctttgcaaagagtccttcaaagtgaattctgcaatgctgtgagagaggctactgttgctgcatttgctgccagtgaaggacattctcatcctcgagttgttgagctaccaaaaacagaagagggccttggattcaatattatgggaggcaaagaacaaaactctccaatctatatatcccgaataattccaggtggaattgctgatagacatgggggcctcaaacgtggagatcaactcctctctgttaatggagtgagtgttgaaggagaacatcatgaaaaagctgtagaactgctgaaagccgcacaaggaaaggttaaattagtggtacgatacacacccaaagtcttagaagaaatggagtcgcgctttgaaaaaatgagatcagcaaaacgcaggcaacagacctaatacatttcaaaacttgatatttcattttgcgttttagctagagaagttttccttgtgacttactaatggctgcaatgccaatgattgtaagaaaacaaacaaatttatcatgaaattctccttgtcattttataaatgcctattttaacatcatttatggttccagagatgcatacacttttttctgacaagaaaaagtaaaaggtgatgagggcaattctgtcctactgtttttacaggcctttttcaaatgcagattttgtcataaagttgttatagattttttaaaatgcttttttaatattaaaatgtacttttacattcttaatctttttttagaaaggaaaagttttcttcatttagctgctgatttaaaagtaaagttctccaattctttttttttgcttactctattttttttaacctgtgaaatttctttacagttttccaagaaattaagcataacagtctcatctacggcagttcattacactgtcaatgttaacatcattgctgcattttgtactttgaacacacacataatatatataaccagtggtaaatcatgactcagtacagtgcaagttttttcacttttacttaaacataatatataatggatattcatttatactgatttatgaaagtaagtttttaaacactgaaacaatcattgctaaaatacatattcttaatatttgagcattgaggcaagaggatgtaattgatagcattacttattacatccctatttatgttcaaccgtacatcaaattataaatgcaaaacaggttcagatttcatcttttgtgatttcttttaaatactattcatttttatttaaatgcacagtatttcccctatattttagtccttccattcctagagacaaaccagttatttggtggtgggaagtagctgaagcaaagaaggaaaagtaatacctttaacctcactagcttcaagagtagacattcttactagctcaatttaaataattgattttaaataggaagaaaagaggatatatttaagatacatagaaattatgatgtgaagtattcatgagaatctgtagattccatcaaaataagtaggaactcatactaaaattgttggatttaaagaggcaacttttgtttatgattcaaatatgggaatttgagaaatatttcatttgtccactggatgtcactattttactaaaaggcagctattagtgtgggactgtgactgaggtcttaaagactgaaagagttggggttcattttctgttacaacttacaggaacatttgtactttaagaaaaatttaagtgacaaatgttagaagatgatggattgaaaaatataagtaatttggcatattgaccctatataaaaaagtgggcattttgtaacattccttcaggaagaatagaattgtatgcttttttctgcatgtttgtgatcactgtgagtctcagatgattattccagttttcaatgatttttcaaaataaaagtcaatcagcattgttatttatcattaaggtattgaacactggattgcatggttgaatgtgtctttaatccactacaaaatgtgcttgttattgataggatcatgttgttaaattgtaaattttcaaaattaattgatgttttaaaaatgttgagaccaaagtagtatagaagtatggacttaatttaattgtaaaattattagaggtatttgttgtagagctttatatattaaagagaggtattggtgcatataaaaacagtaatattattgttatgcttgtattcttgcatttcagggtaagtaaaccctgaagaaatcttattttagtatagctacagctgcagtagcttttaagtatgtatcaacatttcattataaattatagcttcctggttctgtgtctcagctgtttcagaactttcagccaagttaaatcttttttggtgttgaaacttttagtaagttgagtaagctatttttttccctacggtaatccacaatctgttctttgtgtgggttgacacctatttataattcttaaaataagggtagctcaaaggagccaagtacagtagtttagcttgctactgttgagcatgaatagcagtaggttgttttcattaatgcagttttcataatgtatcccagaattttaaatcttgaccatagaaaaatacagtcattcattggcaaagatgtacagtggtggtttagtgcagtgaggaaatgatgggaatttttatcttagaaatggatgattcgtgaataaaactaggtacatagtaagtgtatgatagatgtttgatttgtaaattacaaatataaattatcacccccatttccatttattttcttgatatatcaaaatgtgttgacttagtgattctcaatcttagctacatattagcctggcagagctttaaaaaattgatacctgggtcctattccataacaactaaatcaaaatcacccttttttttttttttgtaaagctttccaggtggttctaaaggacacctagggtcaataacccattataaaatgatctgattacactggacactcttaggaagtatcaaaatagaacagttcaatttgcagctacttaatgattaattacatttcttaggttttttttttgttttttttttggtttgtttgttttttgttttaaaagagacaggatcttgctttgtctcccaggctggaacacagtggtgtgatcatagctcactgcagcctgaaactccttggcttccacctcagcctcccaaagcattaggattataggcgtgagccactgcacctggccaagtaatttcttttaggaataaaaggtacttggcattccttatttgggaagtaattacagtcttatctttttttttcttttttcttttttttaataaaatctaccagtaatttaaatgtgagctttttatgtctgtcatcattctgccccctttgcctttaaaacttacaaaaatacgtgtttgttatttgagaaagcatgtttaaaaattgcagatgagaaatattgtcgttaataattatgtactgtcttaatgtgggcacttcatttgttagtataatactagataatagcagcctagttctttaggatttgacgattcaaattttttttttgttttttgtttttgtttttttttgagacagagtcttgctctgttgcccaggctggcgtgcagtggtgtgatctcggctcacttcagcctccgccacctcaaggcagttcaagcaattctcctgcctcagcctcccgagtagctaggactacaggcgtgtgccacctctcccggctaatttttttgtatttttagtagagacggggtttcaccgtgttagccaggatgatctcgatctcctgacctcgtgattcgcccgcctcggcctcccaaagtgctggaattactggcgtgagccaccatgcccagcctcaaatatgtttttaaaaaatatcattgtcctcctcctcttaagatttttttaagttattttgctcaagtacttaagtagtctggctcaagtactttgtttacaattaaaatggatattatagcatttaatagaagaaatggttatggcttatccaaaaagaatgtcagcatgacctggtgtagacttaaaaaactacatgtttgtgaatattttataatgtggaatgatcattgaaatatcaaggattctagtaattgtatttcctgaataaatgtatgtttatgaattttctaacttacattttgttgtg

SEQ ID NO: 8903 - protein, 173 aa, Homo sapiens
MAALGEPVRLERDICRAIELLEKLQRSGEVPPQKLQALQRVLQSEFCNAVREATVAAFAASEGHSHPRVVELPKTEEGLGFNIMGGKEQNSPIYISRIIPGGIADRHGGLKRGDQLLSVNGVSVEGEHHEKAVELLKAAQGKVKLVVRYTPKVLEEMESRFEKMRSAKRRQQT

SEQ ID NO: 8904 - DNA, 4400 bp, Homo sapiens
tttcctgtgggtctgtaggttaagggagaagatggcggcgctaggggaacccgtgcggctggagagagatatttgtagagcaattgaattattggaaaaactacaaaggagtggagaagtaccaccacagaaacttcaggctttgcaaagagtccttcaaagtgaattctgcaatgctgtgagagaggtatatgaacatgtctatgagactgtggacatcagtagcagtcctgaagtgagagcgaacgctactgcaaaggctactgttgctgcatttgctgccagtgaaggacattctcatcctcgagttgttgagctaccaaaaacagaagagggccttggattcaatattatgggaggcaaagaacaaaactctccaatctatatatcccgaataattccaggtggaattgctgatagacatgggggcctcaaacgtggagatcaactcctctctgttaatggagtgagtgttgaaggagaacatcatgaaaaagctgtagaactgctgaaagccgcacaaggaaaggttaaattagtggtacgatacacacccaaagtcttagaagaaatggagtcgcgctttgaaaaaatgagatcagcaaaacgcaggcaacagacctaatacatttcaaaacttgatatttcattttgcgttttagctagagaagttttccttgtgacttactaatggctgcaatgccaatgattgtaagaaaacaaacaaatttatcatgaaattctccttgtcattttataaatgcctattttaacatcatttatggttccagagatgcatacacttttttctgacaagaaaaagtaaaaggtgatgagggcaattctgtcctactgtttttacaggcctttttcaaatgcagattttgtcataaagttgttatagattttttaaaatgcttttttaatattaaaatgtacttttacattcttaatctttttttagaaaggaaaagttttcttcatttagctgctgatttaaaagtaaagttctccaattctttttttttgcttactctattttttttaacctgtgaaatttctttacagttttccaagaaattaagcataacagtctcatctacggcagttcattacactgtcaatgttaacatcattgctgcattttgtactttgaacacacacataatatatataaccagtggtaaatcatgactcagtacagtgcaagttttttcacttttacttaaacataatatataatggatattcatttatactgatttatgaaagtaagtttttaaacactgaaacaatcattgctaaaatacatattcttaatatttgagcattgaggcaagaggatgtaattgatagcattacttattacatccctatttatgttcaaccgtacatcaaattataaatgcaaaacaggttcagatttcatcttttgtgatttcttttaaatactattcatttttatttaaatgcacagtatttcccctatattttagtccttccattcctagagacaaaccagttatttggtggtgggaagtagctgaagcaaagaaggaaaagtaatacctttaacctcactagcttcaagagtagacattcttactagctcaatttaaataattgattttaaataggaagaaaagaggatatatttaagatacatagaaattatgatgtgaagtattcatgagaatctgtagattccatcaaaataagtaggaactcatactaaaattgttggatttaaagaggcaacttttgtttatgattcaaatatgggaatttgagaaatatttcatttgtccactggatgtcactattttactaaaaggcagctattagtgtgggactgtgactgaggtcttaaagactgaaagagttggggttcattttctgttacaacttacaggaacatttgtactttaagaaaaatttaagtgacaaatgttagaagatgatggattgaaaaatataagtaatttggcatattgaccctatataaaaaagtgggcattttgtaacattccttcaggaagaatagaattgtatgcttttttctgcatgtttgtgatcactgtgagtctcagatgattattccagttttcaatgatttttcaaaataaaagtcaatcagcattgttatttatcattaaggtattgaacactggattgcatggttgaatgtgtctttaatccactacaaaatgtgcttgttattgataggatcatgttgttaaattgtaaattttcaaaattaattgatgttttaaaaatgttgagaccaaagtagtatagaagtatggacttaatttaattgtaaaattattagaggtatttgttgtagagctttatatattaaagagaggtattggtgcatataaaaacagtaatattattgttatgcttgtattcttgcatttcagggtaagtaaaccctgaagaaatcttattttagtatagctacagctgcagtagcttttaagtatgtatcaacatttcattataaattatagcttcctggttctgtgtctcagctgtttcagaactttcagccaagttaaatcttttttggtgttgaaacttttagtaagttgagtaagctatttttttccctacggtaatccacaatctgttctttgtgtgggttgacacctatttataattcttaaaataagggtagctcaaaggagccaagtacagtagtttagcttgctactgttgagcatgaatagcagtaggttgttttcattaatgcagttttcataatgtatcccagaattttaaatcttgaccatagaaaaatacagtcattcattggcaaagatgtacagtggtggtttagtgcagtgaggaaatgatgggaatttttatcttagaaatggatgattcgtgaataaaactaggtacatagtaagtgtatgatagatgtttgatttgtaaattacaaatataaattatcacccccatttccatttattttcttgatatatcaaaatgtgttgacttagtgattctcaatcttagctacatattagcctggcagagctttaaaaaattgatacctgggtcctattccataacaactaaatcaaaatcacccttttttttttttttgtaaagctttccaggtggttctaaaggacacctagggtcaataacccattataaaatgatctgattacactggacactcttaggaagtatcaaaatagaacagttcaatttgcagctacttaatgattaattacatttcttaggttttttttttgttttttttttggtttgtttgttttttgttttaaaagagacaggatcttgctttgtctcccaggctggaacacagtggtgtgatcatagctcactgcagcctgaaactccttggcttccacctcagcctcccaaagcattaggattataggcgtgagccactgcacctggccaagtaatttcttttaggaataaaaggtacttggcattccttatttgggaagtaattacagtcttatctttttttttcttttttcttttttttaataaaatctaccagtaatttaaatgtgagctttttatgtctgtcatcattctgccccctttgcctttaaaacttacaaaaatacgtgtttgttatttgagaaagcatgtttaaaaattgcagatgagaaatattgtcgttaataattatgtactgtcttaatgtgggcacttcatttgttagtataatactagataatagcagcctagttctttaggatttgacgattcaaattttttttttgttttttgtttttgtttttttttgagacagagtcttgctctgttgcccaggctggcgtgcagtggtgtgatctcggctcacttcagcctccgccacctcaaggcagttcaagcaattctcctgcctcagcctcccgagtagctaggactacaggcgtgtgccacctctcccggctaatttttttgtatttttagtagagacggggtttcaccgtgttagccaggatgatctcgatctcctgacctcgtgattcgcccgcctcggcctcccaaagtgctggaattactggcgtgagccaccatgcccagcctcaaatatgtttttaaaaaatatcattgtcctcctcctcttaagatttttttaagttattttgctcaagtacttaagtagtctggctcaagtactttgtttacaattaaaatggatattatagcatttaatagaagaaatggttatggcttatccaaaaagaatgtcagcatgacctggtgtagacttaaaaaactacatgtttgtgaatattttataatgtggaatgatcattgaaatatcaaggattctagtaattgtatttcctgaataaatgtatgtttatgaattttctaacttacattttgttgtg

SEQ ID NO: 8905 - protein, 197 aa, Homo sapiens; identical to SEQ ID NO: 1278

SEQ ID NO: 8906 - DNA, 1482 bp, Homo sapiens
cggctagtatcgcgagatcaggaaggtggccgagtgtgtcgccgcggccatcaggcacttctccttcctgcccttgtatgaagaaggatgtgtttgcttccccttgtgccatgattgtaaatttcctgaggcctcctcagccctgcagaactggggttatagccatgtgactgatcttcgtccaagaatatgtaaagaaaaagtgttgagttggcttttagggctagagcaatgtatcttaggctcacttaaggaagctgtagagatgagcccaaggagggaaaccagaagagccccccaggctcaccagttgtttgttggctccctacaaacatgtcattcaagtggctaatcttacaacagcacaaattcatctaaccagaaagagaagaggaggctccaaaggcacttgactactgagcatcaccctggacgtgtacaagtctgcgtccttattgttttcttcattgggccgaactttctggtcctcatccaacagctcttctatcacgtgttcgaaagtgtcagccaatgatgtcaagcctcttgaacctgccttgggcccattcacgctctccagagtcccatgggtccgcacacctggagatactctattatagcaaagaagaaagataatttcattgagccatcctgttttacaggaaattctgcaagtggcaacgtgggtccattccgtgtgtgtcactagagctggcgcaagcccatggccatggtgaggcagcgtttccactggaactaatctgatacctgcaccagctcttgcaactgtgcagtgttcccactgcaaactacggatggggtaaaagactgctcacctcctatttctcatctaatctcacacactctgtttgatgaggctatggagaaacaggtcttctcatacactaaaggtgggagtacaaacaattcaagccctgtgcaggacaattaggcaatacctatcaaaattatacatgatttttcctgctgacccagcaattccacttctgggaataattgacagatataggtgcatatgtacaaaatgatggaaagctctctggtatatattagtaagtgataaaacaaggtgtaaaatagtgtatatatggctactaccttttgttttaaaaatgggggaaaatggtggagcttgcggtgagccgagatcgtgccactgcactccagcctgggcgacagagcgagactccgtctcaaaaaaaaaacagggtggggtgggggggaaataatagtacatactcatatttacctgtatctatataaaacacactatcaaggattcacaagaaactaatacaaatgatcaccttatagatggtatgtattgggggatactgaggtgagcagggtataagtggggcaagacttttcagtgtaaacttcttttaaattttattttgatttttgaataatgtaaattaactgtcaaataattaaattaaaaataaccaatttattaac

SEQ ID NO: 8907 - protein, 40 aa, Homo sapiens
MGPHTWRYSIIAKKKDNFIEPSCFTGNSASGNVGPFRVCH

SEQ ID NO: 8908 - DNA, 2326 bp, Homo sapiens
cggctagtatcgcgagatcaggaaggtggccgagtgtgtcgccgcggccatcaggcacttctccttcctgcccttgtatgaagaaggatgtgtttgcttccccttgtgccatgattgtaaatttcctgaggcctcctcagccctgcagaactggggttatagccatgtgactgatcttcgtccaagaatatgtaaagaaaaagtgttgagttggcttttagggctagagcaatgtatcttaggctcacttaaggaagctgtagagatgagcccaaggagggaaaccagaagagccccccaggctcaccagttgtttgttggctccctacaaacatgtcattcaagtggctaatcttacaacagcacaaattcatctaaccagaaagagaagaggaggctccaaaggcacttgactactgagcatcaccctggacgtgtacaagtctgcgtccttattgttttcttcattgggccgaactttctggtcctcatccaacagctcttctatcacgtgttcgaaagtgtcagccaatgatgtcaagcctcttgaacctgccttgggcccattcacgctctccagagtcccatgggtccgcacacctggagatactctattatagcaaagaagaaagataatttcattgagccatcctgttttacagtattgaattattaccacaaggtaccaaccatatatgcatacttaatagggtattttgtcaaaactatgcatgaaggtcatttgtttgagatgtcagaacattttcccgtgagaagatctcattgggcattgaaacagaaccacatgctcttcagaccagcaaccgcgactaccaaatactcctctgtcaactctacttgagtaagaacgctttcaattaaggcctaagtgtcaacatgcctttaaaaaaaatcgtggtgacacaaaatctttctttttagcacccaacagaatcccttcaaagcctcgtggtctgacaccctatgctacgtgacttgtgacccatccatttgtcatgttcttcgggaatgtggctaaggggctaagatgtgacttgaaaagaaaggtagaacaagatcatctcaaatttattatcaaggaatagttcagaaaacgacttcagaccacagagacagcagaacagatggtccggcatggatagagcatcagacactcacagactgtgccaacaagagccatcgagtcaaaacagccaaaggaaggagggtcatggaatgggttctctcacaccaaactgatgcccagaggccctcagcatgaataacaaaggcaaccagacccacaagccatactgagtggatacaaaacctatacctaggctgacatcccaaatgtgtgtggcaagttagatgatgatggcacaaaagacagaacaccttgcttctggccattgtcagctcttggaagagagcacacttttagaggagcagctgcaaggagcctgagaacaaaactggaaatgtctgttatgaaagccttcacaggaaattctgcaagtggcaacgtgggtccattccgtgtgtgtcactagagctggcgcaagcccatggccatggtgaggcagcgtttccactggaactaatctgatacctgcaccagctcttgcaactgtgcagtgttcccactgcaaactacggatggggtaaaagactgctcacctcctatttctcatctaatctcacacactctgtttgatgaggctatggagaaacaggtcttctcatacactaaaggtgggagtacaaacaattcaagccctgtgcaggacaattaggcaatacctatcaaaattatacatgatttttcctgctgacccagcaattccacttctgggaataattgacagatataggtgcatatgtacaaaatgatggaaagctctctggtatatattagtaagtgataaaacaaggtgtaaaatagtgtatatatggctactaccttttgttttaaaaatgggggaaaatggtggagcttgcggtgagccgagatcgtgccactgcactccagcctgggcgacagagcgagactccgtctcaaaaaaaaaacagggtggggtgggggggaaataatagtacatactcatatttacctgtatctatataaaacacactatcaaggattcacaagaaactaatacaaatgatcaccttatagatggtatgtattgggggatactgaggtgagcagggtataagtggggcaagacttttcagtgtaaacttcttttaaattttattttgatttttgaataatgtaaattaactgtcaaataattaaattaaaaataaccaatttattaac

SEQ ID NO: 8909 - protein, 91 aa, Homo sapiens
MGPHTWRYSIIAKKKDNFIEPSCFTVLNYYHKVPTIYAYLIGYFVKTMHEGHLFEMSEHFPVRRSHWALKQNHMLFRPATATTKYSSVNST

SEQ ID NO: 8910 - DNA, 1440 bp, Homo sapiens
ctagtatcgcgagatcaggaaggtggccgagtgtgtcgccgcggccatcaggcacttctccttcctgcccttgtatgaagaaggatgtgtttgcttccccttgtgccatgattgtaaatttcctgaggcctcctcagccctgcagaactggctagagcaatgtatcttaggctcacttaaggaagctgtagagatgagcccaaggagggaaaccagaagagccccccaggctcaccagttgtttgttggctccctacaaacatgtcattcaagtggctaatcttacaacagcacaaattcatctaaccagaaagagaagaggaggctccaaaggcacttgactactgagcatcaccctggacgtgtacaagtctgcgtccttattgttttcttcattgggccgaactttctggtcctcatccaacagctcttctatcacgtgttcgaaagtgtcagccaatgatgtcaagcctcttgaacctgccttgggcccattcacgctctccagagtcccatgggtccgcacacctggagatactctattatagcaaagaagaaagataatttcattgagccatcctgttttacaggaaattctgcaagtggcaacgtgggtccattccgtgtgtgtcactagagctggcgcaagcccatggccatggtgaggcagcgtttccactggaactaatctgatacctgcaccagctcttgcaactgtgcagtgttcccactgcaaactacggatggggattttccctcctggtgagtcaaaatgaacaagaaataccccaggacctcccttccctccttggccattaatgagatgaaggcaattaactcacatagtataaatgaatcatttgaggtgatgactgcattttaggcaaatgatgactttcttggttccattggtttgcaagtaaaagttacacacattgaaaagacactgaaacagatttcctaaatgcttcattttctggatgcaccaatgttgacctactatacatgttaaatggttttaaaatatcaccttaaaataaaggaaacttccagctactaactcagctctgaatgggctatgaaaggctccaaaggtatgtgaaaaattactgttattttgctttaaaaaatgtgatgtctaagagtgtctgcaatgttctaatgcttcaaaacatgtacgtaagccttgtttatctggaaatcatttctttctgcttatatcatttataaatagaaaatgttctgtaataacttaaaatagttccacatacataatgcttttagtgtcataatacttactactggtctatatttaccaacatttatcacattttacaaaatgaagtagaagaaaaaaaagacaacgactttatggccctggaattccagtaatggtgaccaacatgttttaaattccagtaaaggttatggttacatttc

SEQ ID NO: 8911 - protein, 40 aa, Homo sapiens; identical to SEQ ID NO: 8907

SEQ ID NO: 8912 - DNA, 1282 bp, Homo sapiens
ctagtatcgcgagatcaggaaggtggccgagtgtgtcgccgcggccatcaggcacttctccttcctgcccttgtatgaagaaggatgtgtttgcttccccttgtgccatgattgtaaatttcctgaggcctcctcagccctgcagaactggctagagcaatgtatcttaggctcacttaaggaagctgtagagatgagcccaaggagggaaaccagaagagccccccaggctcaccagttgtttgttggctccctacaaacatgtcattcaagtggctaatcttacaacagcacaaattcatctaaccagaaagagaagaggaggctccaaaggcacttgactactgagcatcaccctggacgtgtacaagtctgcgtccttattgttttcttcattgggccgaactttctggtcctcatccaacagctcttctatcacgtgttcgaaagtgtcagccaatgatgtcaagcctcttgaacctgccttgggcccattcacgctctccagagtcccatgggtccgcacacctggagatactctattatagcaaagaagaaagataatttcattgagccatcctgttttacaggattttccctcctggtgagtcaaaatgaacaagaaataccccaggacctcccttccctccttggccattaatgagatgaaggcaattaactcacatagtataaatgaatcatttgaggtgatgactgcattttaggcaaatgatgactttcttggttccattggtttgcaagtaaaagttacacacattgaaaagacactgaaacagatttcctaaatgcttcattttctggatgcaccaatgttgacctactatacatgttaaatggttttaaaatatcaccttaaaataaaggaaacttccagctactaactcagctctgaatgggctatgaaaggctccaaaggtatgtgaaaaattactgttattttgctttaaaaaatgtgatgtctaagagtgtctgcaatgttctaatgcttcaaaacatgtacgtaagccttgtttatctggaaatcatttctttctgcttatatcatttataaatagaaaatgttctgtaataacttaaaatagttccacatacataatgcttttagtgtcataatacttactactggtctatatttaccaacatttatcacattttacaaaatgaagtagaagaaaaaaaagacaacgactttatggccctggaattccagtaatggtgaccaacatgttttaaattccagtaaaggttatggttacatttc

SEQ ID NO: 8913 - protein, 48 aa, Homo sapiens
MGPHTWRYSIIAKKKDNFIEPSCFTGFSLLVSQNEQEIPQDLPSLLGH

SEQ ID NO: 8914 - DNA, 2039 bp, Homo sapiens
ctagtatcgcgagatcaggaaggtggccgagtgtgtcgccgcggccatcaggcacttctccttcctgcccttgtatgaagaaggatgtgtttgcttccccttgtgccatgattgtaaatttcctgaggcctcctcagccctgcagaactggctagagcaatgtatcttaggctcacttaaggaagctgtagagatgagcccaaggagggaaaccagaagagccccccaggctcaccagttgtttgttggctccctacaaacatgtcattcaagtggctaatcttacaacagcacaaattcatctaaccagaaagagaagaggaggctccaaaggcacttgactactgagcatcaccctggacgtgtacaagtctgcgtccttattgttttcttcattgggccgaactttctggtcctcatccaacagctcttctatcacgtgttcgaaagtgtcagccaatgatgtcaagcctcttgaacctgccttgggcccattcacgctctccagagtcccatgggtccgcacacctggagatactctattatagcaaagaagaaagataatttcattgagccatcctgttttacagcacccaacagaatcccttcaaagcctcgtggtctgacaccctatgctacgtgacttgtgacccatccatttgtcatgttcttcgggaatgtggctaaggggctaagatgtgacttgaaaagaaaggtagaacaagatcatctcaaatttattatcaaggaatagttcagaaaacgacttcagaccacagagacagcagaacagatggtccggcatggatagagcatcagacactcacagactgtgccaacaagagccatcgagtcaaaacagccaaaggaaggagggtcatggaatgggttctctcacaccaaactgatgcccagaggccctcagcatgaataacaaaggcaaccagacccacaagccatactgagtggatacaaaacctatacctaggctgacatcccaaatgtgtgtggcaagttagatgatgatggcacaaaagacagaacaccttgcttctggccattgtcagctcttggaagagagcacacttttagaggagcagctgcaaggagcctgagaacaaaactggaaatgtctgttatgaaagccttcacaggaaattctgcaagtggcaacgtgggtccattccgtgtgtgtcactagagctggcgcaagcccatggccatggtgaggcagcgtttccactggaactaatctgatacctgcaccagctcttgcaactgtgcagtgttcccactgcaaactacggatgggagaggataaagaacttcaatctttaaaaaagagaggattttccctcctggtgagtcaaaatgaacaagaaataccccaggacctcccttccctccttggccattaatgagatgaaggcaattaactcacatagtataaatgaatcatttgaggtgatgactgcattttaggcaaatgatgactttcttggttccattggtttgcaagtaaaagttacacacattgaaaagacactgaaacagatttcctaaatgcttcattttctggatgcaccaatgttgacctactatacatgttaaatggttttaaaatatcaccttaaaataaaggaaacttccagctactaactcagctctgaatgggctatgaaaggctccaaaggtatgtgaaaaattactgttattttgctttaaaaaatgtgatgtctaagagtgtctgcaatgttctaatgcttcaaaacatgtacgtaagccttgtttatctggaaatcatttctttctgcttatatcatttataaatagaaaatgttctgtaataacttaaaatagttccacatacataatgcttttagtgtcataatacttactactggtctatatttaccaacatttatcacattttacaaaatgaagtagaagaaaaaaaagacaacgactttatggccctggaattccagtaatggtgaccaacatgttttaaattccagtaaaggttatggttacatttc

SEQ ID NO: 8915 - protein, 42 aa, Homo sapiens
MGPHTWRYSIIAKKKDNFIEPSCFTAPNRIPSKPRGLTPYAT

SEQ ID NO: 8916 - DNA, 1147 bp, Homo sapiens
gactctcttttcagactcagcccacctgcacccaggtgattaaaagctttattgctcacacaaagcctgtttggtggtctcttcacacggacacacatgaaatttggtgccgtgactcggatcgggggtcctcccttgggagatcaatcccctgtcctcctgttctttgctccgtgagaaagatccacctacgacctcaggtcctcagaccgaccagcccaacgaacatctcaccaattttaaatcaggacctaccagtctgccctgctcatacttgatctggatgagactgataccctgcgagacgcaacagaatcagctcctgggattgtgttagcagaatgacgggagtgtgagatccaccacatggcgaggcaccccaggaacctgttttcttcttgaagagcaaccgagaactatttccaagttatccttcactttgagccaggcaatggtcaggtggagtaaaacataaggaagaacatctttttggttcaaagcatgaaaaaaattgggacagcatggaggtgtctgatttctgcttgggctgaggattcaggagaagatgtgtggaacacagcctggacatgccccaacctggttgatgaattccaccccaagtagtggaagaaacacacctacaacatgagcagagaagatttttcttctgtactttccaggacttgaagctgctttgttttttggtcgctgggtggggaaggaggaacaatagtatagcttccagaagagagaagagagatatctcttgagtgtgaattaagcagtaccaagaggcctcaagctagctctctctcctgctttaaattctactgttaagagtttttctttaagtttaaaaccttgaaagctccatgatgctcctgagtagaacaataaagccattagtagtcaatggccgtctttaatatttttcttccatttcaattttagttctaattttatctgactcctaaaaatatgtttcatattctcatgagggctgggcccatatgtgtaaatggttgaaacatcttactttgttgactgaactagtctaaatagtcagtcaaattttttttttaggcaaaagtgaatttcatcaaattggttggcccacaatttcttaaattcatcattgattgattat

SEQ ID NO: 8917 - protein, 40 aa, Homo sapiens
MKKIGTAWRCLISAWAEDSGEDVWNTAWTCPNLVDEFHPK

SEQ ID NO: 8918 - DNA, 596 bp, Homo sapiens
atgagcccaaggagggaaaccagaagagccccccaggctcaccagttgtttgttggctccctacaaacatgtcattcaagtggctaatcttacaacagcacaaattcatctaaccagagatactctattatagcaaagaagaaagataatttcattgagccatcctgttttacaggtaaggaaaccaaaggccatagaagacttgccttatgtcatgaagaaagtttatgttagaactcagggctcccaattccactgttctttattctacacctgggtggtcacaactgaaaatgttttgcttatttctaaacagaaatcattttttgacatgttcattttaatgatgtgtctatgcctggggctaatgtcatgaaaacaatgtgtctggtaaggagaaaactgaaaaagtcagcattaaaaagacatttaagtccatttcaaatgcctcccatatgcagactccactttatctcctccagttctctaaaacccttcactccttggctttttctggctaatacacacatctagctaagaaagctcaacttttctttttactagagatgttctctctgtgtgtgtgtgtgtgtgtg

SEQ ID NO: 8919 - protein, 59 aa, Homo sapiens
MPGANVMKTMCLVRRKLKKSALKRHLSPFQMPPICRLHFISSSSLKPFTPWLFLANTHI

SEQ ID NO: 8920 - DNA, 4230 bp, Homo sapiens
gttccccaactgctgttttattgtgctattcatgcctagacatcacatagctagaaaggcccatcagacccctcaggccactgctgttcctgtcacacattcctgcaaaggaccatgttgctaacttgaaaaaaattactattaattacacttgcagttgttgcttagtaacatttatgattttgtgtttctcgtgacagcatgagcagagatcattaaaaattaaacttacaaagctgctaaagtgggaagaaggagaacttgaagccacaatttttgcacttgcttagaagccatctaatctcaggtttatatgctagatcttgggggaaacactgcatgtctctggtttatattaaaccacatacagcacactactgacactgatttgtgtctggtgcagctggagtttatcaccaagacataaaaaaaccttgaccctgcagaatggcctggaattacaatcagatgggccacatggcatcccggtgaaagaaagccctaaccagttttctgtcttgtttctgctttctccctacagttccaccaggtgagaagagtgatgaccatccttttccttactatggttatttcatactttggttgcatgaaggctgcccccatgaaagaagcaaacatccgaggacaaggtggcttggcctacccaggtgtgcggacccatgggactctggagagcgtgaatgggcccaaggcaggttcaagaggcttgacatcattggctgacactttcgaacacgtgatagaagagctgttggatgaggaccagaaagttcggcccaatgaagaaaacaataaggacgcagacttgtacacgtccagggtgatgctcagtagtcaagtgcctttggagcctcctcttctctttctgctggaggaatacaaaaattacctagatgctgcaaacatgtccatgagggtccggcgccactctgaccctgcccgccgaggggagctgagcgtgtgtgacagtattagtgagtgggtaacggcagcagacaaaaagactgcagtggacatgtcgggcgggacggtcacagtccttgaaaaggtccctgtatcaaaaggccaactgaagcaatacttctacgagaccaagtgcaatcccatgggttacacaaaagaaggctgcaggggcatagacaaaaggcattggaactcccagtgccgaactacccagtcgtacgtgcgggcccttaccatggatagcaaaaagagaattggctggcgattcataaggatagacacttcttgtgtatgtacattgaccattaaaaggggaagatagtggatttatgttgtatagattagattatattgagacaaaaattatctatttgtatatatacataacagggtaaattattcagttaagaaaaaaataattttatgaactgcatgtataaatgaagtttatacagtacagtggttctacaatctatttattggacatgtccatgaccagaagggaaacagtcatttgcgcacaacttaaaaagtctgcattacattccttgataatgttgtggtttgttgccgttgccaagaactgaaaacataaaaagttaaaaaaaataataaattgcatgctgctttaattgtgaattgataataaactgtcctctttcagaaaacagaaaaaaaacacacacacacacaacaaaaatttgaaccaaaacattccgtttacattttagacagtaagtatcttcgttcttgttagtactatatctgttttactgcttttaacttctgatagcgttggaattaaaacaatgtcaaggtgctgttgtcattgctttactggcttaggggatgggggatggggggtatatttttgtttgttttgtgtttttttttcgtttgtttgttttgttttttagttcccacagggagtagagatggggaaagaattcctacaatatatattctggctgataaaagatacatttgtatgttgtgaagatgtttgcaatatcgatcagatgactagaaagtgaataaaaattaaggcaactgaacaaaaaaatgctcacactccacatcccgtgatgcacctcccaggccccgctcattctttgggcgttggtcagagtaagctgcttttgacggaaggacctatgtttgctcagaacacattctttccccccctccccctctggtctcctctttgttttgttttaaggaagaaaaatcagttgcgcgttctgaaatattttaccactgctgtgaacaagtgaacacattgtgtcacatcatgacactcgtataagcatggagaacagtgatttttttttagaacagaaaacaacaaaaaataaccccaaaatgaagattattttttatgaggagtgaacatttgggtaaatcatggctaagcttaaaaaaaactcatggtgaggcttaacaatgtcttgtaagcaaaaggtagagccctgtatcaacccagaaacacctagatcagaacaggaatccacattgccagtgacatgagactgaacagccaaatggaggctatgtggagttggcattgcatttaccggcagtgcgggaggaatttctgagtggccatcccaaggtctaggtggaggtggggcatggtatttgagacattccaaaacgaaggcctctgaaggacccttcagaggtggctctggaatgacatgtgtcaagctgcttggacctcgtgctttaagtgcctacattatctaactgtgctcaagaggttctcgactggaggaccacactcaagccgacttatgcccaccatcccacctctggataattttgcataaaattggattagcctggagcaggttgggagccaaatgtggcatttgtgatcatgagattgatgcaatgagatagaagatgtttgctacctgaacacttattgctttgaaactagacttgaggaaaccagggtttatcttttgagaacttttggtaagggaaaagggaacaggaaaagaaaccccaaactcaggccgaatgatcaaggggacccataggaaatcttgtccagagacaagacttcgggaaggtgtctggacattcagaacaccaagacttgaaggtgccttgctcaatggaagaggccaggacagagctgacaaaattttgctccccagtgaaggccacagcaaccttctgcccatcctgtctgttcatggagagggtccctgcctcacctctgccattttgggttaggagaagtcaagttgggagcctgaaatagtggttcttggaaaaatggatccccagtgaaaactagagctctaagcccattcagcccatttcacacctgaaaatgttagtgatcaccacttggaccagcatccttaagtatcagaaagccccaagcaattgctgcatcttagtagggtgagggataagcaaaagaggatgttcaccataacccaggaatgaagataccatcagcaaagaatttcaatttgttcagtctttcatttagagctagtctttcacagtaccatctgaatacctctttgaaagaaggaagactttacgtagtgtagatttgttttgtgttgtttgaaaatattatctttgtaattatttttaatatgtaaggaatgcttggaatatctgctgtatgtcaactttatgcagcttccttttgagggacaaatttaaaacaaacaaccccccatcacaaacttaaaggattgcaagggccagatctgttaagtggtttcataggagacacatccagcaattgtgtggtcagtggctcttttacccaataagatacatcacagtcacatgcttgatggtttatgttgacctaagatttattttgttaaaatctctctctgttgtgttcgttcttgttctgttttgttttgttttttaaagtcttgctgtggtctctttgtggcagaagtgtttcatgcatggcagcaggcctgttgcttttttatggcgattcccattgaaaatgtaagtaaatgtctgtggccttgttctctctatggtaaagatattattcaccatgtaaaacaaaaaacaatatttattgtattttagtatatttatataattatgttattgaaaaaaattggcattaaaacttaaccgcatcagaagcctattgtaaatacaagttctatttaagtgtactaattaacatataatatatgttttaaatatagaatttttaatgtttttaaatatattttcaaagtacat

SEQ ID NO: 8921 - protein, 247 aa, Homo sapiens; identical to SEQ ID NO: 1281

SEQ ID NO: 8922 - DNA, 3941 bp, Homo sapiens
agtggacttacaagtccgaagccaatgtagcttggaaaacttgggaggcggaattcctaccgctgggaactgaaagggtctgcgacactctcgggcaggccgaacccacatctctacccatcctgcgcccctcttctgaagcgccctccagggaagttaagagttttgactttcggggagtggttgggatgtacgtgggggattcttgactcgggttagtctctggggatgcagagccgggaagaggaatggttccaccaggtgagaagagtgatgaccatccttttccttactatggttatttcatactttggttgcatgaaggctgcccccatgaaagaagcaaacatccgaggacaaggtggcttggcctacccaggtgtgcggacccatgggactctggagagcgtgaatgggcccaaggcaggttcaagaggcttgacatcattggctgacactttcgaacacgtgatagaagagctgttggatgaggaccagaaagttcggcccaatgaagaaaacaataaggacgcagacttgtacacgtccagggtgatgctcagtagtcaagtgcctttggagcctcctcttctctttctgctggaggaatacaaaaattacctagatgctgcaaacatgtccatgagggtccggcgccactctgaccctgcccgccgaggggagctgagcgtgtgtgacagtattagtgagtgggtaacggcagcagacaaaaagactgcagtggacatgtcgggcgggacggtcacagtccttgaaaaggtccctgtatcaaaaggccaactgaagcaatacttctacgagaccaagtgcaatcccatgggttacacaaaagaaggctgcaggggcatagacaaaaggcattggaactcccagtgccgaactacccagtcgtacgtgcgggcccttaccatggatagcaaaaagagaattggctggcgattcataaggatagacacttcttgtgtatgtacattgaccattaaaaggggaagatagtggatttatgttgtatagattagattatattgagacaaaaattatctatttgtatatatacataacagggtaaattattcagttaagaaaaaaataattttatgaactgcatgtataaatgaagtttatacagtacagtggttctacaatctatttattggacatgtccatgaccagaagggaaacagtcatttgcgcacaacttaaaaagtctgcattacattccttgataatgttgtggtttgttgccgttgccaagaactgaaaacataaaaagttaaaaaaaataataaattgcatgctgctttaattgtgaattgataataaactgtcctctttcagaaaacagaaaaaaaacacacacacacacaacaaaaatttgaaccaaaacattccgtttacattttagacagtaagtatcttcgttcttgttagtactatatctgttttactgcttttaacttctgatagcgttggaattaaaacaatgtcaaggtgctgttgtcattgctttactggcttaggggatgggggatggggggtatatttttgtttgttttgtgtttttttttcgtttgtttgttttgttttttagttcccacagggagtagagatggggaaagaattcctacaatatatattctggctgataaaagatacatttgtatgttgtgaagatgtttgcaatatcgatcagatgactagaaagtgaataaaaattaaggcaactgaacaaaaaaatgctcacactccacatcccgtgatgcacctcccaggccccgctcattctttgggcgttggtcagagtaagctgcttttgacggaaggacctatgtttgctcagaacacattctttccccccctccccctctggtctcctctttgttttgttttaaggaagaaaaatcagttgcgcgttctgaaatattttaccactgctgtgaacaagtgaacacattgtgtcacatcatgacactcgtataagcatggagaacagtgatttttttttagaacagaaaacaacaaaaaataaccccaaaatgaagattattttttatgaggagtgaacatttgggtaaatcatggctaagcttaaaaaaaactcatggtgaggcttaacaatgtcttgtaagcaaaaggtagagccctgtatcaacccagaaacacctagatcagaacaggaatccacattgccagtgacatgagactgaacagccaaatggaggctatgtggagttggcattgcatttaccggcagtgcgggaggaatttctgagtggccatcccaaggtctaggtggaggtggggcatggtatttgagacattccaaaacgaaggcctctgaaggacccttcagaggtggctctggaatgacatgtgtcaagctgcttggacctcgtgctttaagtgcctacattatctaactgtgctcaagaggttctcgactggaggaccacactcaagccgacttatgcccaccatcccacctctggataattttgcataaaattggattagcctggagcaggttgggagccaaatgtggcatttgtgatcatgagattgatgcaatgagatagaagatgtttgctacctgaacacttattgctttgaaactagacttgaggaaaccagggtttatcttttgagaacttttggtaagggaaaagggaacaggaaaagaaaccccaaactcaggccgaatgatcaaggggacccataggaaatcttgtccagagacaagacttcgggaaggtgtctggacattcagaacaccaagacttgaaggtgccttgctcaatggaagaggccaggacagagctgacaaaattttgctccccagtgaaggccacagcaaccttctgcccatcctgtctgttcatggagagggtccctgcctcacctctgccattttgggttaggagaagtcaagttgggagcctgaaatagtggttcttggaaaaatggatccccagtgaaaactagagctctaagcccattcagcccatttcacacctgaaaatgttagtgatcaccacttggaccagcatccttaagtatcagaaagccccaagcaattgctgcatcttagtagggtgagggataagcaaaagaggatgttcaccataacccaggaatgaagataccatcagcaaagaatttcaatttgttcagtctttcatttagagctagtctttcacagtaccatctgaatacctctttgaaagaaggaagactttacgtagtgtagatttgttttgtgttgtttgaaaatattatctttgtaattatttttaatatgtaaggaatgcttggaatatctgctgtatgtcaactttatgcagcttccttttgagggacaaatttaaaacaaacaaccccccatcacaaacttaaaggattgcaagggccagatctgttaagtggtttcataggagacacatccagcaattgtgtggtcagtggctcttttacccaataagatacatcacagtcacatgcttgatggtttatgttgacctaagatttattttgttaaaatctctctctgttgtgttcgttcttgttctgttttgttttgttttttaaagtcttgctgtggtctctttgtggcagaagtgtttcatgcatggcagcaggcctgttgcttttttatggcgattcccattgaaaatgtaagtaaatgtctgtggccttgttctctctatggtaaagatattattcaccatgtaaaacaaaaaacaatatttattgtattttagtatatttatataattatgttattgaaaaaaattggcattaaaacttaaccgcatcagaagcctattgtaaatacaagttctatttaagtgtactaattaacatataatatatgttttaaatatagaatttttaatgtttttaaatatattttcaaagtacat

SEQ ID NO: 8923 - protein, 262 aa, Homo sapiens; identical to SEQ ID NO: 1289

SEQ ID NO: 8924 - DNA, 3971 bp, Homo sapiens
gctccgggtccccgacgctgccgccgccgcgcccgggcgcacccgcccgctcgctgtcccgcgcaccccgtagcgcctcgggctcccgggccggacagaggagccagcccggtgcgcccctccacctcctgctcggggggctttaatgagacacccaccgctgctgtggggccggcggggagcagcaccgcgacggggaccggggctgggcgctggagccagaatcggaaccacgatgtgactccgccgccggggacccgtgaggtttgtgtggaccccgagttccaccaggtgagaagagtgatgaccatccttttccttactatggttatttcatactttggttgcatgaaggctgcccccatgaaagaagcaaacatccgaggacaaggtggcttggcctacccaggtgtgcggacccatgggactctggagagcgtgaatgggcccaaggcaggttcaagaggcttgacatcattggctgacactttcgaacacgtgatagaagagctgttggatgaggaccagaaagttcggcccaatgaagaaaacaataaggacgcagacttgtacacgtccagggtgatgctcagtagtcaagtgcctttggagcctcctcttctctttctgctggaggaatacaaaaattacctagatgctgcaaacatgtccatgagggtccggcgccactctgaccctgcccgccgaggggagctgagcgtgtgtgacagtattagtgagtgggtaacggcagcagacaaaaagactgcagtggacatgtcgggcgggacggtcacagtccttgaaaaggtccctgtatcaaaaggccaactgaagcaatacttctacgagaccaagtgcaatcccatgggttacacaaaagaaggctgcaggggcatagacaaaaggcattggaactcccagtgccgaactacccagtcgtacgtgcgggcccttaccatggatagcaaaaagagaattggctggcgattcataaggatagacacttcttgtgtatgtacattgaccattaaaaggggaagatagtggatttatgttgtatagattagattatattgagacaaaaattatctatttgtatatatacataacagggtaaattattcagttaagaaaaaaataattttatgaactgcatgtataaatgaagtttatacagtacagtggttctacaatctatttattggacatgtccatgaccagaagggaaacagtcatttgcgcacaacttaaaaagtctgcattacattccttgataatgttgtggtttgttgccgttgccaagaactgaaaacataaaaagttaaaaaaaataataaattgcatgctgctttaattgtgaattgataataaactgtcctctttcagaaaacagaaaaaaaacacacacacacacaacaaaaatttgaaccaaaacattccgtttacattttagacagtaagtatcttcgttcttgttagtactatatctgttttactgcttttaacttctgatagcgttggaattaaaacaatgtcaaggtgctgttgtcattgctttactggcttaggggatgggggatggggggtatatttttgtttgttttgtgtttttttttcgtttgtttgttttgttttttagttcccacagggagtagagatggggaaagaattcctacaatatatattctggctgataaaagatacatttgtatgttgtgaagatgtttgcaatatcgatcagatgactagaaagtgaataaaaattaaggcaactgaacaaaaaaatgctcacactccacatcccgtgatgcacctcccaggccccgctcattctttgggcgttggtcagagtaagctgcttttgacggaaggacctatgtttgctcagaacacattctttccccccctccccctctggtctcctctttgttttgttttaaggaagaaaaatcagttgcgcgttctgaaatattttaccactgctgtgaacaagtgaacacattgtgtcacatcatgacactcgtataagcatggagaacagtgatttttttttagaacagaaaacaacaaaaaataaccccaaaatgaagattattttttatgaggagtgaacatttgggtaaatcatggctaagcttaaaaaaaactcatggtgaggcttaacaatgtcttgtaagcaaaaggtagagccctgtatcaacccagaaacacctagatcagaacaggaatccacattgccagtgacatgagactgaacagccaaatggaggctatgtggagttggcattgcatttaccggcagtgcgggaggaatttctgagtggccatcccaaggtctaggtggaggtggggcatggtatttgagacattccaaaacgaaggcctctgaaggacccttcagaggtggctctggaatgacatgtgtcaagctgcttggacctcgtgctttaagtgcctacattatctaactgtgctcaagaggttctcgactggaggaccacactcaagccgacttatgcccaccatcccacctctggataattttgcataaaattggattagcctggagcaggttgggagccaaatgtggcatttgtgatcatgagattgatgcaatgagatagaagatgtttgctacctgaacacttattgctttgaaactagacttgaggaaaccagggtttatcttttgagaacttttggtaagggaaaagggaacaggaaaagaaaccccaaactcaggccgaatgatcaaggggacccataggaaatcttgtccagagacaagacttcgggaaggtgtctggacattcagaacaccaagacttgaaggtgccttgctcaatggaagaggccaggacagagctgacaaaattttgctccccagtgaaggccacagcaaccttctgcccatcctgtctgttcatggagagggtccctgcctcacctctgccattttgggttaggagaagtcaagttgggagcctgaaatagtggttcttggaaaaatggatccccagtgaaaactagagctctaagcccattcagcccatttcacacctgaaaatgttagtgatcaccacttggaccagcatccttaagtatcagaaagccccaagcaattgctgcatcttagtagggtgagggataagcaaaagaggatgttcaccataacccaggaatgaagataccatcagcaaagaatttcaatttgttcagtctttcatttagagctagtctttcacagtaccatctgaatacctctttgaaagaaggaagactttacgtagtgtagatttgttttgtgttgtttgaaaatattatctttgtaattatttttaatatgtaaggaatgcttggaatatctgctgtatgtcaactttatgcagcttccttttgagggacaaatttaaaacaaacaaccccccatcacaaacttaaaggattgcaagggccagatctgttaagtggtttcataggagacacatccagcaattgtgtggtcagtggctcttttacccaataagatacatcacagtcacatgcttgatggtttatgttgacctaagatttattttgttaaaatctctctctgttgtgttcgttcttgttctgttttgttttgttttttaaagtcttgctgtggtctctttgtggcagaagtgtttcatgcatggcagcaggcctgttgcttttttatggcgattcccattgaaaatgtaagtaaatgtctgtggccttgttctctctatggtaaagatattattcaccatgtaaaacaaaaaacaatatttattgtattttagtatatttatataattatgttattgaaaaaaattggcattaaaacttaaccgcatcagaagcctattgtaaatacaagttctatttaagtgtactaattaacatataatatatgttttaaatatagaatttttaatgtttttaaatatattttcaaagtacat

SEQ ID NO: 8925 - protein, 247 aa, Homo sapiens; identical to SEQ ID NO: 1281

SEQ ID NO: 8926 - DNA, 4021 bp, Homo sapiens
ctttcccattcaccgcggagagggctgctctcgctgccgctccccccggcgaactagcatgaaatctccctgcctctgccgagatcaaatggagcttctcgctgatggggtgcgagtattacctccgccatgcaatttccactatcaataatttaacttctttgctgcagaacagaaggagtacataccgggcaccaaagactcgcgccccctcccccctttaattaagcgaagggaacgtgaaaaaataatagagtgtgggagttttggggccgaagtctttcccggagcagctgccttgatggttactttgacaagtagtgactgaaaagttccaccaggtgagaagagtgatgaccatccttttccttactatggttatttcatactttggttgcatgaaggctgcccccatgaaagaagcaaacatccgaggacaaggtggcttggcctacccaggtgtgcggacccatgggactctggagagcgtgaatgggcccaaggcaggttcaagaggcttgacatcattggctgacactttcgaacacgtgatagaagagctgttggatgaggaccagaaagttcggcccaatgaagaaaacaataaggacgcagacttgtacacgtccagggtgatgctcagtagtcaagtgcctttggagcctcctcttctctttctgctggaggaatacaaaaattacctagatgctgcaaacatgtccatgagggtccggcgccactctgaccctgcccgccgaggggagctgagcgtgtgtgacagtattagtgagtgggtaacggcagcagacaaaaagactgcagtggacatgtcgggcgggacggtcacagtccttgaaaaggtccctgtatcaaaaggccaactgaagcaatacttctacgagaccaagtgcaatcccatgggttacacaaaagaaggctgcaggggcatagacaaaaggcattggaactcccagtgccgaactacccagtcgtacgtgcgggcccttaccatggatagcaaaaagagaattggctggcgattcataaggatagacacttcttgtgtatgtacattgaccattaaaaggggaagatagtggatttatgttgtatagattagattatattgagacaaaaattatctatttgtatatatacataacagggtaaattattcagttaagaaaaaaataattttatgaactgcatgtataaatgaagtttatacagtacagtggttctacaatctatttattggacatgtccatgaccagaagggaaacagtcatttgcgcacaacttaaaaagtctgcattacattccttgataatgttgtggtttgttgccgttgccaagaactgaaaacataaaaagttaaaaaaaataataaattgcatgctgctttaattgtgaattgataataaactgtcctctttcagaaaacagaaaaaaaacacacacacacacaacaaaaatttgaaccaaaacattccgtttacattttagacagtaagtatcttcgttcttgttagtactatatctgttttactgcttttaacttctgatagcgttggaattaaaacaatgtcaaggtgctgttgtcattgctttactggcttaggggatgggggatggggggtatatttttgtttgttttgtgtttttttttcgtttgtttgttttgttttttagttcccacagggagtagagatggggaaagaattcctacaatatatattctggctgataaaagatacatttgtatgttgtgaagatgtttgcaatatcgatcagatgactagaaagtgaataaaaattaaggcaactgaacaaaaaaatgctcacactccacatcccgtgatgcacctcccaggccccgctcattctttgggcgttggtcagagtaagctgcttttgacggaaggacctatgtttgctcagaacacattctttccccccctccccctctggtctcctctttgttttgttttaaggaagaaaaatcagttgcgcgttctgaaatattttaccactgctgtgaacaagtgaacacattgtgtcacatcatgacactcgtataagcatggagaacagtgatttttttttagaacagaaaacaacaaaaaataaccccaaaatgaagattattttttatgaggagtgaacatttgggtaaatcatggctaagcttaaaaaaaactcatggtgaggcttaacaatgtcttgtaagcaaaaggtagagccctgtatcaacccagaaacacctagatcagaacaggaatccacattgccagtgacatgagactgaacagccaaatggaggctatgtggagttggcattgcatttaccggcagtgcgggaggaatttctgagtggccatcccaaggtctaggtggaggtggggcatggtatttgagacattccaaaacgaaggcctctgaaggacccttcagaggtggctctggaatgacatgtgtcaagctgcttggacctcgtgctttaagtgcctacattatctaactgtgctcaagaggttctcgactggaggaccacactcaagccgacttatgcccaccatcccacctctggataattttgcataaaattggattagcctggagcaggttgggagccaaatgtggcatttgtgatcatgagattgatgcaatgagatagaagatgtttgctacctgaacacttattgctttgaaactagacttgaggaaaccagggtttatcttttgagaacttttggtaagggaaaagggaacaggaaaagaaaccccaaactcaggccgaatgatcaaggggacccataggaaatcttgtccagagacaagacttcgggaaggtgtctggacattcagaacaccaagacttgaaggtgccttgctcaatggaagaggccaggacagagctgacaaaattttgctccccagtgaaggccacagcaaccttctgcccatcctgtctgttcatggagagggtccctgcctcacctctgccattttgggttaggagaagtcaagttgggagcctgaaatagtggttcttggaaaaatggatccccagtgaaaactagagctctaagcccattcagcccatttcacacctgaaaatgttagtgatcaccacttggaccagcatccttaagtatcagaaagccccaagcaattgctgcatcttagtagggtgagggataagcaaaagaggatgttcaccataacccaggaatgaagataccatcagcaaagaatttcaatttgttcagtctttcatttagagctagtctttcacagtaccatctgaatacctctttgaaagaaggaagactttacgtagtgtagatttgttttgtgttgtttgaaaatattatctttgtaattatttttaatatgtaaggaatgcttggaatatctgctgtatgtcaactttatgcagcttccttttgagggacaaatttaaaacaaacaaccccccatcacaaacttaaaggattgcaagggccagatctgttaagtggtttcataggagacacatccagcaattgtgtggtcagtggctcttttacccaataagatacatcacagtcacatgcttgatggtttatgttgacctaagatttattttgttaaaatctctctctgttgtgttcgttcttgttctgttttgttttgttttttaaagtcttgctgtggtctctttgtggcagaagtgtttcatgcatggcagcaggcctgttgcttttttatggcgattcccattgaaaatgtaagtaaatgtctgtggccttgttctctctatggtaaagatattattcaccatgtaaaacaaaaaacaatatttattgtattttagtatatttatataattatgttattgaaaaaaattggcattaaaacttaaccgcatcagaagcctattgtaaatacaagttctatttaagtgtactaattaacatataatatatgttttaaatatagaatttttaatgtttttaaatatattttcaaagtacat

SEQ ID NO: 8927 - protein, 247 aa, Homo sapiens; identical to SEQ ID NO: 1281

SEQ ID NO: 8928 - DNA, 3825 bp, Homo sapiens
tttttttttcccttctgtcctccctccccgcgagtttcgggcgctggcttagagggttcccgctttctcaagggaaggggagctgccgagaccgcgctccgctccccagccgggccggatgcctcactgagcccagttccaccaggtgagaagagtgatgaccatccttttccttactatggttatttcatactttggttgcatgaaggctgcccccatgaaagaagcaaacatccgaggacaaggtggcttggcctacccaggtgtgcggacccatgggactctggagagcgtgaatgggcccaaggcaggttcaagaggcttgacatcattggctgacactttcgaacacgtgatagaagagctgttggatgaggaccagaaagttcggcccaatgaagaaaacaataaggacgcagacttgtacacgtccagggtgatgctcagtagtcaagtgcctttggagcctcctcttctctttctgctggaggaatacaaaaattacctagatgctgcaaacatgtccatgagggtccggcgccactctgaccctgcccgccgaggggagctgagcgtgtgtgacagtattagtgagtgggtaacggcagcagacaaaaagactgcagtggacatgtcgggcgggacggtcacagtccttgaaaaggtccctgtatcaaaaggccaactgaagcaatacttctacgagaccaagtgcaatcccatgggttacacaaaagaaggctgcaggggcatagacaaaaggcattggaactcccagtgccgaactacccagtcgtacgtgcgggcccttaccatggatagcaaaaagagaattggctggcgattcataaggatagacacttcttgtgtatgtacattgaccattaaaaggggaagatagtggatttatgttgtatagattagattatattgagacaaaaattatctatttgtatatatacataacagggtaaattattcagttaagaaaaaaataattttatgaactgcatgtataaatgaagtttatacagtacagtggttctacaatctatttattggacatgtccatgaccagaagggaaacagtcatttgcgcacaacttaaaaagtctgcattacattccttgataatgttgtggtttgttgccgttgccaagaactgaaaacataaaaagttaaaaaaaataataaattgcatgctgctttaattgtgaattgataataaactgtcctctttcagaaaacagaaaaaaaacacacacacacacaacaaaaatttgaaccaaaacattccgtttacattttagacagtaagtatcttcgttcttgttagtactatatctgttttactgcttttaacttctgatagcgttggaattaaaacaatgtcaaggtgctgttgtcattgctttactggcttaggggatgggggatggggggtatatttttgtttgttttgtgtttttttttcgtttgtttgttttgttttttagttcccacagggagtagagatggggaaagaattcctacaatatatattctggctgataaaagatacatttgtatgttgtgaagatgtttgcaatatcgatcagatgactagaaagtgaataaaaattaaggcaactgaacaaaaaaatgctcacactccacatcccgtgatgcacctcccaggccccgctcattctttgggcgttggtcagagtaagctgcttttgacggaaggacctatgtttgctcagaacacattctttccccccctccccctctggtctcctctttgttttgttttaaggaagaaaaatcagttgcgcgttctgaaatattttaccactgctgtgaacaagtgaacacattgtgtcacatcatgacactcgtataagcatggagaacagtgatttttttttagaacagaaaacaacaaaaaataaccccaaaatgaagattattttttatgaggagtgaacatttgggtaaatcatggctaagcttaaaaaaaactcatggtgaggcttaacaatgtcttgtaagcaaaaggtagagccctgtatcaacccagaaacacctagatcagaacaggaatccacattgccagtgacatgagactgaacagccaaatggaggctatgtggagttggcattgcatttaccggcagtgcgggaggaatttctgagtggccatcccaaggtctaggtggaggtggggcatggtatttgagacattccaaaacgaaggcctctgaaggacccttcagaggtggctctggaatgacatgtgtcaagctgcttggacctcgtgctttaagtgcctacattatctaactgtgctcaagaggttctcgactggaggaccacactcaagccgacttatgcccaccatcccacctctggataattttgcataaaattggattagcctggagcaggttgggagccaaatgtggcatttgtgatcatgagattgatgcaatgagatagaagatgtttgctacctgaacacttattgctttgaaactagacttgaggaaaccagggtttatcttttgagaacttttggtaagggaaaagggaacaggaaaagaaaccccaaactcaggccgaatgatcaaggggacccataggaaatcttgtccagagacaagacttcgggaaggtgtctggacattcagaacaccaagacttgaaggtgccttgctcaatggaagaggccaggacagagctgacaaaattttgctccccagtgaaggccacagcaaccttctgcccatcctgtctgttcatggagagggtccctgcctcacctctgccattttgggttaggagaagtcaagttgggagcctgaaatagtggttcttggaaaaatggatccccagtgaaaactagagctctaagcccattcagcccatttcacacctgaaaatgttagtgatcaccacttggaccagcatccttaagtatcagaaagccccaagcaattgctgcatcttagtagggtgagggataagcaaaagaggatgttcaccataacccaggaatgaagataccatcagcaaagaatttcaatttgttcagtctttcatttagagctagtctttcacagtaccatctgaatacctctttgaaagaaggaagactttacgtagtgtagatttgttttgtgttgtttgaaaatattatctttgtaattatttttaatatgtaaggaatgcttggaatatctgctgtatgtcaactttatgcagcttccttttgagggacaaatttaaaacaaacaaccccccatcacaaacttaaaggattgcaagggccagatctgttaagtggtttcataggagacacatccagcaattgtgtggtcagtggctcttttacccaataagatacatcacagtcacatgcttgatggtttatgttgacctaagatttattttgttaaaatctctctctgttgtgttcgttcttgttctgttttgttttgttttttaaagtcttgctgtggtctctttgtggcagaagtgtttcatgcatggcagcaggcctgttgcttttttatggcgattcccattgaaaatgtaagtaaatgtctgtggccttgttctctctatggtaaagatattattcaccatgtaaaacaaaaaacaatatttattgtattttagtatatttatataattatgttattgaaaaaaattggcattaaaacttaaccgcatcagaagcctattgtaaatacaagttctatttaagtgtactaattaacatataatatatgttttaaatatagaatttttaatgtttttaaatatattttcaaagtacat

SEQ ID NO: 8929 - protein, 247 aa, Homo sapiens; identical to SEQ ID NO: 1281

SEQ ID NO: 8930 - DNA, 3769 bp, Homo sapiens
gtgtgtaatccgggcgataggagtccattcagcaccttggacagagccaacggatttgtccgaggtggcggtacccccagttccaccaggtgagaagagtgatgaccatccttttccttactatggttatttcatactttggttgcatgaaggctgcccccatgaaagaagcaaacatccgaggacaaggtggcttggcctacccaggtgtgcggacccatgggactctggagagcgtgaatgggcccaaggcaggttcaagaggcttgacatcattggctgacactttcgaacacgtgatagaagagctgttggatgaggaccagaaagttcggcccaatgaagaaaacaataaggacgcagacttgtacacgtccagggtgatgctcagtagtcaagtgcctttggagcctcctcttctctttctgctggaggaatacaaaaattacctagatgctgcaaacatgtccatgagggtccggcgccactctgaccctgcccgccgaggggagctgagcgtgtgtgacagtattagtgagtgggtaacggcagcagacaaaaagactgcagtggacatgtcgggcgggacggtcacagtccttgaaaaggtccctgtatcaaaaggccaactgaagcaatacttctacgagaccaagtgcaatcccatgggttacacaaaagaaggctgcaggggcatagacaaaaggcattggaactcccagtgccgaactacccagtcgtacgtgcgggcccttaccatggatagcaaaaagagaattggctggcgattcataaggatagacacttcttgtgtatgtacattgaccattaaaaggggaagatagtggatttatgttgtatagattagattatattgagacaaaaattatctatttgtatatatacataacagggtaaattattcagttaagaaaaaaataattttatgaactgcatgtataaatgaagtttatacagtacagtggttctacaatctatttattggacatgtccatgaccagaagggaaacagtcatttgcgcacaacttaaaaagtctgcattacattccttgataatgttgtggtttgttgccgttgccaagaactgaaaacataaaaagttaaaaaaaataataaattgcatgctgctttaattgtgaattgataataaactgtcctctttcagaaaacagaaaaaaaacacacacacacacaacaaaaatttgaaccaaaacattccgtttacattttagacagtaagtatcttcgttcttgttagtactatatctgttttactgcttttaacttctgatagcgttggaattaaaacaatgtcaaggtgctgttgtcattgctttactggcttaggggatgggggatggggggtatatttttgtttgttttgtgtttttttttcgtttgtttgttttgttttttagttcccacagggagtagagatggggaaagaattcctacaatatatattctggctgataaaagatacatttgtatgttgtgaagatgtttgcaatatcgatcagatgactagaaagtgaataaaaattaaggcaactgaacaaaaaaatgctcacactccacatcccgtgatgcacctcccaggccccgctcattctttgggcgttggtcagagtaagctgcttttgacggaaggacctatgtttgctcagaacacattctttccccccctccccctctggtctcctctttgttttgttttaaggaagaaaaatcagttgcgcgttctgaaatattttaccactgctgtgaacaagtgaacacattgtgtcacatcatgacactcgtataagcatggagaacagtgatttttttttagaacagaaaacaacaaaaaataaccccaaaatgaagattattttttatgaggagtgaacatttgggtaaatcatggctaagcttaaaaaaaactcatggtgaggcttaacaatgtcttgtaagcaaaaggtagagccctgtatcaacccagaaacacctagatcagaacaggaatccacattgccagtgacatgagactgaacagccaaatggaggctatgtggagttggcattgcatttaccggcagtgcgggaggaatttctgagtggccatcccaaggtctaggtggaggtggggcatggtatttgagacattccaaaacgaaggcctctgaaggacccttcagaggtggctctggaatgacatgtgtcaagctgcttggacctcgtgctttaagtgcctacattatctaactgtgctcaagaggttctcgactggaggaccacactcaagccgacttatgcccaccatcccacctctggataattttgcataaaattggattagcctggagcaggttgggagccaaatgtggcatttgtgatcatgagattgatgcaatgagatagaagatgtttgctacctgaacacttattgctttgaaactagacttgaggaaaccagggtttatcttttgagaacttttggtaagggaaaagggaacaggaaaagaaaccccaaactcaggccgaatgatcaaggggacccataggaaatcttgtccagagacaagacttcgggaaggtgtctggacattcagaacaccaagacttgaaggtgccttgctcaatggaagaggccaggacagagctgacaaaattttgctccccagtgaaggccacagcaaccttctgcccatcctgtctgttcatggagagggtccctgcctcacctctgccattttgggttaggagaagtcaagttgggagcctgaaatagtggttcttggaaaaatggatccccagtgaaaactagagctctaagcccattcagcccatttcacacctgaaaatgttagtgatcaccacttggaccagcatccttaagtatcagaaagccccaagcaattgctgcatcttagtagggtgagggataagcaaaagaggatgttcaccataacccaggaatgaagataccatcagcaaagaatttcaatttgttcagtctttcatttagagctagtctttcacagtaccatctgaatacctctttgaaagaaggaagactttacgtagtgtagatttgttttgtgttgtttgaaaatattatctttgtaattatttttaatatgtaaggaatgcttggaatatctgctgtatgtcaactttatgcagcttccttttgagggacaaatttaaaacaaacaaccccccatcacaaacttaaaggattgcaagggccagatctgttaagtggtttcataggagacacatccagcaattgtgtggtcagtggctcttttacccaataagatacatcacagtcacatgcttgatggtttatgttgacctaagatttattttgttaaaatctctctctgttgtgttcgttcttgttctgttttgttttgttttttaaagtcttgctgtggtctctttgtggcagaagtgtttcatgcatggcagcaggcctgttgcttttttatggcgattcccattgaaaatgtaagtaaatgtctgtggccttgttctctctatggtaaagatattattcaccatgtaaaacaaaaaacaatatttattgtattttagtatatttatataattatgttattgaaaaaaattggcattaaaacttaaccgcatcagaagcctattgtaaatacaagttctatttaagtgtactaattaacatataatatatgttttaaatatagaatttttaatgtttttaaatatattttcaaagtacat

SEQ ID NO: 8931 - protein, 247 aa, Homo sapiens; identical to SEQ ID NO: 1281

SEQ ID NO: 8932 - DNA, 3984 bp, Homo sapiens
gtgtgtaatccgggcgataggagtccattcagcaccttggacagagccaacggatttgtccgaggtggcggtacccccaggtagtcttcttggccccgctgtaaagccaaccctgtgtcgcccttaaaaagcgtcttttctgaggttcggctcacactgagatcggggctggagagagagtcagattttggagcggagcgtttggaaagcgagccccagtttggtcccctcattgagctcgctgaagttggcttcctagcggtgtaggctggaatagactcttggcaagctccggttccaccaggtgagaagagtgatgaccatccttttccttactatggttatttcatactttggttgcatgaaggctgcccccatgaaagaagcaaacatccgaggacaaggtggcttggcctacccaggtgtgcggacccatgggactctggagagcgtgaatgggcccaaggcaggttcaagaggcttgacatcattggctgacactttcgaacacgtgatagaagagctgttggatgaggaccagaaagttcggcccaatgaagaaaacaataaggacgcagacttgtacacgtccagggtgatgctcagtagtcaagtgcctttggagcctcctcttctctttctgctggaggaatacaaaaattacctagatgctgcaaacatgtccatgagggtccggcgccactctgaccctgcccgccgaggggagctgagcgtgtgtgacagtattagtgagtgggtaacggcagcagacaaaaagactgcagtggacatgtcgggcgggacggtcacagtccttgaaaaggtccctgtatcaaaaggccaactgaagcaatacttctacgagaccaagtgcaatcccatgggttacacaaaagaaggctgcaggggcatagacaaaaggcattggaactcccagtgccgaactacccagtcgtacgtgcgggcccttaccatggatagcaaaaagagaattggctggcgattcataaggatagacacttcttgtgtatgtacattgaccattaaaaggggaagatagtggatttatgttgtatagattagattatattgagacaaaaattatctatttgtatatatacataacagggtaaattattcagttaagaaaaaaataattttatgaactgcatgtataaatgaagtttatacagtacagtggttctacaatctatttattggacatgtccatgaccagaagggaaacagtcatttgcgcacaacttaaaaagtctgcattacattccttgataatgttgtggtttgttgccgttgccaagaactgaaaacataaaaagttaaaaaaaataataaattgcatgctgctttaattgtgaattgataataaactgtcctctttcagaaaacagaaaaaaaacacacacacacacaacaaaaatttgaaccaaaacattccgtttacattttagacagtaagtatcttcgttcttgttagtactatatctgttttactgcttttaacttctgatagcgttggaattaaaacaatgtcaaggtgctgttgtcattgctttactggcttaggggatgggggatggggggtatatttttgtttgttttgtgtttttttttcgtttgtttgttttgttttttagttcccacagggagtagagatggggaaagaattcctacaatatatattctggctgataaaagatacatttgtatgttgtgaagatgtttgcaatatcgatcagatgactagaaagtgaataaaaattaaggcaactgaacaaaaaaatgctcacactccacatcccgtgatgcacctcccaggccccgctcattctttgggcgttggtcagagtaagctgcttttgacggaaggacctatgtttgctcagaacacattctttccccccctccccctctggtctcctctttgttttgttttaaggaagaaaaatcagttgcgcgttctgaaatattttaccactgctgtgaacaagtgaacacattgtgtcacatcatgacactcgtataagcatggagaacagtgatttttttttagaacagaaaacaacaaaaaataaccccaaaatgaagattattttttatgaggagtgaacatttgggtaaatcatggctaagcttaaaaaaaactcatggtgaggcttaacaatgtcttgtaagcaaaaggtagagccctgtatcaacccagaaacacctagatcagaacaggaatccacattgccagtgacatgagactgaacagccaaatggaggctatgtggagttggcattgcatttaccggcagtgcgggaggaatttctgagtggccatcccaaggtctaggtggaggtggggcatggtatttgagacattccaaaacgaaggcctctgaaggacccttcagaggtggctctggaatgacatgtgtcaagctgcttggacctcgtgctttaagtgcctacattatctaactgtgctcaagaggttctcgactggaggaccacactcaagccgacttatgcccaccatcccacctctggataattttgcataaaattggattagcctggagcaggttgggagccaaatgtggcatttgtgatcatgagattgatgcaatgagatagaagatgtttgctacctgaacacttattgctttgaaactagacttgaggaaaccagggtttatcttttgagaacttttggtaagggaaaagggaacaggaaaagaaaccccaaactcaggccgaatgatcaaggggacccataggaaatcttgtccagagacaagacttcgggaaggtgtctggacattcagaacaccaagacttgaaggtgccttgctcaatggaagaggccaggacagagctgacaaaattttgctccccagtgaaggccacagcaaccttctgcccatcctgtctgttcatggagagggtccctgcctcacctctgccattttgggttaggagaagtcaagttgggagcctgaaatagtggttcttggaaaaatggatccccagtgaaaactagagctctaagcccattcagcccatttcacacctgaaaatgttagtgatcaccacttggaccagcatccttaagtatcagaaagccccaagcaattgctgcatcttagtagggtgagggataagcaaaagaggatgttcaccataacccaggaatgaagataccatcagcaaagaatttcaatttgttcagtctttcatttagagctagtctttcacagtaccatctgaatacctctttgaaagaaggaagactttacgtagtgtagatttgttttgtgttgtttgaaaatattatctttgtaattatttttaatatgtaaggaatgcttggaatatctgctgtatgtcaactttatgcagcttccttttgagggacaaatttaaaacaaacaaccccccatcacaaacttaaaggattgcaagggccagatctgttaagtggtttcataggagacacatccagcaattgtgtggtcagtggctcttttacccaataagatacatcacagtcacatgcttgatggtttatgttgacctaagatttattttgttaaaatctctctctgttgtgttcgttcttgttctgttttgttttgttttttaaagtcttgctgtggtctctttgtggcagaagtgtttcatgcatggcagcaggcctgttgcttttttatggcgattcccattgaaaatgtaagtaaatgtctgtggccttgttctctctatggtaaagatattattcaccatgtaaaacaaaaaacaatatttattgtattttagtatatttatataattatgttattgaaaaaaattggcattaaaacttaaccgcatcagaagcctattgtaaatacaagttctatttaagtgtactaattaacatataatatatgttttaaatatagaatttttaatgtttttaaatatattttcaaagtacat

SEQ ID NO: 8933 - protein, 247 aa, Homo sapiens; identical to SEQ ID NO: 1281

SEQ ID NO: 8934 - DNA, 4067 bp, Homo sapiens
gtgtgtaatccgggcgataggagtccattcagcaccttggacagagccaacggatttgtccgaggtggcggtacccccaggtagtcttcttggccccgctgtaaagccaaccctgtgtcgcccttaaaaagcgtcttttctgaggttcggctcacactgagatcggggctggagagagagtcagattttggagcggagcgtttggaaagcgagccccagtttggtcccctcattgagctcgctgaagttggcttcctagcggtgtaggctggaatagactcttggcaagctccgggttggtatactgggttaactttgggaaatgcaagtgtttatctccaggatctagccaccggggtggtgtaagccgcaaagaagttccaccaggtgagaagagtgatgaccatccttttccttactatggttatttcatactttggttgcatgaaggctgcccccatgaaagaagcaaacatccgaggacaaggtggcttggcctacccaggtgtgcggacccatgggactctggagagcgtgaatgggcccaaggcaggttcaagaggcttgacatcattggctgacactttcgaacacgtgatagaagagctgttggatgaggaccagaaagttcggcccaatgaagaaaacaataaggacgcagacttgtacacgtccagggtgatgctcagtagtcaagtgcctttggagcctcctcttctctttctgctggaggaatacaaaaattacctagatgctgcaaacatgtccatgagggtccggcgccactctgaccctgcccgccgaggggagctgagcgtgtgtgacagtattagtgagtgggtaacggcagcagacaaaaagactgcagtggacatgtcgggcgggacggtcacagtccttgaaaaggtccctgtatcaaaaggccaactgaagcaatacttctacgagaccaagtgcaatcccatgggttacacaaaagaaggctgcaggggcatagacaaaaggcattggaactcccagtgccgaactacccagtcgtacgtgcgggcccttaccatggatagcaaaaagagaattggctggcgattcataaggatagacacttcttgtgtatgtacattgaccattaaaaggggaagatagtggatttatgttgtatagattagattatattgagacaaaaattatctatttgtatatatacataacagggtaaattattcagttaagaaaaaaataattttatgaactgcatgtataaatgaagtttatacagtacagtggttctacaatctatttattggacatgtccatgaccagaagggaaacagtcatttgcgcacaacttaaaaagtctgcattacattccttgataatgttgtggtttgttgccgttgccaagaactgaaaacataaaaagttaaaaaaaataataaattgcatgctgctttaattgtgaattgataataaactgtcctctttcagaaaacagaaaaaaaacacacacacacacaacaaaaatttgaaccaaaacattccgtttacattttagacagtaagtatcttcgttcttgttagtactatatctgttttactgcttttaacttctgatagcgttggaattaaaacaatgtcaaggtgctgttgtcattgctttactggcttaggggatgggggatggggggtatatttttgtttgttttgtgtttttttttcgtttgtttgttttgttttttagttcccacagggagtagagatggggaaagaattcctacaatatatattctggctgataaaagatacatttgtatgttgtgaagatgtttgcaatatcgatcagatgactagaaagtgaataaaaattaaggcaactgaacaaaaaaatgctcacactccacatcccgtgatgcacctcccaggccccgctcattctttgggcgttggtcagagtaagctgcttttgacggaaggacctatgtttgctcagaacacattctttccccccctccccctctggtctcctctttgttttgttttaaggaagaaaaatcagttgcgcgttctgaaatattttaccactgctgtgaacaagtgaacacattgtgtcacatcatgacactcgtataagcatggagaacagtgatttttttttagaacagaaaacaacaaaaaataaccccaaaatgaagattattttttatgaggagtgaacatttgggtaaatcatggctaagcttaaaaaaaactcatggtgaggcttaacaatgtcttgtaagcaaaaggtagagccctgtatcaacccagaaacacctagatcagaacaggaatccacattgccagtgacatgagactgaacagccaaatggaggctatgtggagttggcattgcatttaccggcagtgcgggaggaatttctgagtggccatcccaaggtctaggtggaggtggggcatggtatttgagacattccaaaacgaaggcctctgaaggacccttcagaggtggctctggaatgacatgtgtcaagctgcttggacctcgtgctttaagtgcctacattatctaactgtgctcaagaggttctcgactggaggaccacactcaagccgacttatgcccaccatcccacctctggataattttgcataaaattggattagcctggagcaggttgggagccaaatgtggcatttgtgatcatgagattgatgcaatgagatagaagatgtttgctacctgaacacttattgctttgaaactagacttgaggaaaccagggtttatcttttgagaacttttggtaagggaaaagggaacaggaaaagaaaccccaaactcaggccgaatgatcaaggggacccataggaaatcttgtccagagacaagacttcgggaaggtgtctggacattcagaacaccaagacttgaaggtgccttgctcaatggaagaggccaggacagagctgacaaaattttgctccccagtgaaggccacagcaaccttctgcccatcctgtctgttcatggagagggtccctgcctcacctctgccattttgggttaggagaagtcaagttgggagcctgaaatagtggttcttggaaaaatggatccccagtgaaaactagagctctaagcccattcagcccatttcacacctgaaaatgttagtgatcaccacttggaccagcatccttaagtatcagaaagccccaagcaattgctgcatcttagtagggtgagggataagcaaaagaggatgttcaccataacccaggaatgaagataccatcagcaaagaatttcaatttgttcagtctttcatttagagctagtctttcacagtaccatctgaatacctctttgaaagaaggaagactttacgtagtgtagatttgttttgtgttgtttgaaaatattatctttgtaattatttttaatatgtaaggaatgcttggaatatctgctgtatgtcaactttatgcagcttccttttgagggacaaatttaaaacaaacaaccccccatcacaaacttaaaggattgcaagggccagatctgttaagtggtttcataggagacacatccagcaattgtgtggtcagtggctcttttacccaataagatacatcacagtcacatgcttgatggtttatgttgacctaagatttattttgttaaaatctctctctgttgtgttcgttcttgttctgttttgttttgttttttaaagtcttgctgtggtctctttgtggcagaagtgtttcatgcatggcagcaggcctgttgcttttttatggcgattcccattgaaaatgtaagtaaatgtctgtggccttgttctctctatggtaaagatattattcaccatgtaaaacaaaaaacaatatttattgtattttagtatatttatataattatgttattgaaaaaaattggcattaaaacttaaccgcatcagaagcctattgtaaatacaagttctatttaagtgtactaattaacatataatatatgttttaaatatagaatttttaatgtttttaaatatattttcaaagtacat

SEQ ID NO: 8935 - protein, 247 aa, Homo sapiens; identical to SEQ ID NO: 1281

SEQ ID NO: 8936 - DNA, 4027 bp, Homo sapiens
ggcaatcattggtaacctcgctcattcattagaatcacgtaagaactcaaaaggaaacgtgtctctcggagtgagggcgtttgcgtaaatctataggtttttcgacatcgatgccagttgctttgtcttctgtagtcgccaaggtggttgagagtttaagcttgcggatattgcaaagggttattagattcataagtcacaccaagtggtgggcgatccactgagcaaagccgaacttctcacatgatgacttcaaacaagacacattaccttccagcatctgttggggagacgagattttaagacacttgagtctccaggacagcaaaggcacaatgttccaccaggtgagaagagtgatgaccatccttttccttactatggttatttcatactttggttgcatgaaggctgcccccatgaaagaagcaaacatccgaggacaaggtggcttggcctacccaggtgtgcggacccatgggactctggagagcgtgaatgggcccaaggcaggttcaagaggcttgacatcattggctgacactttcgaacacgtgatagaagagctgttggatgaggaccagaaagttcggcccaatgaagaaaacaataaggacgcagacttgtacacgtccagggtgatgctcagtagtcaagtgcctttggagcctcctcttctctttctgctggaggaatacaaaaattacctagatgctgcaaacatgtccatgagggtccggcgccactctgaccctgcccgccgaggggagctgagcgtgtgtgacagtattagtgagtgggtaacggcagcagacaaaaagactgcagtggacatgtcgggcgggacggtcacagtccttgaaaaggtccctgtatcaaaaggccaactgaagcaatacttctacgagaccaagtgcaatcccatgggttacacaaaagaaggctgcaggggcatagacaaaaggcattggaactcccagtgccgaactacccagtcgtacgtgcgggcccttaccatggatagcaaaaagagaattggctggcgattcataaggatagacacttcttgtgtatgtacattgaccattaaaaggggaagatagtggatttatgttgtatagattagattatattgagacaaaaattatctatttgtatatatacataacagggtaaattattcagttaagaaaaaaataattttatgaactgcatgtataaatgaagtttatacagtacagtggttctacaatctatttattggacatgtccatgaccagaagggaaacagtcatttgcgcacaacttaaaaagtctgcattacattccttgataatgttgtggtttgttgccgttgccaagaactgaaaacataaaaagttaaaaaaaataataaattgcatgctgctttaattgtgaattgataataaactgtcctctttcagaaaacagaaaaaaaacacacacacacacaacaaaaatttgaaccaaaacattccgtttacattttagacagtaagtatcttcgttcttgttagtactatatctgttttactgcttttaacttctgatagcgttggaattaaaacaatgtcaaggtgctgttgtcattgctttactggcttaggggatgggggatggggggtatatttttgtttgttttgtgtttttttttcgtttgtttgttttgttttttagttcccacagggagtagagatggggaaagaattcctacaatatatattctggctgataaaagatacatttgtatgttgtgaagatgtttgcaatatcgatcagatgactagaaagtgaataaaaattaaggcaactgaacaaaaaaatgctcacactccacatcccgtgatgcacctcccaggccccgctcattctttgggcgttggtcagagtaagctgcttttgacggaaggacctatgtttgctcagaacacattctttccccccctccccctctggtctcctctttgttttgttttaaggaagaaaaatcagttgcgcgttctgaaatattttaccactgctgtgaacaagtgaacacattgtgtcacatcatgacactcgtataagcatggagaacagtgatttttttttagaacagaaaacaacaaaaaataaccccaaaatgaagattattttttatgaggagtgaacatttgggtaaatcatggctaagcttaaaaaaaactcatggtgaggcttaacaatgtcttgtaagcaaaaggtagagccctgtatcaacccagaaacacctagatcagaacaggaatccacattgccagtgacatgagactgaacagccaaatggaggctatgtggagttggcattgcatttaccggcagtgcgggaggaatttctgagtggccatcccaaggtctaggtggaggtggggcatggtatttgagacattccaaaacgaaggcctctgaaggacccttcagaggtggctctggaatgacatgtgtcaagctgcttggacctcgtgctttaagtgcctacattatctaactgtgctcaagaggttctcgactggaggaccacactcaagccgacttatgcccaccatcccacctctggataattttgcataaaattggattagcctggagcaggttgggagccaaatgtggcatttgtgatcatgagattgatgcaatgagatagaagatgtttgctacctgaacacttattgctttgaaactagacttgaggaaaccagggtttatcttttgagaacttttggtaagggaaaagggaacaggaaaagaaaccccaaactcaggccgaatgatcaaggggacccataggaaatcttgtccagagacaagacttcgggaaggtgtctggacattcagaacaccaagacttgaaggtgccttgctcaatggaagaggccaggacagagctgacaaaattttgctccccagtgaaggccacagcaaccttctgcccatcctgtctgttcatggagagggtccctgcctcacctctgccattttgggttaggagaagtcaagttgggagcctgaaatagtggttcttggaaaaatggatccccagtgaaaactagagctctaagcccattcagcccatttcacacctgaaaatgttagtgatcaccacttggaccagcatccttaagtatcagaaagccccaagcaattgctgcatcttagtagggtgagggataagcaaaagaggatgttcaccataacccaggaatgaagataccatcagcaaagaatttcaatttgttcagtctttcatttagagctagtctttcacagtaccatctgaatacctctttgaaagaaggaagactttacgtagtgtagatttgttttgtgttgtttgaaaatattatctttgtaattatttttaatatgtaaggaatgcttggaatatctgctgtatgtcaactttatgcagcttccttttgagggacaaatttaaaacaaacaaccccccatcacaaacttaaaggattgcaagggccagatctgttaagtggtttcataggagacacatccagcaattgtgtggtcagtggctcttttacccaataagatacatcacagtcacatgcttgatggtttatgttgacctaagatttattttgttaaaatctctctctgttgtgttcgttcttgttctgttttgttttgttttttaaagtcttgctgtggtctctttgtggcagaagtgtttcatgcatggcagcaggcctgttgcttttttatggcgattcccattgaaaatgtaagtaaatgtctgtggccttgttctctctatggtaaagatattattcaccatgtaaaacaaaaaacaatatttattgtattttagtatatttatataattatgttattgaaaaaaattggcattaaaacttaaccgcatcagaagcctattgtaaatacaagttctatttaagtgtactaattaacatataatatatgttttaaatatagaatttttaatgtttttaaatatattttcaaagtacat

SEQ ID NO: 8937 - protein, 255 aa, Homo sapiens; identical to SEQ ID NO: 1283

SEQ ID NO: 8938 - DNA, 3659 bp, Homo sapiens
agtggacttacaagtccgaagccaatgtagcttggaaaacttgggaggcggaattcctaccgctgggaactgaaagggtctgcgacactctcgggcaggccgaacccacatctctacccatcctgcgcccctcttctgaagcgccctccagttccaccaggtgagaagagtgatgaccatccttttccttactatggttatttcatactttggttgcatgaaggctgcccccatgaaagaagcaaacatccgaggacaaggtggcttggcctacccaggtgtgcggacccatgggactctggagagcgtgaatgggcccaaggcaggttcaagaggcttgacatcattggctgacactttcgaacacgtgatagaagagctgttggatgaggaccagaaagttcggcccaatgaagaaaacaataaggacgcagacttgtacacgtccagggtgatgctcagtagtcaagtgcctttggagcctcctcttctctttctgctggaggaatacaaaaattacctagatgctgcaaacatgtccatgagggtccggcgccactctgaccctgcccgccgaggggagctgagcgtgtgtgacagtattagtgagtgggtaacggcagcagacaaaaagactgcagtggacatgtcgggcgggacggtcacagtccttgaaaaggtccctgtatcaaaaggccaactgaagcaatacttctacgagaccaagtgcaatcccatgggttacacaaaagaaggctgcaggggcatagacaaaaggcattggaactcccagtgccgaactacccagtcgtacgtgcgggcccttaccatggatagcaaaaagagaattggctggcgattcataaggatagacacttcttgtgtatgtacattgaccattaaaaggggaagatagtggatttatgttgtatagattagattatattgagacaaaaattatctatttgtatatatacataacagggtaaattattcagttaagaaaaaaataattttatgaactgcatgtataaatgaagtttatacagtacagtggttctacaatctatttattggacatgtccatgaccagaagggaaacagtcatttgcgcacaacttaaaaagtctgcattacattccttgataatgttgtggtttgttgccgttgccaagaactgaaaacataaaaagttaaaaaaaataataaattgcatgctgctttaattgtgaattgataataaactgtcctctttcagaaaacagaaaaaaaacacacacacacacaacaaaaatttgaaccaaaacattccgtttacattttagacagtaagtatcttcgttcttgttagtactatatctgttttactgcttttaacttctgatagcgttggaattaaaacaatgtcaaggtgctgttgtcattgctttactggcttaggggatgggggatggggggtatatttttgtttgttttgtgtttttttttcgtttgtttgttttgttttttagttcccacagggagtagagatggggaaagaattcctacaatatatattctggctgataaaagatacatttgtatgttgtgaagatgtttgcaatatcgatcagatgactagaaagtgaataaaaattaaggcaactgaacaaaaaaatgctcacactccacatcccgtgatgcacctcccaggccccgctcattctttgggcgttggtcagagtaagctgcttttgacggaaggacctatgtttgctcagaacacattctttccccccctccccctctggtctcctctttgttttgttttaaggaagaaaaatcagttgcgcgttctgaaatattttaccactgctgtgaacaagtgaacacattgtgtcacatcatgacactcgtataagcatggagaacagtgatttttttttagaacagaaaacaacaaaaaataaccccaaaatgaagattattttttatgaggagtgaacatttgggtaaatcatggctaagcttaaaaaaaactcatggtgaggcttaacaatgtcttgtaagcaaaaggtagagccctgtatcaacccagaaacacctagatcagaacaggaatccacattgccagtgacatgagactgaacagccaaatggaggctatgtggagttggcattgcatttaccggcagtgcgggaggaatttctgagtggccatcccaaggtctaggtggaggtggggcatggtatttgagacattccaaaacgaaggcctctgaaggacccttcagaggtggctctggaatgacatgtgtcaagctgcttggacctcgtgctttaagtgcctacattatctaactgtgctcaagaggttctcgactggaggaccacactcaagccgacttatgcccaccatcccacctctggataattttgcataaaattggattagcctggagcaggttgggagccaaatgtggcatttgtgatcatgagattgatgcaatgagatagaagatgtttgctacctgaacacttattgctttgaaactagacttgaggaaaccagggtttatcttttgagaacttttggtaagggaaaagggaacaggaaaagaaaccccaaactcaggccgaatgatcaaggggacccataggaaatcttgtccagagacaagacttcgggaaggtgtctggacattcagaacaccaagacttgaaggtgccttgctcaatggaagaggccaggacagagctgacaaaattttgctccccagtgaaggccacagcaaccttctgcccatcctgtctgttcatggagagggtccctgcctcacctctgccattttgggttaggagaagtcaagttgggagcctgaaatagtggttcttggaaaaatggatccccagtgaaaactagagctctaagcccattcagcccatttcacacctgaaaatgttagtgatcaccacttggaccagcatccttaagtatcagaaagccccaagcaattgctgcatcttagtagggtgagggataagcaaaagaggatgttcaccataacccaggaatgaagataccatcagcaaagaatttcaatttgttcagtctttcatttagagctagtctttcacagtaccatctgaatacctctttgaaagaaggaagactttacgtagtgtagatttgttttgtgttgtttgaaaatattatctttgtaattatttttaatatgtaaggaatgcttggaatatctgctgtatgtcaactttatgcagcttccttttgagggacaaatttaaaacaaacaaccccccatcacaaacttaaaggattgcaagggccagatctgttaagtggtttcataggagacacatccagcaattgtgtggtcagtggctcttttacccaataagatacatcacagtcacatgcttgatggtttatgttgacctaagatttattttgttaaaatctctctctgttgtgttcgttcttgttctgttttgttttgttttttaaagtcttgctgtggtctctttgtggcagaagtgtttcatgcatggcagcaggcctgttgcttttttatggcgattcccattgaaaatgtaagtaaatgtctgtggccttgttctctctatggtaaagatattattcaccatgtaaaacaaaaaac

SEQ ID NO: 8939 - protein, 247 aa, Homo sapiens; identical to SEQ ID NO: 1281

SEQ ID NO: 8940 - DNA, 1040 bp, Homo sapiens
cagttccaccaggtgagaagagtgatgaccatccttttccttactatggttatttcatactttggttgcatgaaggctgcccccatgaaagaagcaaacatccgaggacaaggtggcttggcctacccaggtgtgcggacccatgggactctggagagcgtgaatgggcccaaggcaggttcaagaggcttgacatcattggctgacactttcgaacacgtgatagaagagctgttggatgaggaccagaaagttcggcccaatgaagaaaacaataaggacgcagacttgtacacgtccagggtgatgctcagtagtcaagtgcctttggagcctcctcttctctttctgctggaggaatacaaaaattacctagatgctgcaaacatgtccatgagggtccggcgccactctgaccctgcccgccgaggggagctgagcgtgtgtgacagtattagtgagtgggtaacggcagcagacaaaaagactgcagatagacacttcttgtgtatgtacattgaccattaaaaggggaagatagtggatttatgttgtatagattagattatattgagacaaaaattatctatttgtatatatacataacagggtaaattattcagttaagaaaaaaataattttatgaactgcatgtataaatgaagtttatacagtacagtggttctacaatctatttattggacatgtccatgaccagaagggaaacagtcatttgcgcacaacttaaaaagtctgcattacattccttgataatgttgtggtttgttgccgttgccaagaactgaaaacataaaaagttaaaaaaaataataaattgcatgctgctttaattgtgaattgataataaactgtcctctttcagaaaacagaaaaaaaacacacacacacacaacaaaaatttgaaccaaaacattccgtttacattttagacagtaagtatcttcgttcttgttagtactatatctgttttactgcttttaacttctgatagcgttggaattaaaacaatgtcaaggtgc

SEQ ID NO: 8941 - protein, 167 aa, Homo sapiens
MTILFLTMVISYFGCMKAAPMKEANIRGQGGLAYPGVRTHGTLESVNGPKAGSRGLTSLADTFEHVIEELLDEDQKVRPNEENNKDADLYTSRVMLSSQVPLEPPLLFLLEEYKNYLDAANMSMRVRRHSDPARRGELSVCDSISEWVTAADKKTADRHFLCMYIDH

SEQ ID NO: 8942 - DNA, 1516 bp, Homo sapiens
agtggacttacaagtccgaagccaatgtagcttggaaaacttgggaggcggaattcctaccgctgggaactgaaagggtctgcgacactctcgggcaggccgaacccacatctctacccatcctgcgcccctcttctgaagcgccctccagggaagttaagagttttgactttcggggagtggttgggatgtacgtgggggattcttgactcgggttagtctctggggatgcagagccgggaagaggaatggttccaccaggtgagaagagtgatgaccatccttttccttactatggttatttcatactttggttgcatgaaggctgcccccatgaaagaagcaaacatccgaggacaaggtggcttggcctacccaggtgtgcggacccatgggactctggagagcgtgaatgggcccaaggcaggttcaagaggcttgacatcattggctgacactttcgaacacgtgatagaagagctgttggatgaggaccagaaagttcggcccaatgaagaaaacaataaggacgcagacttgtacacgtccagggtgatgctcagtagtcaagtgcctttggagcctcctcttctctttctgctggaggaatacaaaaattacctagatgctgcaaacatgtccatgagggtccggcgccactctgaccctgcccgccgaggggagctgagcgtgtgtgacagtattagtgagtgggtaacggcagcagacaaaaagactgcagtggacatgtcgggcgggacggtcacagtccttgaaaaggtccctgtatcaaaaggccaactgaagcaatacttctacgagaccaagtgcaatcccatgggttacacaaaagaaggctgcaggggcatagacaaaaggcattggaactcccagtgccgaactacccagtcgtacgtgcgggcccttaccatggatagcaaaaagagaattggctggcgattcataaggatagacacttcttgtgtatgtacattgaccattaaaaggggaagatagtggatttatgttgtatagattagattatattgagacaaaaattatctatttgtatatatacataacagggtaaattattcagttaagaaaaaaataattttatgaactgcatgtataaatgaagtttatacagtacagtggttctacaatctatttattggacatgtccatgaccagaagggaaacagtcatttgcgcacaacttaaaaagtctgcattacattccttgataatgttgtggtttgttgccgttgccaagaactgaaaacataaaaagttaaaaaaaataataaattgcatgctgctttaattgtgaattgataataaactgtcctctttcagaaaacagaaaaaaaacacacacacacacaacaaaaatttgaaccaaaacattccgtttacattttagacagtaagtatcttcgttcttgttagtactatatctgttttactgcttttaacttctgatagcgttggaattaaaacaatgtcaaggtgc

SEQ ID NO: 8943 - protein, 262 aa, Homo sapiens; identical to SEQ ID NO: 1289

SEQ ID NO: 8944 - DNA, 1546 bp, Homo sapiens
gctccgggtccccgacgctgccgccgccgcgcccgggcgcacccgcccgctcgctgtcccgcgcaccccgtagcgcctcgggctcccgggccggacagaggagccagcccggtgcgcccctccacctcctgctcggggggctttaatgagacacccaccgctgctgtggggccggcggggagcagcaccgcgacggggaccggggctgggcgctggagccagaatcggaaccacgatgtgactccgccgccggggacccgtgaggtttgtgtggaccccgagttccaccaggtgagaagagtgatgaccatccttttccttactatggttatttcatactttggttgcatgaaggctgcccccatgaaagaagcaaacatccgaggacaaggtggcttggcctacccaggtgtgcggacccatgggactctggagagcgtgaatgggcccaaggcaggttcaagaggcttgacatcattggctgacactttcgaacacgtgatagaagagctgttggatgaggaccagaaagttcggcccaatgaagaaaacaataaggacgcagacttgtacacgtccagggtgatgctcagtagtcaagtgcctttggagcctcctcttctctttctgctggaggaatacaaaaattacctagatgctgcaaacatgtccatgagggtccggcgccactctgaccctgcccgccgaggggagctgagcgtgtgtgacagtattagtgagtgggtaacggcagcagacaaaaagactgcagtggacatgtcgggcgggacggtcacagtccttgaaaaggtccctgtatcaaaaggccaactgaagcaatacttctacgagaccaagtgcaatcccatgggttacacaaaagaaggctgcaggggcatagacaaaaggcattggaactcccagtgccgaactacccagtcgtacgtgcgggcccttaccatggatagcaaaaagagaattggctggcgattcataaggatagacacttcttgtgtatgtacattgaccattaaaaggggaagatagtggatttatgttgtatagattagattatattgagacaaaaattatctatttgtatatatacataacagggtaaattattcagttaagaaaaaaataattttatgaactgcatgtataaatgaagtttatacagtacagtggttctacaatctatttattggacatgtccatgaccagaagggaaacagtcatttgcgcacaacttaaaaagtctgcattacattccttgataatgttgtggtttgttgccgttgccaagaactgaaaacataaaaagttaaaaaaaataataaattgcatgctgctttaattgtgaattgataataaactgtcctctttcagaaaacagaaaaaaaacacacacacacacaacaaaaatttgaaccaaaacattccgtttacattttagacagtaagtatcttcgttcttgttagtactatatctgttttactgcttttaacttctgatagcgttggaattaaaacaatgtcaaggtgc

SEQ ID NO: 8945 - protein, 247 aa, Homo sapiens; identical to SEQ ID NO: 1281

SEQ ID NO: 8946 - DNA, 1468 bp, Homo sapiens
gagacctcggggcgtgcgattctcactcgctccctcccgccccagcgcccacagccggggtttctgcagagggcgcgggacgcggggttccccggggctgaggctggggctggaacacccctcgaagccgcgggcgtcctgtccaaggcgccccaggagggcgcaggactcgcagggcgatgtcgcggggccctaggggaggagttccaccaggtgagaagagtgatgaccatccttttccttactatggttatttcatactttggttgcatgaaggctgcccccatgaaagaagcaaacatccgaggacaaggtggcttggcctacccaggtgtgcggacccatgggactctggagagcgtgaatgggcccaaggcaggttcaagaggcttgacatcattggctgacactttcgaacacgtgatagaagagctgttggatgaggaccagaaagttcggcccaatgaagaaaacaataaggacgcagacttgtacacgtccagggtgatgctcagtagtcaagtgcctttggagcctcctcttctctttctgctggaggaatacaaaaattacctagatgctgcaaacatgtccatgagggtccggcgccactctgaccctgcccgccgaggggagctgagcgtgtgtgacagtattagtgagtgggtaacggcagcagacaaaaagactgcagtggacatgtcgggcgggacggtcacagtccttgaaaaggtccctgtatcaaaaggccaactgaagcaatacttctacgagaccaagtgcaatcccatgggttacacaaaagaaggctgcaggggcatagacaaaaggcattggaactcccagtgccgaactacccagtcgtacgtgcgggcccttaccatggatagcaaaaagagaattggctggcgattcataaggatagacacttcttgtgtatgtacattgaccattaaaaggggaagatagtggatttatgttgtatagattagattatattgagacaaaaattatctatttgtatatatacataacagggtaaattattcagttaagaaaaaaataattttatgaactgcatgtataaatgaagtttatacagtacagtggttctacaatctatttattggacatgtccatgaccagaagggaaacagtcatttgcgcacaacttaaaaagtctgcattacattccttgataatgttgtggtttgttgccgttgccaagaactgaaaacataaaaagttaaaaaaaataataaattgcatgctgctttaattgtgaattgataataaactgtcctctttcagaaaacagaaaaaaaacacacacacacacaacaaaaatttgaaccaaaacattccgtttacattttagacagtaagtatcttcgttcttgttagtactatatctgttttactgcttttaacttctgatagcgttggaattaaaacaatgtcaaggtgc

SEQ ID NO: 8947 - protein, 75 aa, Homo sapiens
MSRGPRGGVPPGEKSDDHPFPYYGYFILWLHEGCPHERSKHPRTRWLGLPRCADPWDSGEREWAQGRFKRLDIIG

SEQ ID NO: 8948 - DNA, 1596 bp, Homo sapiens
ctttcccattcaccgcggagagggctgctctcgctgccgctccccccggcgaactagcatgaaatctccctgcctctgccgagatcaaatggagcttctcgctgatggggtgcgagtattacctccgccatgcaatttccactatcaataatttaacttctttgctgcagaacagaaggagtacataccgggcaccaaagactcgcgccccctcccccctttaattaagcgaagggaacgtgaaaaaataatagagtgtgggagttttggggccgaagtctttcccggagcagctgccttgatggttactttgacaagtagtgactgaaaagttccaccaggtgagaagagtgatgaccatccttttccttactatggttatttcatactttggttgcatgaaggctgcccccatgaaagaagcaaacatccgaggacaaggtggcttggcctacccaggtgtgcggacccatgggactctggagagcgtgaatgggcccaaggcaggttcaagaggcttgacatcattggctgacactttcgaacacgtgatagaagagctgttggatgaggaccagaaagttcggcccaatgaagaaaacaataaggacgcagacttgtacacgtccagggtgatgctcagtagtcaagtgcctttggagcctcctcttctctttctgctggaggaatacaaaaattacctagatgctgcaaacatgtccatgagggtccggcgccactctgaccctgcccgccgaggggagctgagcgtgtgtgacagtattagtgagtgggtaacggcagcagacaaaaagactgcagtggacatgtcgggcgggacggtcacagtccttgaaaaggtccctgtatcaaaaggccaactgaagcaatacttctacgagaccaagtgcaatcccatgggttacacaaaagaaggctgcaggggcatagacaaaaggcattggaactcccagtgccgaactacccagtcgtacgtgcgggcccttaccatggatagcaaaaagagaattggctggcgattcataaggatagacacttcttgtgtatgtacattgaccattaaaaggggaagatagtggatttatgttgtatagattagattatattgagacaaaaattatctatttgtatatatacataacagggtaaattattcagttaagaaaaaaataattttatgaactgcatgtataaatgaagtttatacagtacagtggttctacaatctatttattggacatgtccatgaccagaagggaaacagtcatttgcgcacaacttaaaaagtctgcattacattccttgataatgttgtggtttgttgccgttgccaagaactgaaaacataaaaagttaaaaaaaataataaattgcatgctgctttaattgtgaattgataataaactgtcctctttcagaaaacagaaaaaaaacacacacacacacaacaaaaatttgaaccaaaacattccgtttacattttagacagtaagtatcttcgttcttgttagtactatatctgttttactgcttttaacttctgatagcgttggaattaaaacaatgtcaaggtgc

SEQ ID NO: 8949 - protein, 247 aa, Homo sapiens; identical to SEQ ID NO: 1281

SEQ ID NO: 8950 - DNA, 1597 bp, Homo sapiens
gccaacggatttgtccgaggtggcggtacccccaggtagtcttcttggccccgctgtaaagccaaccctgtgtcgcccttaaaaagcgtcttttctgaggttcggctcacactgagatcggggctggagagagagtcagattttggagcggagcgtttggaaagcgagccccagtttggtcccctcattgagctcgctgaagttggcttcctagcggtgtaggctggaatagactcttggcaagctccgggttggtatactgggttaactttgggaaatgcaagtgtttatctccaggatctagccaccggggtggtgtaagccgcaaagaagttccaccaggtgagaagagtgatgaccatccttttccttactatggttatttcatactttggttgcatgaaggctgcccccatgaaagaagcaaacatccgaggacaaggtggcttggcctacccaggtgtgcggacccatgggactctggagagcgtgaatgggcccaaggcaggttcaagaggcttgacatcattggctgacactttcgaacacgtgatagaagagctgttggatgaggaccagaaagttcggcccaatgaagaaaacaataaggacgcagacttgtacacgtccagggtgatgctcagtagtcaagtgcctttggagcctcctcttctctttctgctggaggaatacaaaaattacctagatgctgcaaacatgtccatgagggtccggcgccactctgaccctgcccgccgaggggagctgagcgtgtgtgacagtattagtgagtgggtaacggcagcagacaaaaagactgcagtggacatgtcgggcgggacggtcacagtccttgaaaaggtccctgtatcaaaaggccaactgaagcaatacttctacgagaccaagtgcaatcccatgggttacacaaaagaaggctgcaggggcatagacaaaaggcattggaactcccagtgccgaactacccagtcgtacgtgcgggcccttaccatggatagcaaaaagagaattggctggcgattcataaggatagacacttcttgtgtatgtacattgaccattaaaaggggaagatagtggatttatgttgtatagattagattatattgagacaaaaattatctatttgtatatatacataacagggtaaattattcagttaagaaaaaaataattttatgaactgcatgtataaatgaagtttatacagtacagtggttctacaatctatttattggacatgtccatgaccagaagggaaacagtcatttgcgcacaacttaaaaagtctgcattacattccttgataatgttgtggtttgttgccgttgccaagaactgaaaacataaaaagttaaaaaaaataataaattgcatgctgctttaattgtgaattgataataaactgtcctctttcagaaaacagaaaaaaaacacacacacacacaacaaaaatttgaaccaaaacattccgtttacattttagacagtaagtatcttcgttcttgttagtactatatctgttttactgcttttaacttctgatagcgttggaattaaaacaatgtcaaggtgc

SEQ ID NO: 8951 - protein, 247 aa, Homo sapiens; identical to SEQ ID NO: 1281

SEQ ID NO: 8952 - DNA, 1581 bp, Homo sapiens
tcattcattagaatcacgtaagaactcaaaaggaaacgtgtctctcggagtgagggcgtttgcgtaaatctataggtttttcgacatcgatgccagttgctttgtcttctgtagtcgccaaggtggttgagagtttaagcttgcggatattgcaaagggttattagattcataagtcacaccaagtggtgggcgatccactgagcaaagccgaacttctcacatgatgacttcaaacaagacacattaccttccagcatctgttggggagacgagattttaagacacttgagtctccaggacagcaaaggcacaatgttccaccaggtgagaagagtgatgaccatccttttccttactatggttatttcatactttggttgcatgaaggctgcccccatgaaagaagcaaacatccgaggacaaggtggcttggcctacccaggtgtgcggacccatgggactctggagagcgtgaatgggcccaaggcaggttcaagaggcttgacatcattggctgacactttcgaacacgtgatagaagagctgttggatgaggaccagaaagttcggcccaatgaagaaaacaataaggacgcagacttgtacacgtccagggtgatgctcagtagtcaagtgcctttggagcctcctcttctctttctgctggaggaatacaaaaattacctagatgctgcaaacatgtccatgagggtccggcgccactctgaccctgcccgccgaggggagctgagcgtgtgtgacagtattagtgagtgggtaacggcagcagacaaaaagactgcagtggacatgtcgggcgggacggtcacagtccttgaaaaggtccctgtatcaaaaggccaactgaagcaatacttctacgagaccaagtgcaatcccatgggttacacaaaagaaggctgcaggggcatagacaaaaggcattggaactcccagtgccgaactacccagtcgtacgtgcgggcccttaccatggatagcaaaaagagaattggctggcgattcataaggatagacacttcttgtgtatgtacattgaccattaaaaggggaagatagtggatttatgttgtatagattagattatattgagacaaaaattatctatttgtatatatacataacagggtaaattattcagttaagaaaaaaataattttatgaactgcatgtataaatgaagtttatacagtacagtggttctacaatctatttattggacatgtccatgaccagaagggaaacagtcatttgcgcacaacttaaaaagtctgcattacattccttgataatgttgtggtttgttgccgttgccaagaactgaaaacataaaaagttaaaaaaaataataaattgcatgctgctttaattgtgaattgataataaactgtcctctttcagaaaacagaaaaaaaacacacacacacacaacaaaaatttgaaccaaaacattccgtttacattttagacagtaagtatcttcgttcttgttagtactatatctgttttactgcttttaacttctgatagcgttggaattaaaacaatgtcaaggtgc

SEQ ID NO: 8953 - protein, 255 aa, Homo sapiens; identical to SEQ ID NO: 1283

SEQ ID NO: 8954 - DNA, 1049 bp, Homo sapiens
tttctcgtgacagcatgagcagagatcattaaaaattaaacttacaaagctgctaaagtgggaagaaggagaacttgaagccacaatttttgcacttgcttagaagccatctaatctcagttccaccaggtgagaagagtgatgaccatccttttccttactatggttatttcatactttggttgcatgaaggctgcccccatgaaagaagcaaacatccgaggacaaggtggcttggcctacccaggtgtgcggacccatgggactctggagagcgtgaatgggcccaaggcaggttcaagaggcttgacatcattggctgacactttcgaacacgtgatagaagagctgttggatgaggaccagaaagttcggcccaatgaagaaaacaataaggacgcagacttgtacacgtccagggtgatgctcagtagtcaagtgcctttggagcctcctcttctctttctgctggaggaatacaaaaattacctagatgctgcaaacatgtccatgagggtccggcgccactctgaccctgcccgccgaggggagctgagcgtgtgtgacagtattagtgagtgggtaacggcagcagacaaaaagcattggaactcccagtgccgaactacccagtcgtacgtgcgggcccttaccatggatagcaaaaagagaattggctggcgattcataaggatagacacttcttgtgtatgtacattgaccattaaaaggggaagatagtggatttatgttgtatagattagattatattgagacaaaaattatctatttgtatatatacataacagggtaaattattcagttaagaaaaaaataattttatgaactgcatgtataaatgaagtttatacagtacagtggttctacaatctatttattggacatgtccatgaccagaagggaaacagtcatttgcgcacaacttaaaaagtctgcattacattccttgataatgttgtggtttgttgccgttgccaagaactgaaaacataaaaagttaaaaaaaataataaattgcatgctgcttt

SEQ ID NO: 8955 - protein, 199 aa, Homo sapiens
MTILFLTMVISYFGCMKAAPMKEANIRGQGGLAYPGVRTHGTLESVNGPKAGSRGLTSLADTFEHVIEELLDEDQKVRPNEENNKDADLYTSRVMLSSQVPLEPPLLFLLEEYKNYLDAANMSMRVRRHSDPARRGELSVCDSISEWVTAADKKHWNSQCRTTQSYVRALTMDSKKRIGWRFIRIDTSCVCTLTIKRGR

SEQ ID NO: 8956 - DNA, 1325 bp, Homo sapiens
agtggacttacaagtccgaagccaatgtagcttggaaaacttgggaggcggaattcctaccgctgggaactgaaagggtctgcgacactctcgggcaggccgaacccacatctctacccatcctgcgcccctcttctgaagcgccctccagggaagttaagagttttgactttcggggagtggttgggatgtacgtgggggattcttgactcgggttagtctctggggatgcagagccgggaagaggaatggttccaccaggtgagaagagtgatgaccatccttttccttactatggttatttcatactttggttgcatgaaggctgcccccatgaaagaagcaaacatccgaggacaaggtggcttggcctacccaggtgtgcggacccatgggactctggagagcgtgaatgggcccaaggcaggttcaagaggcttgacatcattggctgacactttcgaacacgtgatagaagagctgttggatgaggaccagaaagttcggcccaatgaagaaaacaataaggacgcagacttgtacacgtccagggtgatgctcagtagtcaagtgcctttggagcctcctcttctctttctgctggaggaatacaaaaattacctagatgctgcaaacatgtccatgagggtccggcgccactctgaccctgcccgccgaggggagctgagcgtgtgtgacagtattagtgagtgggtaacggcagcagacaaaaagactgcagtggacatgtcgggcgggacggtcacagtccttgaaaaggtccctgtatcaaaaggccaactgaagcaatacttctacgagaccaagtgcaatcccatgggttacacaaaagaaggctgcaggggcatagacaaaaggcattggaactcccagtgccgaactacccagtcgtacgtgcgggcccttaccatggatagcaaaaagagaattggctggcgattcataaggatagacacttcttgtgtatgtacattgaccattaaaaggggaagatagtggatttatgttgtatagattagattatattgagacaaaaattatctatttgtatatatacataacagggtaaattattcagttaagaaaaaaataattttatgaactgcatgtataaatgaagtttatacagtacagtggttctacaatctatttattggacatgtccatgaccagaagggaaacagtcatttgcgcacaacttaaaaagtctgcattacattccttgataatgttgtggtttgttgccgttgccaagaactgaaaacataaaaagttaaaaaaaataataaattgcatgctgcttt

SEQ ID NO: 8957 - protein, 262 aa, Homo sapiens; identical to SEQ ID NO: 1289

SEQ ID NO: 8958 - DNA, 1355 bp, Homo sapiens
gctccgggtccccgacgctgccgccgccgcgcccgggcgcacccgcccgctcgctgtcccgcgcaccccgtagcgcctcgggctcccgggccggacagaggagccagcccggtgcgcccctccacctcctgctcggggggctttaatgagacacccaccgctgctgtggggccggcggggagcagcaccgcgacggggaccggggctgggcgctggagccagaatcggaaccacgatgtgactccgccgccggggacccgtgaggtttgtgtggaccccgagttccaccaggtgagaagagtgatgaccatccttttccttactatggttatttcatactttggttgcatgaaggctgcccccatgaaagaagcaaacatccgaggacaaggtggcttggcctacccaggtgtgcggacccatgggactctggagagcgtgaatgggcccaaggcaggttcaagaggcttgacatcattggctgacactttcgaacacgtgatagaagagctgttggatgaggaccagaaagttcggcccaatgaagaaaacaataaggacgcagacttgtacacgtccagggtgatgctcagtagtcaagtgcctttggagcctcctcttctctttctgctggaggaatacaaaaattacctagatgctgcaaacatgtccatgagggtccggcgccactctgaccctgcccgccgaggggagctgagcgtgtgtgacagtattagtgagtgggtaacggcagcagacaaaaagactgcagtggacatgtcgggcgggacggtcacagtccttgaaaaggtccctgtatcaaaaggccaactgaagcaatacttctacgagaccaagtgcaatcccatgggttacacaaaagaaggctgcaggggcatagacaaaaggcattggaactcccagtgccgaactacccagtcgtacgtgcgggcccttaccatggatagcaaaaagagaattggctggcgattcataaggatagacacttcttgtgtatgtacattgaccattaaaaggggaagatagtggatttatgttgtatagattagattatattgagacaaaaattatctatttgtatatatacataacagggtaaattattcagttaagaaaaaaataattttatgaactgcatgtataaatgaagtttatacagtacagtggttctacaatctatttattggacatgtccatgaccagaagggaaacagtcatttgcgcacaacttaaaaagtctgcattacattccttgataatgttgtggtttgttgccgttgccaagaactgaaaacataaaaagttaaaaaaaataataaattgcatgctgcttt

SEQ ID NO: 8959 - protein, 247 aa, Homo sapiens; identical to SEQ ID NO: 1281

SEQ ID NO: 8960 - DNA, 1277 bp, Homo sapiens
gagacctcggggcgtgcgattctcactcgctccctcccgccccagcgcccacagccggggtttctgcagagggcgcgggacgcggggttccccggggctgaggctggggctggaacacccctcgaagccgcgggcgtcctgtccaaggcgccccaggagggcgcaggactcgcagggcgatgtcgcggggccctaggggaggagttccaccaggtgagaagagtgatgaccatccttttccttactatggttatttcatactttggttgcatgaaggctgcccccatgaaagaagcaaacatccgaggacaaggtggcttggcctacccaggtgtgcggacccatgggactctggagagcgtgaatgggcccaaggcaggttcaagaggcttgacatcattggctgacactttcgaacacgtgatagaagagctgttggatgaggaccagaaagttcggcccaatgaagaaaacaataaggacgcagacttgtacacgtccagggtgatgctcagtagtcaagtgcctttggagcctcctcttctctttctgctggaggaatacaaaaattacctagatgctgcaaacatgtccatgagggtccggcgccactctgaccctgcccgccgaggggagctgagcgtgtgtgacagtattagtgagtgggtaacggcagcagacaaaaagactgcagtggacatgtcgggcgggacggtcacagtccttgaaaaggtccctgtatcaaaaggccaactgaagcaatacttctacgagaccaagtgcaatcccatgggttacacaaaagaaggctgcaggggcatagacaaaaggcattggaactcccagtgccgaactacccagtcgtacgtgcgggcccttaccatggatagcaaaaagagaattggctggcgattcataaggatagacacttcttgtgtatgtacattgaccattaaaaggggaagatagtggatttatgttgtatagattagattatattgagacaaaaattatctatttgtatatatacataacagggtaaattattcagttaagaaaaaaataattttatgaactgcatgtataaatgaagtttatacagtacagtggttctacaatctatttattggacatgtccatgaccagaagggaaacagtcatttgcgcacaacttaaaaagtctgcattacattccttgataatgttgtggtttgttgccgttgccaagaactgaaaacataaaaagttaaaaaaaataataaattgcatgctgcttt

SEQ ID NO: 8961 - protein, 75 aa, Homo sapiens; identical to SEQ ID NO: 8947

SEQ ID NO: 8962 - DNA, 1405 bp, Homo sapiens
ctttcccattcaccgcggagagggctgctctcgctgccgctccccccggcgaactagcatgaaatctccctgcctctgccgagatcaaatggagcttctcgctgatggggtgcgagtattacctccgccatgcaatttccactatcaataatttaacttctttgctgcagaacagaaggagtacataccgggcaccaaagactcgcgccccctcccccctttaattaagcgaagggaacgtgaaaaaataatagagtgtgggagttttggggccgaagtctttcccggagcagctgccttgatggttactttgacaagtagtgactgaaaagttccaccaggtgagaagagtgatgaccatccttttccttactatggttatttcatactttggttgcatgaaggctgcccccatgaaagaagcaaacatccgaggacaaggtggcttggcctacccaggtgtgcggacccatgggactctggagagcgtgaatgggcccaaggcaggttcaagaggcttgacatcattggctgacactttcgaacacgtgatagaagagctgttggatgaggaccagaaagttcggcccaatgaagaaaacaataaggacgcagacttgtacacgtccagggtgatgctcagtagtcaagtgcctttggagcctcctcttctctttctgctggaggaatacaaaaattacctagatgctgcaaacatgtccatgagggtccggcgccactctgaccctgcccgccgaggggagctgagcgtgtgtgacagtattagtgagtgggtaacggcagcagacaaaaagactgcagtggacatgtcgggcgggacggtcacagtccttgaaaaggtccctgtatcaaaaggccaactgaagcaatacttctacgagaccaagtgcaatcccatgggttacacaaaagaaggctgcaggggcatagacaaaaggcattggaactcccagtgccgaactacccagtcgtacgtgcgggcccttaccatggatagcaaaaagagaattggctggcgattcataaggatagacacttcttgtgtatgtacattgaccattaaaaggggaagatagtggatttatgttgtatagattagattatattgagacaaaaattatctatttgtatatatacataacagggtaaattattcagttaagaaaaaaataattttatgaactgcatgtataaatgaagtttatacagtacagtggttctacaatctatttattggacatgtccatgaccagaagggaaacagtcatttgcgcacaacttaaaaagtctgcattacattccttgataatgttgtggtttgttgccgttgccaagaactgaaaacataaaaagttaaaaaaaataataaattgcatgctgcttt

SEQ ID NO: 8963 - protein, 247 aa, Homo sapiens; identical to SEQ ID NO: 1281

SEQ ID NO: 8964 - DNA, 1406 bp, Homo sapiens
gccaacggatttgtccgaggtggcggtacccccaggtagtcttcttggccccgctgtaaagccaaccctgtgtcgcccttaaaaagcgtcttttctgaggttcggctcacactgagatcggggctggagagagagtcagattttggagcggagcgtttggaaagcgagccccagtttggtcccctcattgagctcgctgaagttggcttcctagcggtgtaggctggaatagactcttggcaagctccgggttggtatactgggttaactttgggaaatgcaagtgtttatctccaggatctagccaccggggtggtgtaagccgcaaagaagttccaccaggtgagaagagtgatgaccatccttttccttactatggttatttcatactttggttgcatgaaggctgcccccatgaaagaagcaaacatccgaggacaaggtggcttggcctacccaggtgtgcggacccatgggactctggagagcgtgaatgggcccaaggcaggttcaagaggcttgacatcattggctgacactttcgaacacgtgatagaagagctgttggatgaggaccagaaagttcggcccaatgaagaaaacaataaggacgcagacttgtacacgtccagggtgatgctcagtagtcaagtgcctttggagcctcctcttctctttctgctggaggaatacaaaaattacctagatgctgcaaacatgtccatgagggtccggcgccactctgaccctgcccgccgaggggagctgagcgtgtgtgacagtattagtgagtgggtaacggcagcagacaaaaagactgcagtggacatgtcgggcgggacggtcacagtccttgaaaaggtccctgtatcaaaaggccaactgaagcaatacttctacgagaccaagtgcaatcccatgggttacacaaaagaaggctgcaggggcatagacaaaaggcattggaactcccagtgccgaactacccagtcgtacgtgcgggcccttaccatggatagcaaaaagagaattggctggcgattcataaggatagacacttcttgtgtatgtacattgaccattaaaaggggaagatagtggatttatgttgtatagattagattatattgagacaaaaattatctatttgtatatatacataacagggtaaattattcagttaagaaaaaaataattttatgaactgcatgtataaatgaagtttatacagtacagtggttctacaatctatttattggacatgtccatgaccagaagggaaacagtcatttgcgcacaacttaaaaagtctgcattacattccttgataatgttgtggtttgttgccgttgccaagaactgaaaacataaaaagttaaaaaaaataataaattgcatgctgcttt

SEQ ID NO: 8965 - protein, 247 aa, Homo sapiens; identical to SEQ ID NO: 1281

SEQ ID NO: 8966 - DNA, 1390 bp, Homo sapiens
tcattcattagaatcacgtaagaactcaaaaggaaacgtgtctctcggagtgagggcgtttgcgtaaatctataggtttttcgacatcgatgccagttgctttgtcttctgtagtcgccaaggtggttgagagtttaagcttgcggatattgcaaagggttattagattcataagtcacaccaagtggtgggcgatccactgagcaaagccgaacttctcacatgatgacttcaaacaagacacattaccttccagcatctgttggggagacgagattttaagacacttgagtctccaggacagcaaaggcacaatgttccaccaggtgagaagagtgatgaccatccttttccttactatggttatttcatactttggttgcatgaaggctgcccccatgaaagaagcaaacatccgaggacaaggtggcttggcctacccaggtgtgcggacccatgggactctggagagcgtgaatgggcccaaggcaggttcaagaggcttgacatcattggctgacactttcgaacacgtgatagaagagctgttggatgaggaccagaaagttcggcccaatgaagaaaacaataaggacgcagacttgtacacgtccagggtgatgctcagtagtcaagtgcctttggagcctcctcttctctttctgctggaggaatacaaaaattacctagatgctgcaaacatgtccatgagggtccggcgccactctgaccctgcccgccgaggggagctgagcgtgtgtgacagtattagtgagtgggtaacggcagcagacaaaaagactgcagtggacatgtcgggcgggacggtcacagtccttgaaaaggtccctgtatcaaaaggccaactgaagcaatacttctacgagaccaagtgcaatcccatgggttacacaaaagaaggctgcaggggcatagacaaaaggcattggaactcccagtgccgaactacccagtcgtacgtgcgggcccttaccatggatagcaaaaagagaattggctggcgattcataaggatagacacttcttgtgtatgtacattgaccattaaaaggggaagatagtggatttatgttgtatagattagattatattgagacaaaaattatctatttgtatatatacataacagggtaaattattcagttaagaaaaaaataattttatgaactgcatgtataaatgaagtttatacagtacagtggttctacaatctatttattggacatgtccatgaccagaagggaaacagtcatttgcgcacaacttaaaaagtctgcattacattccttgataatgttgtggtttgttgccgttgccaagaactgaaaacataaaaagttaaaaaaaataataaattgcatgctgcttt

SEQ ID NO: 8967 - protein, 255 aa, Homo sapiens; identical to SEQ ID NO: 1283

SEQ ID NO: 8968 - DNA, 794 bp, Homo sapiens
acagtgtggcgattcctctaggatctagaactagaaataccatttgagccagccatcccattactgggtatatacccagaggattataaatcatgctactataaagacacatgcacacgtatgtttattgcggcactatttacaatagcaaatacttggagccaaccaaatgtccatcagtgagcaaggacatcattctgagcaaactatcgcaaggacagaaaaccaaacaccgcatgttctcactcataggtgggaactgaacaatgagaacactaccccacccactcaatcagatcctgcatttcaataagatttatttagtgcaataacttttttacttatcaaagttgagaagcacaggactaaatgataaagagaaaagaggctgcttaggataaggaaataaaaggttgaagttaacttaagtattatgatactttcttagcgtgtcatacggttacctgtcatctttcctctttggttcaacttgttttatggggacatttatgtgggaaaatatctttgcttttgtaatttatgtgggaaaatatctttgcttttgtgtttttacttaagtaaaatctgggctccttttatgtcaactagcttttccactattgttattatgatagaaagtacaggctacttataaacatgattagttcaatgagaacttttagaatattgctgacctaaatctggacatctacacaatcattaattcttaccaaaatgctacaaggcaatataagcataattagcctccctgatccctgaacatagcctaatat

SEQ ID NO: 8969 - protein, 47 aa, Homo sapiens
MSISEQGHHSEQTIARTENQTPHVLTHRWELNNENTTPPTQSDPAFQ

SEQ ID NO: 8970 - DNA, 785 bp, Homo sapiens
aagcaaaggcagaaatgagagggacaaaaggaagcagagaacagagcccaggctgttagaagatcctcgcggccagacctgggaggctgaaaggctgagagaccgaaaggctgaaccctccgccgcgctcggcggcccctcggagtcaggacacccaggagagccagctgctccccgggaacaacttcaccaatgagtgcaacataccaggcaacttcatgtgcagcaatggacggtgcatcccgggcgcctggcagtgtgacgggctgcctgactgcttcgacaagagtgatgagaaggagtgcccaaaccctctgctttgctccaccgcccgctaccactgcaagaacggcctctgtattgacaagagcttcatctgcgatggacagaataactgtcaagacaacagtgatgaggaaagctgtgaaagttctcaagaacccggcagtgggcaggtgtttgtgacttcagagaaccaacttgtgtattaccccagcatcacctatgccatcatcggcagctccgtcatttttgtgctggtggtggccctgctggcactggtcttgcaccaccagcggaagcggaacaacctcatgacgctgcccgtgcaccggctgcagcaccctgtgctgctgtcccgcctggtggtcctggaccacccccaccactgcaacgtcacctacaacgtcaataatggcatccagtatgtggccagccaggcggagcagaatgcgtcggaagtaggctccccaccctcctactccgaggccttgctggaccagagg

SEQ ID NO: 8971 - protein, 188 aa, Homo sapiens
MCSNGRCIPGAWQCDGLPDCFDKSDEKECPNPLLCSTARYHCKNGLCIDKSFICDGQNNCQDNSDEESCESSQEPGSGQVFVTSENQLVYYPSITYAIIGSSVIFVLVVALLALVLHHQRKRNNLMTLPVHRLQHPVLLSRLVVLDHPHHCNVTYNVNNGIQYVASQAEQNASEVGSPPSYSEALLDQ

SEQ ID NO: 8972 - DNA, 3839 bp, Homo sapiens
gaggccgcgggggcagcaacgacgccgggcagcgggagcggcggccgcgccatgtggctgctggggccgctgtgcctgctgctgagcagcgccgcggagagccagctgctccccgggaacaacttcaccaatgagtgcaacataccaggcaacttcatgtgcagcaatggacggtgcatcccgggcgcctggcagtgtgacgggctgcctgactgcttcgacaagagtgatgagaaggagtgccccaaggctaagtcgaaatgtggcccaaccttcttcccctgtgccagcggcatccattgcatcattggtcgcttccggtgcaatgggtttgaggactgtcccgatggcagcgatgaagagaactgcacagcaaaccctctgctttgctccaccgcccgctaccactgcaagaacggcctctgtattgacaagagcttcatctgcgatggacagaataactgtcaagacaacagtgatgaggaaagctgtgaaagttctcaagaacccggcagtgggcaggtgtttgtgacttcagagaaccaacttgtgtattaccccagcatcacctatgccatcatcggcagctccgtcatttttgtgctggtggtggccctgctggcactggtcttgcaccaccagcggaagcggaacaacctcatgacgctgcccgtgcaccggctgcagcaccctgtgctgctgtcccgcctggtggtcctggaccacccccaccactgcaacgtcacctacaacgtcaataatggcatccagtatgtggccagccaggcggagcagaatgcgtcggaagtaggctccccaccctcctactccgaggccttgctggaccagaggcctgcgtggtatgaccttcctccaccgccctactcttctgacacggaatctctgaaccaagccgacctgcccccctaccgctcccggtccgggagtgccaacagtgccagctcccaggcagccagcagcctcctgagcgtggaagacaccagccacagcccggggcagcctggcccccaggagggcactgctgagcccagggactctgagcccagccagggcactgaagaagtataagtcccagttattccaaagtccatatgggttaatctgctctgacttgttgccattctaacaatttgtgctcatgggaagctctttaagcacctgtaagggtgtctcaagttacagtttgggatattaactatctctgcattcccctcctcccccagacttcagagatgtttttctggcgtctcagttgacatgatctgttgtgcgtcttttctgtcaggtcactcttcccttgggacccgagatcacaccctcatttttcacattattctgtttctgttggagagacagcatataaaacagtattgaaataggctgggagagagcaatgtttctgtgctatattggatgctcagaagtgcaggagacgctggacccaattctctctgctgggtagttaccttatagcatttggggatttgggttagatgatctaaccaggaggccatcactggatggtcacccccccaaaaaaattccatttgagcatcaaaacctgctttgcacaatcctatttgatgcccccagttcagcagagtcagtggccaaagaaaactttggacgtgagtaacacccttcagcagtcgcaacgttattttggttttgtgaaggactctgaaaccatctaccctgtataaattctggctttagaaatttgcccaagaatgctcattctgagagctttcctcagcagcatatatcatcagcctcatcctaaaataggcagggagcccctcccatgagtttatccaagttctcagctcctaaaatgcaggctgccaagaccctacacctgccctggctctacagccacttacctggtttctggactgtcaccctcccagctgacctgcccgtagccaaggaatgaggacctaacttgagttggcccaaagtctgacctggctgtatgtccctgtggcccacacccagcctgtcttgctcattcatgcagcctcaacactggcctccaaagttcccttaacacttgcaaagtcctttttacctgtgcatttggacttgaggacactggtttctatcacaggtgagagccatgttcaatacctccagcaagctctcctggctccctgcactgtgcacgctcctcttcccaaggtcccaataccagcacctctagttagagttagggtcagggtcaggcctctcccaacatcccagtagtttctcctctgagacacatgggcaagagacaatttggagtcaagattttccatttggatctattttaaatcttttagaaatgcatttgaaacagtgtgtttgttttttcccttctagttaagggactatttatatgtgtataggaaagctgtctctttttttgtttttcctttaacaaggtccaaagaaagatgcaaaaggagatcacacccttgccccgctgagccccgtgataacaagtcactccagactaacctgtgtgccagacatttgtgcattgttgcactttgaggttattatttatcaagttcttgaaggaagcagaaagagggactcctctctccctccgtgtatagtctctatgtttgtgctagtttttcttttttttctctgtgtccagtcagccacagggcccgcctccctgcaggaataaggggtaaaacgttaggtgttgtttggcaagaaaccacactgactgatgaggggtaaaatggaaccaggtagagccactccgggcagctgtcacccattcagaacttctttccgcagctgaagaaatgttcagtaacctgtttgacgctaattaaaacagagcctgcaggaagtggggctaaagtggcattcagtgatcctgttctgtagacttttctttctttttttaaccaaatccaaaggatgttacagaaaagctagccactggtattttgttttgtttaaaaaaaaaaagaaagaaagaaagaaagaaaaacggaaaggaacctagctgcctgtatctttcatttttaaaatagcacttgagttattttctgagtaatccaataaagaacttttgatgacagccagaatgtgttagaactctggctgaacatttcatctcctgtgagtcagaagggctttatttctccctttgatggggccccttcttctttctggtgctctggaagttgtttagaggaaagaattctaattttaattaattgcgcagtgagttaatctcactcgcttttctgcttccaggcatcttaggaaaaacaaatggttttagtagataagggatgcctactaatgcttttttaaaacaaacagggacatttttattatagatttgatttttttaatgaatgtttttaaaaatatataaataggacaccaaagcggcagggtttttttgggggggagggggtttgttttccaactcaagatggcacattagtggccagcaatattttttaactcattccaaccaggaagcttttttatacattgcctaaatctacgccaaccagaaaatagtctcatctctttttttctcaaatgagatccgtgttttattttagcattaaattagttacactgtgatgactggcctattacctgactcagctccctctaccttgaaattgacatttttaaaaaatgcaactaagtggttaatagtgtgtgacgctcaaagttaatgtaaactggaaaggttgtgtgtcgttgctttttgtgttttggttaggcttggttttgttttttaatttttatactttctaataaatttgcagtttcattctttctgtttgtgc

SEQ ID NO: 8973 - protein, 345 aa, Homo sapiens; identical to SEQ ID NO: 1293

SEQ ID NO: 8974 - DNA, 3396 bp, Homo sapiens
atgtggctgctggggccgctgtgcctgctgctgagcagcgccgcgggaaagtgcctggaaaaatagatgacagccagaaagagagcttggagaaaaaaatgactccaaggagaaggtggtcatttcctagagtctggcttgtcagttccaaggctaagtcgaaatgtggcccaaccttcttcccctgtgccagcggcatccattgcatcattggtcgcttccggtgcaatgggtttgaggactgtcccgatggcagcgatgaagagaactgcacagcaaaccctctgctttgctccaccgcccgctaccactgcaagaacggcctctgtattgacaagagcttcatctgcgatggacagaataactgtcaagacaacagtgatgaggaaagctgtgaaagttctcaaggcctgcgtggtatgaccttcctccaccgccctactcttctgacacggaatctctgaaccaagccgacctgcccccctaccgctcccggtccgggagtgccaacagtgccagctcccaggcagccagcagcctcctgagcgtggaagacaccagccacagcccggggcagcctggcccccaggagggcactgctgagcccagggactctgagcccagccagggcactgaagaagtataagtcccagttattccaaagtccatatgggttaatctgctctgacttgttgccattctaacaatttgtgctcatgggaagctctttaagcacctgtaagggtgtctcaagttacagtttgggatattaactatctctgcattcccctcctcccccagacttcagagatgtttttctggcgtctcagttgacatgatctgttgtgcgtcttttctgtcaggtcactcttcccttgggacccgagatcacaccctcatttttcacattattctgtttctgttggagagacagcatataaaacagtattgaaataggctgggagagagcaatgtttctgtgctatattggatgctcagaagtgcaggagacgctggacccaattctctctgctgggtagttaccttatagcatttggggatttgggttagatgatctaaccaggaggccatcactggatggtcacccccccaaaaaaattccatttgagcatcaaaacctgctttgcacaatcctatttgatgcccccagttcagcagagtcagtggccaaagaaaactttggacgtgagtaacacccttcagcagtcgcaacgttattttggttttgtgaaggactctgaaaccatctaccctgtataaattctggctttagaaatttgcccaagaatgctcattctgagagctttcctcagcagcatatatcatcagcctcatcctaaaataggcagggagcccctcccatgagtttatccaagttctcagctcctaaaatgcaggctgccaagaccctacacctgccctggctctacagccacttacctggtttctggactgtcaccctcccagctgacctgcccgtagccaaggaatgaggacctaacttgagttggcccaaagtctgacctggctgtatgtccctgtggcccacacccagcctgtcttgctcattcatgcagcctcaacactggcctccaaagttcccttaacacttgcaaagtcctttttacctgtgcatttggacttgaggacactggtttctatcacaggtgagagccatgttcaatacctccagcaagctctcctggctccctgcactgtgcacgctcctcttcccaaggtcccaataccagcacctctagttagagttagggtcagggtcaggcctctcccaacatcccagtagtttctcctctgagacacatgggcaagagacaatttggagtcaagattttccatttggatctattttaaatcttttagaaatgcatttgaaacagtgtgtttgttttttcccttctagttaagggactatttatatgtgtataggaaagctgtctctttttttgtttttcctttaacaaggtccaaagaaagatgcaaaaggagatcacacccttgccccgctgagccccgtgataacaagtcactccagactaacctgtgtgccagacatttgtgcattgttgcactttgaggttattatttatcaagttcttgaaggaagcagaaagagggactcctctctccctccgtgtatagtctctatgtttgtgctagtttttcttttttttctctgtgtccagtcagccacagggcccgcctccctgcaggaataaggggtaaaacgttaggtgttgtttggcaagaaaccacactgactgatgaggggtaaaatggaaccaggtagagccactccgggcagctgtcacccattcagaacttctttccgcagctgaagaaatgttcagtaacctgtttgacgctaattaaaacagagcctgcaggaagtggggctaaagtggcattcagtgatcctgttctgtagacttttctttctttttttaaccaaatccaaaggatgttacagaaaagctagccactggtattttgttttgtttaaaaaaaaaaagaaagaaagaaagaaagaaaaacggaaaggaacctagctgcctgtatctttcatttttaaaatagcacttgagttattttctgagtaatccaataaagaacttttgatgacagccagaatgtgttagaactctggctgaacatttcatctcctgtgagtcagaagggctttatttctccctttgatggggccccttcttctttctggtgctctggaagttgtttagaggaaagaattctaattttaattaattgcgcagtgagttaatctcactcgcttttctgcttccaggcatcttaggaaaaacaaatggttttagtagataagggatgcctactaatgcttttttaaaacaaacagggacatttttattatagatttgatttttttaatgaatgtttttaaaaatatataaataggacaccaaagcggcagggtttttttgggggggagggggtttgttttccaactcaagatggcacattagtggccagcaatattttttaactcattccaaccaggaagcttttttatacattgcctaaatctacgccaaccagaaaatagtctcatctctttttttctcaaatgagatccgtgttttattttagcattaaattagttacactgtgatgactggcctattacctgactcagctccctctaccttgaaattgacatttttaaaaaatgcaactaagtggttaatagtgtgtgacgctcaaagttaatgtaaactggaaaggttgtgtgtcgttgctttttgtgttttggttaggcttggttttgttttttaatttttatactttctaataaatttgcagtttcattctttctgtttgtgc

SEQ ID NO: 8975 - protein, 121 aa, Homo sapiens
MTPRRRWSFPRVWLVSSKAKSKCGPTFFPCASGIHCIIGRFRCNGFEDCPDGSDEENCTANPLLCSTARYHCKNGLCIDKSFICDGQNNCQDNSDEESCESSQGLRGMTFLHRPTLLTRNL

SEQ ID NO: 8976 - DNA, 3574 bp, Homo sapiens
gatgtcaagagcttcattagagagtccgtaggaaagaatcatcacccttaaggaattcctgtagattttcatagaatgaagctgctggaggtccatttaacaggaagaatgtggaagccttttttccacttttaatttagagtttgaaagcccagctgggctgagagaggcaaaaatgctgactccattcgaagaaactgaaggaggctgggagaggttgattgctgcctttgtgtacagaacccggcagtgggcaggtgtttgtgacttcagagaaccaacttgtgtattaccccagcatcacctatgccatcatcggcagctccgtcatttttgtgctggtggtggccctgctggcactggtcttgcaccaccagcggaagcggaacaacctcatgacgctgcccgtgcaccggctgcagcaccctgtgctgctgtcccgcctggtggtcctggaccacccccaccactgcaacgtcacctacaacgtcaataatggcatccagtatgtggccagccaggcggagcagaatgcgtcggaagtaggctccccaccctcctactccgaggccttgctggaccagaggcctgcgtggtatgaccttcctccaccgccctactcttctgacacggaatctctgaaccaagccgacctgcccccctaccgctcccggtccgggagtgccaacagtgccagctcccaggcagccagcagcctcctgagcgtggaagacaccagccacagcccggggcagcctggcccccaggagggcactgctgagcccagggactctgagcccagccagggcactgaagaagtataagtcccagttattccaaagtccatatgggttaatctgctctgacttgttgccattctaacaatttgtgctcatgggaagctctttaagcacctgtaagggtgtctcaagttacagtttgggatattaactatctctgcattcccctcctcccccagacttcagagatgtttttctggcgtctcagttgacatgatctgttgtgcgtcttttctgtcaggtcactcttcccttgggacccgagatcacaccctcatttttcacattattctgtttctgttggagagacagcatataaaacagtattgaaataggctgggagagagcaatgtttctgtgctatattggatgctcagaagtgcaggagacgctggacccaattctctctgctgggtagttaccttatagcatttggggatttgggttagatgatctaaccaggaggccatcactggatggtcacccccccaaaaaaattccatttgagcatcaaaacctgctttgcacaatcctatttgatgcccccagttcagcagagtcagtggccaaagaaaactttggacgtgagtaacacccttcagcagtcgcaacgttattttggttttgtgaaggactctgaaaccatctaccctgtataaattctggctttagaaatttgcccaagaatgctcattctgagagctttcctcagcagcatatatcatcagcctcatcctaaaataggcagggagcccctcccatgagtttatccaagttctcagctcctaaaatgcaggctgccaagaccctacacctgccctggctctacagccacttacctggtttctggactgtcaccctcccagctgacctgcccgtagccaaggaatgaggacctaacttgagttggcccaaagtctgacctggctgtatgtccctgtggcccacacccagcctgtcttgctcattcatgcagcctcaacactggcctccaaagttcccttaacacttgcaaagtcctttttacctgtgcatttggacttgaggacactggtttctatcacaggtgagagccatgttcaatacctccagcaagctctcctggctccctgcactgtgcacgctcctcttcccaaggtcccaataccagcacctctagttagagttagggtcagggtcaggcctctcccaacatcccagtagtttctcctctgagacacatgggcaagagacaatttggagtcaagattttccatttggatctattttaaatcttttagaaatgcatttgaaacagtgtgtttgttttttcccttctagttaagggactatttatatgtgtataggaaagctgtctctttttttgtttttcctttaacaaggtccaaagaaagatgcaaaaggagatcacacccttgccccgctgagccccgtgataacaagtcactccagactaacctgtgtgccagacatttgtgcattgttgcactttgaggttattatttatcaagttcttgaaggaagcagaaagagggactcctctctccctccgtgtatagtctctatgtttgtgctagtttttcttttttttctctgtgtccagtcagccacagggcccgcctccctgcaggaataaggggtaaaacgttaggtgttgtttggcaagaaaccacactgactgatgaggggtaaaatggaaccaggtagagccactccgggcagctgtcacccattcagaacttctttccgcagctgaagaaatgttcagtaacctgtttgacgctaattaaaacagagcctgcaggaagtggggctaaagtggcattcagtgatcctgttctgtagacttttctttctttttttaaccaaatccaaaggatgttacagaaaagctagccactggtattttgttttgtttaaaaaaaaaaagaaagaaagaaagaaagaaaaacggaaaggaacctagctgcctgtatctttcatttttaaaatagcacttgagttattttctgagtaatccaataaagaacttttgatgacagccagaatgtgttagaactctggctgaacatttcatctcctgtgagtcagaagggctttatttctccctttgatggggccccttcttctttctggtgctctggaagttgtttagaggaaagaattctaattttaattaattgcgcagtgagttaatctcactcgcttttctgcttccaggcatcttaggaaaaacaaatggttttagtagataagggatgcctactaatgcttttttaaaacaaacagggacatttttattatagatttgatttttttaatgaatgtttttaaaaatatataaataggacaccaaagcggcagggtttttttgggggggagggggtttgttttccaactcaagatggcacattagtggccagcaatattttttaactcattccaaccaggaagcttttttatacattgcctaaatctacgccaaccagaaaatagtctcatctctttttttctcaaatgagatccgtgttttattttagcattaaattagttacactgtgatgactggcctattacctgactcagctccctctaccttgaaattgacatttttaaaaaatgcaactaagtggttaatagtgtgtgacgctcaaagttaatgtaaactggaaaggttgtgtgtcgttgctttttgtgttttggttaggcttggttttgttttttaatttttatactttctaataaatttgcagtttcattctttctgtttgtgc

SEQ ID NO: 8977 - protein, 142 aa, Homo sapiens
MTLPVHRLQHPVLLSRLVVLDHPHHCNVTYNVNNGIQYVASQAEQNASEVGSPPSYSEALLDQRPAWYDLPPPPYSSDTESLNQADLPPYRSRSGSANSASSQAASSLLSVEDTSHSPGQPGPQEGTAEPRDSEPSQGTEEV

SEQ ID NO: 8978 - DNA, 3950 bp, Homo sapiens
gcttggcagtttcccattgcggggcagctgggccgggggcgggggtcggctgcagatctcccgttgtgtgagagaaacgcaagcacggagctcccttgacctgctgcatcctcctcggcaattttttttttttaagtcaaaaagcttggatttcctgaaattgttgaactggatgcgcgcggagtctggggcggaggcgagcggcgggtgtgcgcgactcggggtgattcacgccggggaccccaaggaggtgttggctacgtttgtggttttaagaaagcctgagggcctgaaggcagcccctggagaagccctttccgagggcattcggaaccttctggtcctagaggtgaagctgaactgtcaccaggacttatgacccgcggcttcgctcccattctgcccgtcgagttccacaagatgggctccttccgcaggcctagaccgcgcttcatgagctcccccgtgctcagcgaccttccccgattccaagcagctcggcaggctctgcagctgagctccagctcagcctggaacagcgttcagactgctgtgatcaacgttttcaaagggggtggcttgcaaagcaacgagctctatgccctgaacgaaaacatcaggcggctgttgaagagtgaacttggatcattcattacagactattttcagaaccagcttcttgcaaaaggactgttctttgtggaggagaagatcaagctgtgtgaaggtgaaaatcgcattgaggttctggctgaagtctgggaccacttcttcactgagactctccctaccctgcaggcaatattttatccagttcagggccaggagctgactatccgccagatctccctgctgggcttccgagacctagtcttgctgaaggtgaagctgggtgacctgctgctgctggcccagtccaagctgccctcgtccattgtccagatgttgctcatcctgcagagtgttcacgagcccacaggcccaagtgagagttatttgcaactggaggagctggtgaagcaagtggtttctcctttcctcggcatcagcggggaccgtagcttctcaggccccacgtacacgctggccaggcggcactccagggtccggcccaaggtgactgtcctgaactatgcctccccgataaccgcagtcagccggccactgaatgagatggtcttgaccccactgacagagcaggagggggaagcctacctggagaagtgtggcagcgtgcggcggcacacggtggccaatgcccactcggacatccagctgctggccatggccaccatgatgcactcgggcctgggggaggaggccagcagtgagaacaagtgcctgctcctgccacccagcttccccccgccccaccggcagtgctccagtgagcccaacatcactgacaaccctgacggactggaggagggggccaggggcagccaggagggctcggagctgaactgtgcttccctcagctgagtcgccacccctgggcctttccatctcctgttttgcaaccaggatgaggacccctccatctccgtggattactgaggggggctcttgctttatgcgatgctgccttatttcctttagggtactgtcctggtcaaaatgacctaaggggaaaccgttgttgtaaacctctttattttggtgactgtgaccacttctttgtagccaccaattgtagtgaccagttgcctaatggtcactttctgactccagccttgccagcctgactcagatcctcatctctgggcctttctccctccgatgttggactgcctgatgctcccaatgacatatccaatgctcctggcatttctggagcaggaggttgtcaggacaacacatataaccaccaaggatgtgttggcctttggagttcccctttaggttcctagtgatgtggaggtttatgggtgaaaaattagtggagagggaactcctctcccccattttgtgtagagtgaaaatagcctgaagcccctactcagcagggctctgggaatgtgccttccttattttagtttcagaattgctgggaaagttaccccactggtgggtgaggatctatcctcaacctacatccagatcctatgtgctgcttgcacagaggcctttggcttttgacccaggagggccgcgaggctggagctgccctgtctttcattgagccttagcatttccctctcaggcttcctctcaagctcaaggaactcacccccagataagaagctggtgcctcttgtctctctcatttcagaaacggactttctcatcatgctttcctatggtgggtatgaggggccagctgataccaaccaactggcctgtatctatctatctggatttgacttgaatttttaaaatgtgtatcgtttaaaaaaaaaaatgtttgcaaattttgcacataggatcttgcactgttcattttcagtggggtgagtcttcacactaaaaacacaagcagagctcctgggaaaagagactggaagtggttcaggataaagagatccatggtgggcagggctgttaggtcacagagctctagaagcagctggacttgaacccacaatggcttgtgtaaattcgtaaatttcatggtttctaggaaaagctgcattggggtggggagacccagtttgcctcataggcagaggattctccaggaagcatggaaaatggaatgtttccatgctttacagtgctgggagagaggggagatgtgggcaggaccttttggaaggatgtttattctctgtggttaaagaaatgctgagaatttctagcatgtgaagcacttgggggcagcaggccttggcacggtgctgcatccttctactgctccctccaggtctgggggcttttatccaccttgaatccctatcctcctctttgtagttgtcggtctcactgataacagctccagaaaaaaagacaaggctccccctctgacccttcctgttggtatttatgaaatctcaaagagatgagccaccttggcttccaatatggcaagagggtgctgggagaaggtgaagatcagtctaagctgccacggtgatgagaccttctcattatgtaactcttgatggcatttcccttctgagtgaagatttgaaatatgattgattagaattgtgctcttgatggctgggaatttagaaattttattttaagagttatttcattttcatcctaagagtgatgggagagaaatgtccaaaagagatctgctgatctgctgagagtttcaaacaaacaaaaaaataatctctatgtatgtgttggataaagtctacagactgactaacatgcattagcaaatggagcatcagtaggtagcaacatgataatttatgtaactgatagcttctgtccttattagtacacttaacatttgagactagtatttattgatccaggcaaagtaattaattaatcatgcttgggcttactttttcagtttgtaaggttaagcatatgtgcatgcgtgcgtgtgtatataaatgccttttccatatcttaaatgtccctgatgaggagagcagtcatcaattaaatatataagctcttaaaatgagaatggaagtgtcagtatagacccagtgtacttaagtgctgatgactgttagccagtttacaactttttaccatcgatgtacacatttgatatttgtgcagtaaatagactgtacctataaaaaattttattgatgtttatggtcatgttagctatcagagagctattggagtgagagctgaggtgtccttaaccactttttctctcctagattcattttcattatttatgctaggattttcttatggttgacatttgatgacaggaagcaatcatgactcttcaagtgagctcacagaaacctttcatgttgtctgtttccaaaatggattcaataaacaacattttgtccatgtta

SEQ ID NO: 8979 - protein, 368 aa, Homo sapiens
MTRGFAPILPVEFHKMGSFRRPRPRFMSSPVLSDLPRFQAARQALQLSSSSAWNSVQTAVINVFKGGGLQSNELYALNENIRRLLKSELGSFITDYFQNQLLAKGLFFVEEKIKLCEGENRIEVLAEVWDHFFTETLPTLQAIFYPVQGQELTIRQISLLGFRDLVLLKVKLGDLLLLAQSKLPSSIVQMLLILQSVHEPTGPSESYLQLEELVKQVVSPFLGISGDRSFSGPTYTLARRHSRVRPKVTVLNYASPITAVSRPLNEMVLTPLTEQEGEAYLEKCGSVRRHTVANAHSDIQLLAMATMMHSGLGEEASSENKCLLLPPSFPPPHRQCSSEPNITDNPDGLEEGARGSQEGSELNCASLS

SEQ ID NO: 8980 - DNA, 3310 bp, Homo sapiens
agatctcccgttgtgtgagagaaacgcaagcacggagctcccttgacctgctgcatcctcctcggcaattttttttttttaagtcaaaaagcttggatttcctgaaattgttgaactggatgcggctgttgaagagtgaacttggatcattcattacagactattttcagaaccagcttcttgcaaaaggactgttctttgtggaggagaagatcaagctgtgtgaaggtgaaaatcgcattgaggttctggctgaagtctgggaccacttcttcactgagactctccctaccctgcaggcaatattttatccagttcagagtgttcacgagcccacaggcccaagtgagagttatttgcaactggaggagctggtgaagcaagtggtttctcctttcctcggcatcagcggggaccgtagcttctcaggccccacgtacacgctggccaggcggcactccagggtccggcccaaggtgactgtcctgaactatgcctccccgataaccgcagtcagccggccactgaatgagatggtcttgaccccactgacagagcaggagggggaagcctacctggagaagtgtggcagcgtgcggcggcacacggtggccaatgcccactcggacatccagctgctggccatggccaccatgatgcactcgggcctgggggaggaggccagcagtgagaacaagtgcctgctcctgccacccagcttccccccgccccaccggcagtgctccagtgagcccaacatcactgacaaccctgacggactggaggagggggccaggggcagccaggagggctcggagctgaactgtgcttccctcagctgagtcgccacccctgggcctttccatctcctgttttgcaaccaggatgaggacccctccatctccgtggattactgaggggggctcttgctttatgcgatgctgccttatttcctttagggtactgtcctggtcaaaatgacctaaggggaaaccgttgttgtaaacctctttattttggtgactgtgaccacttctttgtagccaccaattgtagtgaccagttgcctaatggtcactttctgactccagccttgccagcctgactcagatcctcatctctgggcctttctccctccgatgttggactgcctgatgctcccaatgacatatccaatgctcctggcatttctggagcaggaggttgtcaggacaacacatataaccaccaaggatgtgttggcctttggagttcccctttaggttcctagtgatgtggaggtttatgggtgaaaaattagtggagagggaactcctctcccccattttgtgtagagtgaaaatagcctgaagcccctactcagcagggctctgggaatgtgccttccttattttagtttcagaattgctgggaaagttaccccactggtgggtgaggatctatcctcaacctacatccagatcctatgtgctgcttgcacagaggcctttggcttttgacccaggagggccgcgaggctggagctgccctgtctttcattgagccttagcatttccctctcaggcttcctctcaagctcaaggaactcacccccagataagaagctggtgcctcttgtctctctcatttcagaaacggactttctcatcatgctttcctatggtgggtatgaggggccagctgataccaaccaactggcctgtatctatctatctggatttgacttgaatttttaaaatgtgtatcgtttaaaaaaaaaaatgtttgcaaattttgcacataggatcttgcactgttcattttcagtggggtgagtcttcacactaaaaacacaagcagagctcctgggaaaagagactggaagtggttcaggataaagagatccatggtgggcagggctgttaggtcacagagctctagaagcagctggacttgaacccacaatggcttgtgtaaattcgtaaatttcatggtttctaggaaaagctgcattggggtggggagacccagtttgcctcataggcagaggattctccaggaagcatggaaaatggaatgtttccatgctttacagtgctgggagagaggggagatgtgggcaggaccttttggaaggatgtttattctctgtggttaaagaaatgctgagaatttctagcatgtgaagcacttgggggcagcaggccttggcacggtgctgcatccttctactgctccctccaggtctgggggcttttatccaccttgaatccctatcctcctctttgtagttgtcggtctcactgataacagctccagaaaaaaagacaaggctccccctctgacccttcctgttggtatttatgaaatctcaaagagatgagccaccttggcttccaatatggcaagagggtgctgggagaaggtgaagatcagtctaagctgccacggtgatgagaccttctcattatgtaactcttgatggcatttcccttctgagtgaagatttgaaatatgattgattagaattgtgctcttgatggctgggaatttagaaattttattttaagagttatttcattttcatcctaagagtgatgggagagaaatgtccaaaagagatctgctgatctgctgagagtttcaaacaaacaaaaaaataatctctatgtatgtgttggataaagtctacagactgactaacatgcattagcaaatggagcatcagtaggtagcaacatgataatttatgtaactgatagcttctgtccttattagtacacttaacatttgagactagtatttattgatccaggcaaagtaattaattaatcatgcttgggcttactttttcagtttgtaaggttaagcatatgtgcatgcgtgcgtgtgtatataaatgccttttccatatcttaaatgtccctgatgaggagagcagtcatcaattaaatatataagctcttaaaatgagaatggaagtgtcagtatagacccagtgtacttaagtgctgatgactgttagccagtttacaactttttaccatcgatgtacacatttgatatttgtgcagtaaatagactgtacctataaaaaattttattgatgtttatggtcatgttagctatcagagagctattggagtgagagctgaggtgtccttaaccactttttctctcctagattcattttcattatttatgctaggattttcttatggttgacatttgatgacaggaagcaatcatgactcttcaagtgagctcacagaaacctttcatgttgtctgtttccaaaatggattcaataaacaacattttgtccatgtta

SEQ ID NO: 8981 - protein, 240 aa, Homo sapiens
MRLLKSELGSFITDYFQNQLLAKGLFFVEEKIKLCEGENRIEVLAEVWDHFFTETLPTLQAIFYPVQSVHEPTGPSESYLQLEELVKQVVSPFLGISGDRSFSGPTYTLARRHSRVRPKVTVLNYASPITAVSRPLNEMVLTPLTEQEGEAYLEKCGSVRRHTVANAHSDIQLLAMATMMHSGLGEEASSENKCLLLPPSFPPPHRQCSSEPNITDNPDGLEEGARGSQEGSELNCASLS

SEQ ID NO: 8982 - DNA, 553 bp, Homo sapiens
aaacgtgtcaccagcccggctgtgggagctccgcggccgaagcgtttgttgactcgcgctggagaggaaccgaggctggacgggaccccatctgagggcagagctgggggaggagggagggacggagggagggagagctgggcagagcgcgacggggagaaccatccaggtcgctcatttctctccggtgagaaaacttcctcgggaagaccggaaactttttcctaggcgcgcggagtctggggcggaggcgagcggcgggtgtgcgcgactcggggtgattcacgccggggaccccaaggagaagaggcaattcggacataaagagaaacatcaagggcatgagtgcacagaggaaagaccatgtgacggcatggctacaaggcagccatctgtaaaccaaggagagagaccccaaaggaaatcaaccctgctgacaccttgatcgtggacttctagcctccagaactgaaaaaagaaaaaaggaatctcctggcaggctcaacagtgagccaggcgtgagtctgggacacttccggccggggctgaagcc

SEQ ID NO: 8983 - protein, 37 aa, Homo sapiens
HLDRGLLASRTEKRKKESPGRLNSEPGVSLGHFRPGL

SEQ ID NO: 8984 - DNA, 2622 bp, Homo sapiens
gactcgcgctggagaggaaccgaggctggacgggaccccatctgagggcagatgctccagtgagcccaacatcactgacaaccctgacggactggaggagggggccaggggcagccaggagggctcggagctgaactgtgcttccctcagctgagtcgccacccctgggcctttccatctcctgttttgcaaccaggatgaggacccctccatctccgtggattactgaggggggctcttgctttatgcgatgctgccttatttcctttagggtactgtcctggtcaaaatgacctaaggggaaaccgttgttgtaaacctctttattttggtgactgtgaccacttctttgtagccaccaattgtagtgaccagttgcctaatggtcactttctgactccagccttgccagcctgactcagatcctcatctctgggcctttctccctccgatgttggactgcctgatgctcccaatgacatatccaatgctcctggcatttctggagcaggaggttgtcaggacaacacatataaccaccaaggatgtgttggcctttggagttcccctttaggttcctagtgatgtggaggtttatgggtgaaaaattagtggagagggaactcctctcccccattttgtgtagagtgaaaatagcctgaagcccctactcagcagggctctgggaatgtgccttccttattttagtttcagaattgctgggaaagttaccccactggtgggtgaggatctatcctcaacctacatccagatcctatgtgctgcttgcacagaggcctttggcttttgacccaggagggccgcgaggctggagctgccctgtctttcattgagccttagcatttccctctcaggcttcctctcaagctcaaggaactcacccccagataagaagctggtgcctcttgtctctctcatttcagaaacggactttctcatcatgctttcctatggtgggtatgaggggccagctgataccaaccaactggcctgtatctatctatctggatttgacttgaatttttaaaatgtgtatcgtttaaaaaaaaaaatgtttgcaaattttgcacataggatcttgcactgttcattttcagtggggtgagtcttcacactaaaaacacaagcagagctcctgggaaaagagactggaagtggttcaggataaagagatccatggtgggcagggctgttaggtcacagagctctagaagcagctggacttgaacccacaatggcttgtgtaaattcgtaaatttcatggtttctaggaaaagctgcattggggtggggagacccagtttgcctcataggcagaggattctccaggaagcatggaaaatggaatgtttccatgctttacagtgctgggagagaggggagatgtgggcaggaccttttggaaggatgtttattctctgtggttaaagaaatgctgagaatttctagcatgtgaagcacttgggggcagcaggccttggcacggtgctgcatccttctactgctccctccaggtctgggggcttttatccaccttgaatccctatcctcctctttgtagttgtcggtctcactgataacagctccagaaaaaaagacaaggctccccctctgacccttcctgttggtatttatgaaatctcaaagagatgagccaccttggcttccaatatggcaagagggtgctgggagaaggtgaagatcagtctaagctgccacggtgatgagaccttctcattatgtaactcttgatggcatttcccttctgagtgaagatttgaaatatgattgattagaattgtgctcttgatggctgggaatttagaaattttattttaagagttatttcattttcatcctaagagtgatgggagagaaatgtccaaaagagatctgctgatctgctgagagtttcaaacaaacaaaaaaataatctctatgtatgtgttggataaagtctacagactgactaacatgcattagcaaatggagcatcagtaggtagcaacatgataatttatgtaactgatagcttctgtccttattagtacacttaacatttgagactagtatttattgatccaggcaaagtaattaattaatcatgcttgggcttactttttcagtttgtaaggttaagcatatgtgcatgcgtgcgtgtgtatataaatgccttttccatatcttaaatgtccctgatgaggagagcagtcatcaattaaatatataagctcttaaaatgagaatggaagtgtcagtatagacccagtgtacttaagtgctgatgactgttagccagtttacaactttttaccatcgatgtacacatttgatatttgtgcagtaaatagactgtacctataaaaaattttattgatgtttatggtcatgttagctatcagagagctattggagtgagagctgaggtgtccttaaccactttttctctcctagattcattttcattatttatgctaggattttcttatggttgacatttgatgacaggaagcaatcatgactcttcaagtgagctcacagaaacctttcatgttgtctgtttccaaaatggattcaataaacaacattttgtccatgtta

SEQ ID NO: 8985 - protein, 55 aa, Homo sapiens
MVSRKSCIGVGRPSLPHRQRILQEAWKMECFHALQCWERGEMWAGPFGRMFILCG

SEQ ID NO: 8986 - DNA, 366 bp, Homo sapiens
agagcgcgacggggagaaccatccaggtcgctcatttctctccggtgagaaaacttcctcgggaagaccggaaactttttcctaggcgcgcggagtctggggcggaggcgagcggcgggtgtgcgcgactcggggtgattcacgccggggaccccaaggagaagaggcaattcggacataaagagaaacatcaagggcatgagtgcacagaggaaagaccatgtgacggcatggctacaaggcagccatctgtaaaccaaggagagagaccccaaaggaaatcaaccctgctgacaccttgatcgtggacttctagcctccagaactatgtagaaactgcagctcagagatgtccaaggtcacact

SEQ ID NO: 8987 - protein, 31 aa, Homo sapiens
ARGVWGGGERRVCATRGDSRRGPQGEEAIRT

SEQ ID NO: 8988 - DNA, 478 bp, Homo sapiens
aatctcaggccatgtaactgggttctgccacagggcctccacccagctgggccttcctctcgactatccacattcaacatctagcaaggggagtgcctggcactcgagtggattccatttccaagccagccatcacctctaatgatgtgcacatctcctgtgaacctggatgccttcctagataaacaacaaagtcttacaaacacaacttactcccaggcccagagagttcctaataagccaatgttggtgtgtgtgggtgtgatgagacccgcgagaagtccccagatggagattgaagaagtggaaattcggtgctaatgctaattcttcatttagcactgtttcagccatagttaaagcgtgcattggggccttaaaaaggttatgtttataaggaagaaggaagacagtccatgtctgacttgctgaacatgcaaaacgaaaacaacaacaaataaagtaaccctggaactcc

SEQ ID NO: 8989 - protein, 59 aa, Homo sapiens
MMCTSPVNLDAFLDKQQSLTNTTYSQAQRVPNKPMLVCVGVMRPARSPQMEIEEVEIRC

SEQ ID NO: 8990 - DNA, 801 bp, Homo sapiens
ctcccgggtgcgccgcatatatagcagcggcggcggtggcggcggccacaccgggcggcggacacgtggagggacccggcccgcgccttctgcccctgctgccggccgcgccatgcggtgagcgccccaggccgccagagcccacccgacccggcccgacgcccggacctgccgcccagacccgccaccgcacccggaccccgacgctccgaacccgggcgcagccgcagctcaagatggcccgaggcagcgccctcctgctcgcctccctcctcctcgccgcggccctttctgcctctgcggggctctggtcgccggccaaggaaaaacgaggctggaccctgaacagcgcgggctacctgctgggcccacatgccgttggcaaccacaggtcattcagcgacaagaatggcctcaccagcaagcgggagctgcggcccgaagatgacatgaaaccaggaagctttgacaggtccatacctgaaaacaatatcatgcgcacaatcattgagtttctgtctttcttgcatctcaaagaggccggtgccctcgaccgcctcctggatctccccgccgcagcctcctcagaagacatcgagcggtcctgagagcctcctgggcatgtttgtctgtgtgctgtaacctgaagtcaaaccttaagataatggataatcttcggccaatttatgcagagtcagccattcctgttctctttgccttgatgttgtgttgttatcatttaagattttttttttttggtaattattttgagtggcaaaataaagaatagcaattacttgc

SEQ ID NO: 8991 - protein, 123 aa, Homo sapiens; identical to SEQ ID NO: 1297

SEQ ID NO: 8992 - DNA, 646 bp, Homo sapiens
agagccctgctgccaggatcaccagcagggctagcagagttctgacactgcctttgcgttaatatagagccacaacgacccagcgcagcaaagacagcggccttcctcatgcatctcctgggaggtggtggaggccacatgcgcctgcctgcttgctcagggagaagaggccgagaaagaacactgctccaagtgcctggcagagcagatgatcctggaggaatttggaagaaataagttctccggatgggctgttgtgataccacttaaaatctctagagaactactgaacacctaaagattttctgtagcgtagatatttccccagaggcacgcgaactgtcagtctttcctaaggcccccgggagacgcaggcaatggggcctcgcaggccaggcttgcaccagcatgtcttgagttagaggacttaaaattatccagtttcttctgtgtttctacttgaattgtggaaaagctctattatccaattaacttctccataattattgttgtaatattattattgtttgtaaaacatggttcacataactagcttgtggaaaccagcaggtaaaatgaattcttaagttgacgcttttggttctgttgtaaagcaaagatgaataaaaatttccaatgtcttcaa

SEQ ID NO: 8993 - protein, 42 aa, Homo sapiens
MHLLGGGGGHMRLPACSGRRGRERTLLQVPGRADDPGGIWKK

SEQ ID NO: 8994 - DNA, 2579 bp, Homo sapiens
actgcccgggcgcctcttcccctccccccaggttcctgtccctcacccttcccccttctccaaccgccaacggccgcctgcgcctgaggcccggcccacgccccatcccgctcgctccacgctgcggcagccccggcggccccaggtgcgcggcccccgccatcccgccccgccgccctgcgccatggaggagggccctctgccgggcgggctgcccagccccgaggatgcgatggtgacggagctcttaagccccgagggtccgttcgcttcggagaacatcggcctgaaggcccccgtgaagtacgaggaggacgagttccacgtcttcaaagaagcgtacctgggcccggcggaccccaaggaacccgtcctgcacgcgttcaaccccgcgctgggcgccgactgcaagggccaggtcaaggcgaagctcgcggggggcgacagcgacggcggggagctcctcggggagtaccccgggatcccagagctcagcgcgctggaggacgtcgcgctcctgcaggccccgcagccgcccgcctgcaacgtgcacttcctgtcctcgctgctacccgcgcaccgcagcccggcggtgttgcccctgggcgcctgggtcctggaaggagcctcccacccgggcgtccgcatgatcccagttgaaatcaaggaagcaggtggtactactacaagtaataatccggaagaagcaactttgcagaatcttcttgctcaggaatcctgttgcaagttcccatcgtcccaggaactagaggatgcctcctgctgttctcttaagaaagattccaacccaatggtgatatgccaattgaaagggggcacacaaatgctatgtatagacaattctagaacaagagaactaaaagcactccatttggttcctcagtatcaagatcaaaataattatctacagtcagatgtccctaaaccaatgactgctttagtagggagatttttgccagcatcaacaaaattaaatctcattacacaacaacttgagggagccttaccatcggtagtcaacgggtctgctttcccctcgggatcaactcttccaggaccaccaaaaataactttggctgggtactgtgactgctttgccagtggggacttttgcaacaactgcaattgtaataattgttgcaacaacttgcatcatgatattgaacggtttaaagccattaaggcatgtcttggtagaaatccagaagctttccagccaaaaattgggaagggccaattgggcaatgtcaagccccagcacaacaaagggtgcaactgcaggaggtcaggctgcctgaagaattactgcgagtgctatgaggcccaaattatgtgttcttctatttgcaaatgcattggttgcaaaaattatgaagaaagcccagaacgaaagacactaatgagcatgccaaactacatgcagactggaggtttggaaggcagccattacctgccaccaacgaaattttcaggacttccaagattcagtcacgataggcggccttcctcatgcatctcctgggaggtggtggaggccacatgcgcctgcctgcttgctcagggagaagaggccgagaaagaacactgctccaagtgcctggcagagcagatgatcctggaggaatttggaaggtgcttatcacagattctccacactgagtttaaatctaagggattgaaaatggagtagagtataaagtgtgaatgcatgttgattttgtcttagtctagaaatctctagtttagaaaggatgtttaggggaacatgaggctggctctgcagcaacaaccaggctcccctgcatccctgggcccagggagtttactcagagctctctgaagatgtggcaacccatgcccccttttctgaggaggtgcatggcctgagcattgtttgtctggcccagaggagagagcttgggttcccatagtcctgggagagtgtctgcagggcggcggagggcagagcagggcaggggagggcacagcaggccctgcgaagggcagagcggggcaggggagggcagagcaggccctgcggagagctcactctggtcgactcttcctctcagagaatgttgctctggaggctgctctgcatgaaaaccctaatggtttcttgtttgtttttcaaattatttagaaataagttctccggatgggctgttgtgataccacttaaaatctctagagaactactgaacacctaaagattttctgtagcgtagatatttccccagaggcacgcgaactgtcagtctttcctaaggcccccgggagacgcaggcaatggggcctcgcaggccaggcttgcaccagcatgtcttgagttagaggacttaaaattatccagtttcttctgtgtttctacttgaattgtggaaaagctctattatccaattaacttctccataattattgttgtaatattattattgtttgtaaaacatggttcacataactagcttgtggaaaccagcaggtaaaatgaattcttaagttgacgcttttggttctgttgtaaagcaaagatgaataaaaatttccaatgtcttcaa

SEQ ID NO: 8995 - protein, 508 aa, Homo sapiens; identical to SEQ ID NO: 1301

SEQ ID NO: 8996 - DNA, 4628 bp, Homo sapiens
gatctcaaaggaagtgagtgtaaattgaattagatatttgttgaatgagtgagtaaatacttctcaagtgatacattggccaagataaaagagagtgttatcagtgcaggaggtgagtgtaagtcgggatctggcgagcacgcagatgcagtctgtgttggaacctcatagaatcctcctaccgtctggccccctccacgctgctggccttcctttctctgctgtttcagccaccagtccagaaggcacacattgtacttgctctttcacctctaagatcttccatgagaaacacccatttggccacaacttgctgtctccccaccttcccccacctttccttgactgtttattatcgtccccattttggccccttatccagcatggacctcaaggacaattcttttagcaatgcatttgctgcttctcgagaatcgtttgcttccttgccagaccccagttctgtatattctttggagtgttaccacccaaagtgtggtccatggaccagaactgttgggatcacctgggagcttgttaagaagtgcagaacctcaggttccaccccaaacctgggattcagaccccctgaatcagatttgcattttcataaaggccccaggtgacttgtgcacacagcagagtctgagaagccctgcctccgagttgacttccttcactccaagaggaccaaacattgctgaagaaactcgtggattccagcataaagttgccctggatttacaacctatggagtacataagagatgtctctgctttactttggggctaaataagcaaagggggaaaaaaagtaattttacctggtttatgcgaataattgcctcaatcctgagaactatgacatcctttctccaaaagaatgcaaaactcttcagactgacatttgaagacaggggcctaacaattaggtgtccaggtgagggcaaaagggacacctgtctcagggccttgtgagcactcccttctgtgcacgagcaagaggagagcaggaaggggtttcccgggaagaagcctggggacttaagactgattgtaaatgaggcagtgggacccaggaggctttctcagtgtcttccagccgtaatggatggtgatgacacacagtttaaactgggcacagaatggaggaagtgcagaggatgaatacaagacgcattttttttctaagactatacttcttaaagctttaaaaataaatttatttaaagatacatttccatttttggacagaggaagggacaaggatatgaggtttaattgtgatatatgcaaataatctgaaaacctaattgtatttagtactgttaatttcttcaagctactgagtagaagagaagtaggccagtgatggctttgctgcctgttcctttccctgtgaacagcctccacaggccatgctaatgagtaacataaagaaagatgagacctgggaaagcaaagaacatggacaatgcagagatgatgacattgcttttgaatttgttaaaactggttacaaaatatttttttgaatacatgaaaaatcatggttgccaacaagacttcaaatgtcaagatctgtataagaacatttctagtttatggaaatttgtcattaaatttatttcataattgatagtctataaaaatgaaaaggagttccatgacaatacccctggccagctgagtgacagctatggacggcctccagcccgtggaggccagccctgcatctttgcacacttccagacatctttgcacacttccagacaggctgtgacacacctcagcactagaccttccgaatgtcagtggattccttgtggtaataaggccagacatggttataaagggatggtgatgtaaacctttagggaaaaaaagaatcatttttatctagggggctggctgactggaactttaaaaatccttgctaattcaaaatatccttgcctttgactttgaacagcttgagggagccttaccatcggtagtcaacgggtctgctttcccctcgggatcaactcttccaggaccaccaaaaataactttggctgggtaaggattagaagcaatacattgtcactctaatgtaataatttaagagactcttggatacgttcacgattttcttctatactataaaatgagcttcactgcacaccttcatgacttctgagaaatgtttttaccatcagcaatgccactaacggtgttgctgtctgtgtctggtttcactggggctgcaaaggctgctggaaagtctggcccataacctgcatctgtccctgtcctcctgtccgctgtcctatgttggtgtttctgaggcttgttgccatttatagctctttgtcttcattccatgttgattcaaactgtactggcctctcttttttgctgtcgtccgtggaaataatggtgtggcagccatgcagcatgaacggggggctgcagagtgccctccagctgcctccgcccgctgccttccatgctgagttggctcgagctctatggcaggtgctaatgcatgatctgtcttcacatctccaggtggacataggctgcacttatctgggacctcatcttgctatttcttgcctgtcttgtgtttataatcttgctatttcttgcctgtcttgtgtttataattgttgctaattaaactaatcagctggttgaaattatcaggttaacatttatgtattaacagtggtttgggcaaccctctccattcgttgagccctgtagttgattatggagatcagcatattcctgcctccaagaggtgtttgtttgtttgtttgttttttcttgttttttgtttgtttgtttgttttgtttttttgagacggactcttgctctgtcacccaggctggaatacaatggcatgatctctgctcactgcaacctccgcctcctgggttcaagcaattctccttcctcagcctcccgagtagctgggaccacaggcgcataccactataccaggctaatttttgtattttttagtagagactgggttttaccatgttggccaggctggtcttgaaatactgacctcagatgatccgcccatctcagcctcccaaagtgctgggattacaggcgtgcccggcctgcctgcaggagttctttgggcccacagtctaaggcaaacacataccctgggcctgagagacagcagtcaaacaccttacaggatacagcccgcagcctccagtgctttccaggctcctgcagagttctgccatcgggcatggcttcgtgatggccttggtaagtgtgaggagagtggtttggggctggaatgaaaggccgtgaatctggaaacacactggaaccgatcaacgctatcagccctcatggtcgctgaagggcgttggttgctcctgggcaccgctgcttcagtttctgcagtggctctttcagctgttgtaattctgtgcctaggctgttgacaacttttgctgagttggacagaataagactgtgggccatgctgcttgcttcactctctgggtgtgatggatcggtgagggtgcagttgctatgattgtaattggtcatctcatcatggctgttaacatttctggaccaaacaaaaatgacttcagctacttccagattctgctgatacattacacaggatgatctaaaaggctacagttctgaagatactcatctttcttgtaatctgggggcatctggtcaatagtattgcctctgtgctgtattgtgtctagaacattcaaggacatttgatacttctcatactttaattgcgtgctctcccagttgcagcaccctctgaggcttctatgtgttgcagccgatgggcatttgcacagagcagcagtcatgacagcgttttcagggcagctatttctccttttcccccttttcctctcccccggcttcccattctcctcctcctccttcctcttctcgtcccctcctcctcctctttgttctcctccccctgctcttcttcctctctccttttcctccttctgtgtctatactagattattttcaatcagtcacatgtttttctttattttgaatgttacaaaatatttctctattgtaaacggtgtgccaggaaaaacatgagatgtgtatttgtattttttatgcacataattacttaatccaatgcctctccacttaattgggcctgatgatttttatctcgacatctgcaatactgatgatatactggaatctctaccaatttatttttggtggtaagaaagcagtcagagaacgttttgctggttatttcattccgtgtgagttcccaaccaagactgtcagcccagtgtggttcagccatatctaacctatagaggccatagaagcagttcagcttaggctggaggccagcaggctgagtgtgcgagctgacccgatggtcatttgttagggttggggggtgaactggctaacttattaactagcttatcatattaataaaaactctttaatacaaatccttgtcctgacactctgtagctttaataatcctattaccaatctggtaataaatgtgaattctgacacattgttgatgctactggttttagtaacataatgaacatcataataaagaatattcaagagtc

SEQ ID NO: 8997 - protein, 126 aa, Homo sapiens [sequence omitted]

SEQ ID NO: 8998 - DNA, 3592 bp, Homo sapiens
actgcccgggcgcctcttcccctccccccaggttcctgtccctcacccttcccccttctccaaccgccaacggccgcctgcgcctgaggcccggcccacgccccatcccgctcgctccacgctgcggcagccccggcggccccaggtgcgcggcccccgccatcccgccccgccgccctgcgccatggaggagggccctctgccgggcgggctgcccagccccgaggatgcgatggtgacggagctcttaagccccgagggtccgttcgcttcggagaacatcggcctgaaggcccccgtgaagtacgaggaggacgagttccacgtcttcaaagaagcgtacctgggcccggcggaccccaaggaacccgtcctgcacgcgttcaaccccgcgctgggcgccgactgcaagggccaggtcaaggcgaagctcgcggggggcgacagcgacggcggggagctcctcggggagtaccccgggatcccagagctcagcgcgctggaggacgtcgcgctcctgcaggccccgcagccgcccgcctgcaacgtgcacttcctgtcctcgctgctacccgcgcaccgcagcccggcggtgttgcccctgggcgcctgggtcctggaaggagcctcccacccgggcgtccgcatgatcccagttgaaatcaaggaagcaggtggtactactacaagtaataatccggaagaagcaactttgcagaatcttcttgctcaggaatcctgttgcaagttcccatcgtcccaggaactagaggatgcctcctgctgttctcttaagaaagattccaacccaatggtgatatgccaattgaaagggggcacacaaatgctatgtatagacaattctagaacaagagaactaaaagcactccatttggttcctcagtatcaagatcaaaataattatctacagtcagcttgagggagccttaccatcggtagtcaacgggtctgctttcccctcgggatcaactcttccaggaccaccaaaaataactttggctgggtaaggattagaagcaatacattgtcactctaatgtaataatttaagagactcttggatacgttcacgattttcttctatactataaaatgagcttcactgcacaccttcatgacttctgagaaatgtttttaccatcagcaatgccactaacggtgttgctgtctgtgtctggtttcactggggctgcaaaggctgctggaaagtctggcccataacctgcatctgtccctgtcctcctgtccgctgtcctatgttggtgtttctgaggcttgttgccatttatagctctttgtcttcattccatgttgattcaaactgtactggcctctcttttttgctgtcgtccgtggaaataatggtgtggcagccatgcagcatgaacggggggctgcagagtgccctccagctgcctccgcccgctgccttccatgctgagttggctcgagctctatggcaggtgctaatgcatgatctgtcttcacatctccaggtggacataggctgcacttatctgggacctcatcttgctatttcttgcctgtcttgtgtttataatcttgctatttcttgcctgtcttgtgtttataattgttgctaattaaactaatcagctggttgaaattatcaggttaacatttatgtattaacagtggtttgggcaaccctctccattcgttgagccctgtagttgattatggagatcagcatattcctgcctccaagaggtgtttgtttgtttgtttgttttttcttgttttttgtttgtttgtttgttttgtttttttgagacggactcttgctctgtcacccaggctggaatacaatggcatgatctctgctcactgcaacctccgcctcctgggttcaagcaattctccttcctcagcctcccgagtagctgggaccacaggcgcataccactataccaggctaatttttgtattttttagtagagactgggttttaccatgttggccaggctggtcttgaaatactgacctcagatgatccgcccatctcagcctcccaaagtgctgggattacaggcgtgcccggcctgcctgcaggagttctttgggcccacagtctaaggcaaacacataccctgggcctgagagacagcagtcaaacaccttacaggatacagcccgcagcctccagtgctttccaggctcctgcagagttctgccatcgggcatggcttcgtgatggccttggtaagtgtgaggagagtggtttggggctggaatgaaaggccgtgaatctggaaacacactggaaccgatcaacgctatcagccctcatggtcgctgaagggcgttggttgctcctgggcaccgctgcttcagtttctgcagtggctctttcagctgttgtaattctgtgcctaggctgttgacaacttttgctgagttggacagaataagactgtgggccatgctgcttgcttcactctctgggtgtgatggatcggtgagggtgcagttgctatgattgtaattggtcatctcatcatggctgttaacatttctggaccaaacaaaaatgacttcagctacttccagattctgctgatacattacacaggatgatctaaaaggctacagttctgaagatactcatctttcttgtaatctgggggcatctggtcaatagtattgcctctgtgctgtattgtgtctagaacattcaaggacatttgatacttctcatactttaattgcgtgctctcccagttgcagcaccctctgaggcttctatgtgttgcagccgatgggcatttgcacagagcagcagtcatgacagcgttttcagggcagctatttctccttttcccccttttcctctcccccggcttcccattctcctcctcctccttcctcttctcgtcccctcctcctcctctttgttctcctccccctgctcttcttcctctctccttttcctccttctgtgtctatactagattattttcaatcagtcacatgtttttctttattttgaatgttacaaaatatttctctattgtaaacggtgtgccaggaaaaacatgagatgtgtatttgtattttttatgcacataattacttaatccaatgcctctccacttaattgggcctgatgatttttatctcgacatctgcaatactgatgatatactggaatctctaccaatttatttttggtggtaagaaagcagtcagagaacgttttgctggttatttcattccgtgtgagttcccaaccaagactgtcagcccagtgtggttcagccatatctaacctatagaggccatagaagcagttcagcttaggctggaggccagcaggctgagtgtgcgagctgacccgatggtcatttgttagggttggggggtgaactggctaacttattaactagcttatcatattaataaaaactctttaatacaaatccttgtcctgacactctgtagctttaataatcctattaccaatctggtaataaatgtgaattctgacacattgttgatgctactggttttagtaacataatgaacatcataataaagaatattcaagagtc

SEQ ID NO: 8999 - protein, 251 aa, Homo sapiens
MEEGPLPGGLPSPEDAMVTELLSPEGPFASENIGLKAPVKYEEDEFHVFKEAYLGPADPKEPVLHAFNPALGADCKGQVKAKLAGGDSDGGELLGEYPGIPELSALEDVALLQAPQPPACNVHFLSSLLPAHRSPAVLPLGAWVLEGASHPGVRMIPVEIKEAGGTTTSNNPEEATLQNLLAQESCCKFPSSQELEDASCCSLKKDSNPMVICQLKGGTQMLCIDNSRTRELKALHLVPQYQDQNNYLQSA

SEQ ID NO: 9000 - DNA, 3669 bp, Homo sapiens
actgcccgggcgcctcttcccctccccccaggttcctgtccctcacccttcccccttctccaaccgccaacggccgcctgcgcctgaggcccggcccacgccccatcccgctcgctccacgctgcggcagccccggcggccccaggtgcgcggcccccgccatcccgccccgccgccctgcgccatggaggagggccctctgccgggcgggctgcccagccccgaggatgcgatggtgacggagctcttaagccccgagggtccgttcgcttcggagaacatcggcctgaaggcccccgtgaagtacgaggaggacgagttccacgtcttcaaagaagcgtacctgggcccggcggaccccaaggaacccgtcctgcacgcgttcaaccccgcgctgggcgccgactgcaagggccaggtcaaggcgaagctcgcggggggcgacagcgacggcggggagctcctcggggagtaccccgggatcccagagctcagcgcgctggaggacgtcgcgctcctgcaggccccgcagccgcccgcctgcaacgtgcacttcctgtcctcgctgctacccgcgcaccgcagcccggcggtgttgcccctgggcgcctgggtcctggaaggagcctcccacccgggcgtccgcatgatcccagttgaaatcaaggaagcaggtggtactactacaagtaataatccggaagaagcaactttgcagaatcttcttgctcaggaatcctgttgcaagttcccatcgtcccaggaactagaggatgcctcctgctgttctcttaagaaagattccaacccaatggtgatatgccaattgaaagggggcacacaaatgctatgtatagacaattctagaacaagagaactaaaagcactccatttggttcctcagtatcaagatcaaaataattatctacagtcagatgtccctaaaccaatgactgctttagtagggagatttttgccagcatcaacaaaattaaatctcattacacaacaacttgagggagccttaccatcggtagtcaacgggtctgctttcccctcgggatcaactcttccaggaccaccaaaaataactttggctgggtaaggattagaagcaatacattgtcactctaatgtaataatttaagagactcttggatacgttcacgattttcttctatactataaaatgagcttcactgcacaccttcatgacttctgagaaatgtttttaccatcagcaatgccactaacggtgttgctgtctgtgtctggtttcactggggctgcaaaggctgctggaaagtctggcccataacctgcatctgtccctgtcctcctgtccgctgtcctatgttggtgtttctgaggcttgttgccatttatagctctttgtcttcattccatgttgattcaaactgtactggcctctcttttttgctgtcgtccgtggaaataatggtgtggcagccatgcagcatgaacggggggctgcagagtgccctccagctgcctccgcccgctgccttccatgctgagttggctcgagctctatggcaggtgctaatgcatgatctgtcttcacatctccaggtggacataggctgcacttatctgggacctcatcttgctatttcttgcctgtcttgtgtttataatcttgctatttcttgcctgtcttgtgtttataattgttgctaattaaactaatcagctggttgaaattatcaggttaacatttatgtattaacagtggtttgggcaaccctctccattcgttgagccctgtagttgattatggagatcagcatattcctgcctccaagaggtgtttgtttgtttgtttgttttttcttgttttttgtttgtttgtttgttttgtttttttgagacggactcttgctctgtcacccaggctggaatacaatggcatgatctctgctcactgcaacctccgcctcctgggttcaagcaattctccttcctcagcctcccgagtagctgggaccacaggcgcataccactataccaggctaatttttgtattttttagtagagactgggttttaccatgttggccaggctggtcttgaaatactgacctcagatgatccgcccatctcagcctcccaaagtgctgggattacaggcgtgcccggcctgcctgcaggagttctttgggcccacagtctaaggcaaacacataccctgggcctgagagacagcagtcaaacaccttacaggatacagcccgcagcctccagtgctttccaggctcctgcagagttctgccatcgggcatggcttcgtgatggccttggtaagtgtgaggagagtggtttggggctggaatgaaaggccgtgaatctggaaacacactggaaccgatcaacgctatcagccctcatggtcgctgaagggcgttggttgctcctgggcaccgctgcttcagtttctgcagtggctctttcagctgttgtaattctgtgcctaggctgttgacaacttttgctgagttggacagaataagactgtgggccatgctgcttgcttcactctctgggtgtgatggatcggtgagggtgcagttgctatgattgtaattggtcatctcatcatggctgttaacatttctggaccaaacaaaaatgacttcagctacttccagattctgctgatacattacacaggatgatctaaaaggctacagttctgaagatactcatctttcttgtaatctgggggcatctggtcaatagtattgcctctgtgctgtattgtgtctagaacattcaaggacatttgatacttctcatactttaattgcgtgctctcccagttgcagcaccctctgaggcttctatgtgttgcagccgatgggcatttgcacagagcagcagtcatgacagcgttttcagggcagctatttctccttttcccccttttcctctcccccggcttcccattctcctcctcctccttcctcttctcgtcccctcctcctcctctttgttctcctccccctgctcttcttcctctctccttttcctccttctgtgtctatactagattattttcaatcagtcacatgtttttctttattttgaatgttacaaaatatttctctattgtaaacggtgtgccaggaaaaacatgagatgtgtatttgtattttttatgcacataattacttaatccaatgcctctccacttaattgggcctgatgatttttatctcgacatctgcaatactgatgatatactggaatctctaccaatttatttttggtggtaagaaagcagtcagagaacgttttgctggttatttcattccgtgtgagttcccaaccaagactgtcagcccagtgtggttcagccatatctaacctatagaggccatagaagcagttcagcttaggctggaggccagcaggctgagtgtgcgagctgacccgatggtcatttgttagggttggggggtgaactggctaacttattaactagcttatcatattaataaaaactctttaatacaaatccttgtcctgacactctgtagctttaataatcctattaccaatctggtaataaatgtgaattctgacacattgttgatgctactggttttagtaacataatgaacatcataataaagaatattcaagagtc

SEQ ID NO: 9001 - protein, 306 aa, Homo sapiens; identical to SEQ ID NO: 1299

SEQ ID NO: 9002 - DNA, 657 bp, Homo sapiens
ctttgaacagcttgagggagccttaccatcggtagtcaacgggtctgctttcccctcgggatcaactcttccaggaccaccaaaaataactttggctgggctggaatacaatggcatgatctctgctcactgcaacctccgcctcctgggttcaagcaattctccttcctcagcctcccgagtagctgggaccacaggcgcataccactataccaggctaatttttgtattttttagtagagactgggttttaccatgttggccaggctggtcttgaaatactgacctcagatgatccgcccatctcagcctcccaaagtgctgggattacaggcgtgcccggcctgcctgcaggagttctttgggcccacagtctaaggcaaacacataccctgggcctgagagacagcagtcaaacaccttacaggatacagcccgcagcctccagtgctttccaggctcctgcagagttctgccatcgggcatggcttcgtgatggccttggtaagtgtgaggagagtggtttggggctggaatgaaaggccgtgaatctggaaacacactggaaccgatcaacgctatcagccctcatggtcgctgaagggcgttggttgctcctgggcaccgctgcttcagtttctgcagtggctctttcag

SEQ ID NO: 9003 - protein, 53 aa, Homo sapiens
MISAHCNLRLLGSSNSPSSASRVAGTTGAYHYTRLIFVFFSRDWVLPCWPGWS

SEQ ID NO: 9004 - DNA, 2624 bp, Homo sapiens
agccaatccgctgctgccggcgtcgggtgcgctcggcctcgcccgcggccctccttccccggctcccgctcgccgctcgttcactccaccgccgccgccgccgccgccgctgccgctgccgctgccgcacctccgtagctgactcggtactctctgaagatggcagaagctcaccaagctgtggcctttcagttcacggtcactccggacgggattgacctgcggctgagccatgaagctcttagacaaatctatctctctggacttcattcctggaaaaagaagttcatcagattcaagaacggcatcatcactggcgtgtacccggcaagcccctccagttggcttatcgtggtggtgggcgtgatgacaacgatgtacgccaagatcgacccctcgttaggaataattgcaaaaatcaatcggactctggaaacggccaactgcatgtccagccagacgaagaacgtggtcagcggcgtgctgtttggcaccggcctgtgggtggccctcatcgtcaccatgcgctactccctgaaagtgctgctctcctaccacgggtggatgttcactgagcacggcaagatgagtcgtgccaccaagatctggatgggtatggtcaagatcttttcaggccgaaaacccatgttgtacagcttccagacatcgctgcctcgcctgccggtcccggctgtcaaagacactgtgaacaggtatctacagtcggtgaggcctcttatgaaggaagaagacttcaaacggatgacagcacttgctcaagattttgctgtcggtcttggaccaagattacagtggtatttgaagttaaaatcctggtgggctacaaattacgtgagcgactggtgggaggagtacatctacctccgaggacgagggccgctcatggtgaacagcaactattatgccatggatctgctgtatatccttccaactcacattcaggcagcaagagccggcaacgccatccatgccatcctgctttacaggcgcaaactggaccgggaggaaatcaaaccaattcgtcttttgggatccacgattccactctgctccgctcagtgggagcggatgtttaatacttcccggatcccaggagaggagacagacaccatccagcacatgagagacagcaagcacatcgtcgtgtaccatcgaggacgctacttcaaggtctggctctaccatgatgggcggctgctgaagccccgggagatggagcagcagatgcagaggatcctggacaatacctcggagcctcagcccggggaggccaggctggcagccctcaccgcaggagacagagttccctgggccaggtgtcgtcaggcctattttggacgtgggaaaaataagcagtctcttgatgctgtggagaaagcagcgttctttgtgacgttagatgaaactgaagaaggatacagaagtgaagacccggatacgtcaatggacagctacgccaaatctctactacacggccgatgttacgacaggtggtttgacaagtcgttcacgtttgttgtcttcaaaaacgggaagatgggcctcaacgctgaacactcctgggcagatgcgccgatcgtggcccacctttgggagtacgtcatgtccattgacagcctccagctgggctatgcggaggatgggcactgcaaaggcgacatcaatccgaacattccgtaccccaccaggctgcagtgggacatcccgggggaatgtcaagaggttatagagacctccctgaacaccgcaaatcttctggcaaacgacgtggatttccattccttcccattcgtagcctttggtaaaggaatcatcaagaaatgtcgcacgagcccagacgcctttgtgcagctggccctccagctggcgcactacaaggacatgggcaagttttgcctcacatacgaggcctccatgacccggctcttccgagaggggaggacggagaccgtgcgctcctgcaccactgagtcatgcgacttcgtgcgggccatggtggacccggcccagacggtggaacagaggctgaagttgttcaagttggcgtctgagaagcatcagcatatgtatcgcctcgccatgaccggctctgggatcgatcgtcacctcttctgcctttacgtggtgtctaaatatctcgctgtggagtcccctttccttaaggaagttttatctgagccttggagattatcaacaagccagacccctcagcagcaagtggagctgtttgacttggagaataacccagagtacgtgtccagcggagggggctttggaccggttgctgatgacggctatggtgtgtcgtacatccttgtgggagagaacctcatcaatttccacatttcttccaagttctcttgccctgagacggggattataagtcaaggaccaagttcagatacttgagacaaagtggaaagtctcagcatatggaaacaaggccttggaggagaccatggacatcaccaagttcatgtgctgggctggaaagaaaagcctgttgattttcacttgctgtgcatttattcatccattccattgcctcaatgctgagaacagtgcctgacacataaaagatgctcaataaatatgttaaaagt

SEQ ID NO: 9005 - protein, 756 aa, Homo sapiens; identical to SEQ ID NO: 1303

SEQ ID NO: 9006 - DNA, 4504 bp, Homo sapiens
agccaatccgctgctgccggcgtcgggtgcgctcggcctcgcccgcggccctccttccccggctcccgctcgccgctcgttcactccaccgccgccgccgccgccgccgctgccgctgccgctgccgcacctccgtagctgactcggtactctctgaagatggcagaagctcaccaagctgtggcctttcagttcacggtcactccggacgggattgacctgcggctgagccatgaagctcttagacaaatctatctctctggacttcattcctggaaaaagaagttcatcagattcaagaacggcatcatcactggcgtgtacccggcaagcccctccagttggcttatcgtggtggtgggcgtgatgacaacgatgtacgccaagatcgacccctcgttaggaataattgcaaaaatcaatcggactctggaaacggccaactgcatgtccagccagacgaagaacgtggtcagcggcgtgctgtttggcaccggcctgtgggtggccctcatcgtcaccatgcgctactccctgaaagtgctgctctcctaccacgggtggatgttcactgagcacggcaagatgagtcgtgccaccaagatctggatgggtatggtcaagatcttttcaggccgaaaacccatgttgtacagcttccagacatcgctgcctcgcctgccggtcccggctgtcaaagacactgtgaacaggtatctacagtcggtgaggcctcttatgaaggaagaagacttcaaacggatgacagcacttgctcaagattttgctgtcggtcttggaccaagattacagtggtatttgaagttaaaatcctggtgggctacaaattacgtgagcgactggtgggaggagtacatctacctccgaggacgagggccgctcatggtgaacagcaactattatgccatggatctgctgtatatccttccaactcacattcaggcagcaagagccggcaacgccatccatgccatcctgctttacaggcgcaaactggaccgggaggaaatcaaaccaattcgtcttttgggatccacgattccactctgctccgctcagtgggagcggatgtttaatacttcccggatcccaggagaggagacagacaccatccagcacatgagagacagcaagcacatcgtcgtgtaccatcgaggacgctacttcaaggtctggctctaccatgatgggcggctgctgaagccccgggagatggagcagcagatgcagaggatcctggacaatacctcggagcctcagcccggggaggccaggctggcagccctcaccgcaggagacagagttccctgggccaggtgtcgtcaggcctattttggacgtgggaaaaataagcagtctcttgatgctgtggagaaagcagcgttctttgtgacgttagatgaaactgaagaaggatacagaagtgaagacccggatacgtcaatggacagctacgccaaatctctactacacggccgatgttacgacaggtggtttgacaagtcgttcacgtttgttgtcttcaaaaacgggaagatgggcctcaacgctgaacactcctgggcagatgcgccgatcgtggcccacctttgggagtacgtcatgtccattgacagcctccagctgggctatgcggaggatgggcactgcaaaggcgacatcaatccgaacattccgtaccccaccaggctgcagtgggacatcccgggggaatgtcaagaggttatagagacctccctgaacaccgcaaatcttctggcaaacgacgtggatttccattccttcccattcgtagcctttggtaaaggaatcatcaagaaatgtcgcacgagcccagacgcctttgtgcagctggccctccagctggcgcactacaaggacatgggcaagttttgcctcacatacgaggcctccatgacccggctcttccgagaggggaggacggagaccgtgcgctcctgcaccactgagtcatgcgacttcgtgcgggccatggtggacccggcccagacggtggaacagaggctgaagttgttcaagttggcgtctgagaagcatcagcatatgtatcgcctcgccatgaccggctctgggatcgatcgtcacctcttctgcctttacgtggtgtctaaatatctcgctgtggagtcccctttccttaaggaagttttatctgagccttggagattatcaacaagccagacccctcagcagcaagtggagctgtttgacttggagaataacccagagtacgtgtccagcggagggggctttggaccggttgctgatgacggctatggtgtgtcgtacatccttgtgggagagaacctcatcaatttccacatttcttccaagttctcttgccctgagacggattctcatcgctttggaaggcacctgaaagaagcaatgactgacatcatcactttgtttggtctcagttctaattccaaaaagtaattccactggagctgctgggaaggaaaacgagctcttctgatgcaaaccaaatgaaaaataggcattaatcctgaccttagctcgggatgaaacactgctcttaaaaaaactcagttttccttccagaaaatgtgggtgtttttttttcctagaacagtatctctcccctgtgaagcataaccccactacttccagacttgccctcccttgggggacatctgataaagtctcccctgatgtctccgcatcggcttggatttattaagggatgcaaatcttgttgagttaatgaaggaattagtagggttgtggcttcacacacagtggaatggaaatggtgtgctttctcagtggcaaccgaaggcctagtgcttaagggcatttagcatcatccaagcagggtaaacttttgttttgttaaaagaaaaatgtgttattcaagttggtgtccccagttgtagctaacacatctggaatgcactaaccaaaatgctgtgctttggagacctgcttttgtcaccgtgggtaaccgttcccgtctggtccagtagcctgtgtttgcctctccacatttgaagcaagcaggatgcaaggtcttcagttttactgaccttgtatgtcttcaagtcttcacaacccagtgccttaaaaatgaaaggccctaaatgtaagggagatggagagaaagatttattttgtagagtctttgggtggaattgtgggtatactgttcccttcacaattgactgagtatggataaccgtacataagcatttgctacaccccaccagccccctccccctcagaaacaccagttccttcccaagggcagctgtgccagactcccctcccgggactgccttcttgtcatcataagcaacaaaagaaataacaggcacatgtcataaaaggggagcaagggccgtgatggtcagataattcactcaagaataaaacatgacacgtgcctcaggaggatctctttcccaaagtgacagcaaggagggcagggcatcggccaccaagcggggactagcaagtgaggaaggggagggcagcccaccgtggtgaggagagagtggctccacgaccccaagggatggccttctcctcccacccggtgaggggaaagactcaccagagggtgatggagacagtatgccggctcaccttggtgaccagccaagatgtctcaagtgacagtgctaggtgttcacccagcctgtccttcagataggagtgccttcacgaaagcgtctcatggaccacaaagcaattatgcactgagtcatcttcagtatttaatgcaaaaatgaagcatcatggaatgaaattcccactgtctgtcatgacaagcttagctgtccattgttttaaattgtgtatttatttttttgaccacttggttctagttgggcctgactccttcagagtgctgcaccccgatagtacaacagcgatggctgaactgttggagtcgatggaaggtgcttgccggagaacacgtgccgcccctgactgtccgtcaagcaggcagcggggatgtagctctctctgccctgggcaagaatagcacttcccgttaaaagccagcagccggcgtcagtccctatcagagccagctagatcatgcactgttgaccactgagcaatctgtgttacactagagttcacagggcattttgagtgtagacgtgagtgcttaaacatatttgggtttctctctcaggttttaaatgtttcaaatgtaattgttgctcatcagtgcagttatcaatgcaattttatattccttgaggggagaaagaggggtcttattgtacatgtccaaggggggtgataagagtattatctgtttaatttaattggaacaaaccattgtcttaacgcagccatggtttgaatttgttatcttgggctgaccggtgcatgtaaatacagtatgctctttggatgtaaatcttagaaatgcagtgtgaatgtaggttatcattaataaaacattaaccccagtctactacaa

SEQ ID NO: 9007 - protein, 773 aa, Homo sapiens; identical to SEQ ID NO: 1305

SEQ ID NO: 9008 - DNA, 217 bp, Homo sapiens
ggataaccgtacataagcatttgctacaccccaccagccccctccccctcagaaacaccagttccttcccaagggcagctgtgccagactcccctcccgggactgccttcttgggctgaccggtgcatgtaaatacagtatgctctttggatgtaaatcttagaaatgcagtgtgaatgtaggttatcattaataaaacattaaccccagtctacta

SEQ ID NO: 9009 - protein, 38 aa, Homo sapiens
ITVHKHLLHPTSPLPLRNTSSFPRAAVPDSPPGTAFLG

SEQ ID NO: 9010 - DNA, 1153 bp, Homo sapiens
ggattctcatcgctttggaaggcacctgaaagaagcaatgactgacatcatcactttgtttggtctcagttctaattccaaaaagtaattccactggagctgctgggaaggaaaacgagctcttctgatgcaaaccaaatgaaaaataggcattaatcctgaccttagctcgggatgaaacactgctcttaaaaaaactcagttttccttccagaaaatgtgggtgtttttttttcctagaacagtatctctcccctgtgaagcataaccccactacttccagacttgccctcccttgggggacatctgataaagtctcccctgatgtctccgcatcggcttggatttattaagggatgcaaatcttgttgagttaatgaaggaattagtagggttgtggcttcacacacagtggaatggaaatggtgtgctttctcagtggcaaccgaaggcctagtgcttaagggcatttagcatcatccaagcagggtaaacttttgttttgttaaaagaaaaatgtgttattcaagttggtgtccccagttgtagctaacacatctggaatgcactaaccaaaatgctgtgctttggagacctgcttttgtcaccgtgggtaaccgttcccgtctggtccagtagcctgtgtttgcctctccacatttgaagcaagcaggatgcaaggtcttcagttttactgaccttgtatgtcttcaagtcttcacaacccagtgccttaaaaatgaaaggccctaaatgtaagggagatggagagaaagatttattttgtagagtctttgggtggaattgtgggtatactgttcccttcacaattgactgagtatggataaccgtacataagcatttgctacaccccaccagccccctccccctcagaaacaccagttccttcccaagggcagctgtgccagactcccctcccgggactgcttattgtacatgtccaaggggggtgataagagtattatctgtttaatttaattggaacaaaccattgtcttaacgcagccatggtttgaatttgttatcttgggctgaccggtgcatgtaaatacagtatgctctttggatgtaaatcttagaaatgcagtgtgaatgtaggttatcattaataaaacattaaccccagtctact

SEQ ID NO: 9011 - protein, 32 aa, Homo sapiens
MKGPKCKGDGEKDLFCRVFGWNCGYTVPFTID

SEQ ID NO: 9012 - DNA, 2607 bp, Homo sapiens
agccaatccgctgctgccggcgtcgggtgcgctcggcctcgcccgcggccctccttccccggctcccgctcgccgctcgttcactccaccgccgccgccgccgccgccgctgccgctgccgctgccgcacctccgtagctgactcggtactctctgaagatggcagaagctcaccaagctgtggcctttcagttcacggtcactccggacgggattgacctgcggctgagccatgaagctcttagacaaatctatctctctggacttcattcctggaaaaagaagttcatcagattcaagaacggcatcatcactggcgtgtacccggcaagcccctccagttggcttatcgtggtggtgggcgtgatgacaacgatgtacgccaagatcgacccctcgttaggaataattgcaaaaatcaatcggactctggaaacggccaactgcatgtccagccagacgaagaacgtggtcagcggcgtgctgtttggcaccggcctgtgggtggccctcatcgtcaccatgcgctactccctgaaagtgctgctctcctaccacgggtggatgttcactgagcacggcaagatgagtcgtgccaccaagatctggatgggtatggtcaagatcttttcaggccgaaaacccatgttgtacagcttccagacatcgctgcctcgcctgccggtcccggctgtcaaagacactgtgaacaggtatctacagtcggtgaggcctcttatgaaggaagaagacttcaaacggatgacagcacttgctcaagattttgctgtcggtcttggaccaagattacagtggtatttgaagttaaaatcctggtgggctacaaattacgtgagcgactggtgggaggagtacatctacctccgaggacgagggccgctcatggtgaacagcaactattatgccatggatctgctgtatatccttccaactcacattcaggcagcaagagccggcaacgccatccatgccatcctgctttacaggcgcaaactggaccgggaggaaatcaaaccaattcgtcttttgggatccacgattccactctgctccgctcagtgggagcggatgtttaatacttcccggatcccaggagaggagacagacaccatccagcacatgagagacagcaagcacatcgtcgtgtaccatcgaggacgctacttcaaggtctggctctaccatgatgggcggctgctgaagccccgggagatggagcagcagatgcagaggatcctggacaatacctcggagcctcagcccggggaggccaggctggcagccctcaccgcaggagacagagttccctgggccaggtgtcgtcaggcctattttggacgtgggaaaaataagcagtctcttgatgctgtggagaaagcagcgttctttgtgacgttagatgaaactgaagaaggatacagaagtgaagacccggatacgtcaatggacagctacgccaaatctctactacacggccgatgttacgacaggtggtttgacaagtcgttcacgtttgttgtcttcaaaaacgggaagatgggcctcaacgctgaacactcctgggcagatgcgccgatcgtggcccacctttgggagtacgtcatgtccattgacagcctccagctgggctatgcggaggatgggcactgcaaaggcgacatcaatccgaacattccgtaccccaccaggctgcagtgggacatcccgggggaatgtcaagaggttatagagacctccctgaacaccgcaaatcttctggcaaacgacgtggatttccattccttcccattcgtagcctttggtaaaggaatcatcaagaaatgtcgcacgagcccagacgcctttgtgcagctggccctccagctggcgcactacaaggacatgggcaagttttgcctcacatacgaggcctccatgacccggctcttccgagaggggaggacggagaccgtgcgctcctgcaccactgagtcatgcgacttcgtgcgggccatggtggacccggcccagacggtggaacagaggctgaagttgttcaagttggcgtctgagaagcatcagcatatgtatcgcctcgccatgaccggctctgggatcgatcgtcacctcttctgcctttacgtggtgtctaaatatctcgctgtggagtcccctttccttaaggaagttttatctgagccttggagattatcaacaagccagacccctcagcagcaagtggagctgtttgacttggagaataacccagagtacgtgtccagcggagggggctttggaccggttgctgatgacggctatggtgtgtcgtacatccttgtgggagagaacctcatcaatttccacatttcttccaagttctcttgccctgagacggattctcatcgctttggaaggcacctgaaagaagcaatgactgacatcatcactttgtttggtctcagttctaattccaaaaagtaattccactggagctgctgggaaggaaaacgagctcttctgatgcaaaccaaatgaaaaataggcattaatcctgaccttagctcgggatgaaacactgctcttaaaaaaactcagttttccttccag

SEQ ID NO: 9013 - protein, 773 aa, Homo sapiens; identical to SEQ ID NO: 1305

SEQ ID NO: 9014 - DNA, 622 bp, Homo sapiens
actcgcccaacgcttgagatcttatcgggaagctgctggtcaccagctccatttctatctactgagagactgcctttccctggcaccggctgtgacctattattattttagagagacagttcacaaccacctgaccatcactgatggtcgcgtgatattcccagtgtgtgtcggaggaagccctctcctggcctgctcatgtcagacccgctacctgctataacattgcagctgctcctccggggtcagggagccatgcccctaacttactagggcttctgggtcaggaaaacgtttgtgtacttcccagtaccgagtttatagctgcactaaaaaccagcctccaatttccttctgggtgtgcgtcagtacttttctcccctcgttccgtaaaacctttttcttctttctctcaagtgtcaagaggttatagagacctccctgaacaccgcaaatcttctggcaaacgacgtggatttccattccttcccattcgtagcctttggtaaaggaatcatcaagaaatgtcgcacgagcccagacgcctttgtgcagctggccctccagctggcgcactacaaggacatgggcaagttttgcctcacatacgaggcctccatga

SEQ ID NO: 9015 - protein, 31 aa, Homo sapiens
MSHEPRRLCAAGPPAGALQGHGQVLPHIRGL

SEQ ID NO: 9016 - DNA, 1630 bp, Homo sapiens
tgctctggctcctctgggttccagggacgctggggccggagctgctgccgccgtctacacggtcccctcatttgacgggttcgcctcctagcagcgcctgggcgagtgacatctgggccggaccagctggtgctgcgcggcgcaggtctctcggtttcctcatctgctgcctctccagacttctgccagaacattgcacgcgacagtttcaggcacagaactgactggcagcaggggctgctccacgagtgggaatttgctccagcacttcacggactgcaagcgaggcacttgctaactcttggcctccctgaacataggaaacccacctgggcagccatggaatgggacaatggcacaggccaggctctgggcttgccacccaccacctgtgtctaccgcgagaacttcaagcaactgctgctgccacctgtgtattcggcggtgctggcggctggcctgccgctgaacatctgtgtcattacccagatctgcacgtcccgccgggccctgacccgcacggccgtgtacaccctaaaccttgctctggctgacctgctatatgcctgctccctgcccctgctcatctacaactatgcccaaggtgatcactggccctttggcgacttcgcctgccgcctggtccgcttcctcttctatgccaacctgcacggcagcatcctcttcctcacctgcatcagcttccagcgctacctgggcatctgccacccgctggccccctggcacaaacgtgggggccgccgggctgcctggctagtgtgtgtagccgtgtggctggccgtgacaacccagtgcctgcccacagccatcttcgctgccacaggcatccagcgtaaccgcactgtctgctatgacctcagcccgcctgccctggccacccactatatgccctatggcatggctctcactgtcatcggcttcctgctgccctttgctgccctgctggcctgctactgtctcctggcctgccgcctgtgccgccaggatggcccggcagagcctgtggcccaggagcggcgtggcaaggcggcccgcatggccgtggtggtggctgctgcctttgccatcagcttcctgccttttcacatcaccaagacagcctacctggcagtgcgctcgacgccgggcgtcccctgcactgtattggaggcctttgcagcggcctacaaaggcacgcggccgtttgccagtgccaacagcgtgctggaccccatcctcttctacttcacccagaagaagttccgccggcgaccacatgagctcctacagaaactcacagccaaatggcagaggcagggtcgctgagtcctccaggtcctgggcagccttcatatttgccattgtgtccggggcaccaggagccccaccaaccccaaaccatgcggagaattagagttcagctcagctgggcatggagttaagatccctcacaggacccagaagctcaccaaaaactatttcttcagccccttctctggcccagaccctgtgggcatggagatggacagacctgggcctggctcttgagaggtcccagtcagccatggagagctggggaaaccacattaaggtgctcacaaaaatacagtgtgacgtgtactgtcatcaa

SEQ ID NO: 9017 - protein, 328 aa, Homo sapiens; identical to SEQ ID NO: 1307

SEQ ID NO: 9018 - DNA, 1678 bp, Homo sapiens
tggctcctctgggttccagggacgctggggccggagctgctgccgccgtctacacggtcccctcatttgacgggttcgcctcctagcagcgcctgggcgagtgacatctgggccggaccagctggtgctgcgcggcgcagacttctgccagaacattgcacgcgacagtttcaggcacagaactgactggcagcaggggctgctccacgagtgggaatttgctccagcacttcacggactgcaagcgaggcacttgctaactcttggataacaagacctctgccagaagaaccatggctttggaaggcggagttcaggctgaggagatgggtgcggtcctcagtgagcccctgcctccctgaacataggaaacccacctgggcagccatggaatgggacaatggcacaggccaggctctgggcttgccacccaccacctgtgtctaccgcgagaacttcaagcaactgctgctgccacctgtgtattcggcggtgctggcggctggcctgccgctgaacatctgtgtcattacccagatctgcacgtcccgccgggccctgacccgcacggccgtgtacaccctaaaccttgctctggctgacctgctatatgcctgctccctgcccctgctcatctacaactatgcccaaggtgatcactggccctttggcgacttcgcctgccgcctggtccgcttcctcttctatgccaacctgcacggcagcatcctcttcctcacctgcatcagcttccagcgctacctgggcatctgccacccgctggccccctggcacaaacgtgggggccgccgggctgcctggctagtgtgtgtagccgtgtggctggccgtgacaacccagtgcctgcccacagccatcttcgctgccacaggcatccagcgtaaccgcactgtctgctatgacctcagcccgcctgccctggccacccactatatgccctatggcatggctctcactgtcatcggcttcctgctgccctttgctgccctgctggcctgctactgtctcctggcctgccgcctgtgccgccaggatggcccggcagagcctgtggcccaggagcggcgtggcaaggcggcccgcatggccgtggtggtggctgctgcctttgccatcagcttcctgccttttcacatcaccaagacagcctacctggcagtgcgctcgacgccgggcgtcccctgcactgtattggaggcctttgcagcggcctacaaaggcacgcggccgtttgccagtgccaacagcgtgctggaccccatcctcttctacttcacccagaagaagttccgccggcgaccacatgagctcctacagaaactcacagccaaatggcagaggcagggtcgctgagtcctccaggtcctgggcagccttcatatttgccattgtgtccggggcaccaggagccccaccaaccccaaaccatgcggagaattagagttcagctcagctgggcatggagttaagatccctcacaggacccagaagctcaccaaaaactatttcttcagccccttctctggcccagaccctgtgggcatggagatggacagacctgggcctggctcttgagaggtcccagtcagccatggagagctggggaaaccacattaaggtgctcacaaaaatacagtgtgacgtgtactgtcatcaa

SEQ ID NO: 9019 - protein, 328 aa, Homo sapiens; identical to SEQ ID NO: 1307

SEQ ID NO: 9020 - DNA, 1704 bp, Homo sapiens
tctgggttccagggacgctggggccggagctgctgccgccgtctacacggtcccctcatttgacgggttcgcctcctagcagcgcctgggcgagtgacatctgggccggaccagctggtgctgcgcggcgcaggtctctcggtttcctcatctgctgcctctccagacttctgccagaacattgcacgcgacagtttcaggcacagaactgactggcagcaggggctgctccacgagtgggaatttgctccagcacttcacggactgcaagcgaggcacttgctaactcttggataacaagacctctgccagaagaaccatggctttggaaggcggagttcaggctgaggagatgggtgcggtcctcagtgagcccctgcctccctgaacataggaaacccacctgggcagccatggaatgggacaatggcacaggccaggctctgggcttgccacccaccacctgtgtctaccgcgagaacttcaagcaactgctgctgccacctgtgtattcggcggtgctggcggctggcctgccgctgaacatctgtgtcattacccagatctgcacgtcccgccgggccctgacccgcacggccgtgtacaccctaaaccttgctctggctgacctgctatatgcctgctccctgcccctgctcatctacaactatgcccaaggtgatcactggccctttggcgacttcgcctgccgcctggtccgcttcctcttctatgccaacctgcacggcagcatcctcttcctcacctgcatcagcttccagcgctacctgggcatctgccacccgctggccccctggcacaaacgtgggggccgccgggctgcctggctagtgtgtgtagccgtgtggctggccgtgacaacccagtgcctgcccacagccatcttcgctgccacaggcatccagcgtaaccgcactgtctgctatgacctcagcccgcctgccctggccacccactatatgccctatggcatggctctcactgtcatcggcttcctgctgccctttgctgccctgctggcctgctactgtctcctggcctgccgcctgtgccgccaggatggcccggcagagcctgtggcccaggagcggcgtggcaaggcggcccgcatggccgtggtggtggctgctgcctttgccatcagcttcctgccttttcacatcaccaagacagcctacctggcagtgcgctcgacgccgggcgtcccctgcactgtattggaggcctttgcagcggcctacaaaggcacgcggccgtttgccagtgccaacagcgtgctggaccccatcctcttctacttcacccagaagaagttccgccggcgaccacatgagctcctacagaaactcacagccaaatggcagaggcagggtcgctgagtcctccaggtcctgggcagccttcatatttgccattgtgtccggggcaccaggagccccaccaaccccaaaccatgcggagaattagagttcagctcagctgggcatggagttaagatccctcacaggacccagaagctcaccaaaaactatttcttcagccccttctctggcccagaccctgtgggcatggagatggacagacctgggcctggctcttgagaggtcccagtcagccatggagagctggggaaaccacattaaggtgctcacaaaaatacagtgtgacgtgtactgtcatcaa

SEQ ID NO: 9021 - protein, 328 aa, Homo sapiens; identical to SEQ ID NO: 1307

SEQ ID NO: 9022 - DNA, 1536 bp, Homo sapiens
ccagggacgctggggccggagctgctgccgccgtctacacggtcccctcatttgacgggttcgcctcctagcagcgcctgggcgagtgacatctgggccggaccagctggtgctgcgcggcgcagataacaagacctctgccagaagaaccatggctttggaaggcggagttcaggctgaggagatgggtgcggtcctcagtgagcccctgcctccctgaacataggaaacccacctgggcagccatggaatgggacaatggcacaggccaggctctgggcttgccacccaccacctgtgtctaccgcgagaacttcaagcaactgctgctgccacctgtgtattcggcggtgctggcggctggcctgccgctgaacatctgtgtcattacccagatctgcacgtcccgccgggccctgacccgcacggccgtgtacaccctaaaccttgctctggctgacctgctatatgcctgctccctgcccctgctcatctacaactatgcccaaggtgatcactggccctttggcgacttcgcctgccgcctggtccgcttcctcttctatgccaacctgcacggcagcatcctcttcctcacctgcatcagcttccagcgctacctgggcatctgccacccgctggccccctggcacaaacgtgggggccgccgggctgcctggctagtgtgtgtagccgtgtggctggccgtgacaacccagtgcctgcccacagccatcttcgctgccacaggcatccagcgtaaccgcactgtctgctatgacctcagcccgcctgccctggccacccactatatgccctatggcatggctctcactgtcatcggcttcctgctgccctttgctgccctgctggcctgctactgtctcctggcctgccgcctgtgccgccaggatggcccggcagagcctgtggcccaggagcggcgtggcaaggcggcccgcatggccgtggtggtggctgctgcctttgccatcagcttcctgccttttcacatcaccaagacagcctacctggcagtgcgctcgacgccgggcgtcccctgcactgtattggaggcctttgcagcggcctacaaaggcacgcggccgtttgccagtgccaacagcgtgctggaccccatcctcttctacttcacccagaagaagttccgccggcgaccacatgagctcctacagaaactcacagccaaatggcagaggcagggtcgctgagtcctccaggtcctgggcagccttcatatttgccattgtgtccggggcaccaggagccccaccaaccccaaaccatgcggagaattagagttcagctcagctgggcatggagttaagatccctcacaggacccagaagctcaccaaaaactatttcttcagccccttctctggcccagaccctgtgggcatggagatggacagacctgggcctggctcttgagaggtcccagtcagccatggagagctggggaaaccacattaaggtgctcacaaaaatacagtgtgacgtgtactgtcatcaa

SEQ ID NO: 9023 - protein, 328 aa, Homo sapiens; identical to SEQ ID NO: 1307

SEQ ID NO: 9024 - DNA, 1638 bp, Homo sapiens
ttgggagagtgaaagctcacccggatctgggtggagaaagtatgacaggtcccaggctcaccctctcacacatacaaacacatgcacatacaagagaagctgctccgaaatctcatttttttatcttccaaaattcctgtggattttgcattcttctataatatttctgcatataaaaacactgttctgataaattaccatccaatgagttggctcaagtcttggagataacaagacctctgccagaagaaccatggctttggaaggcggagttcaggctgaggagatgggtgcggtcctcagtgagcccctgcctccctgaacataggaaacccacctgggcagccatggaatgggacaatggcacaggccaggctctgggcttgccacccaccacctgtgtctaccgcgagaacttcaagcaactgctgctgccacctgtgtattcggcggtgctggcggctggcctgccgctgaacatctgtgtcattacccagatctgcacgtcccgccgggccctgacccgcacggccgtgtacaccctaaaccttgctctggctgacctgctatatgcctgctccctgcccctgctcatctacaactatgcccaaggtgatcactggccctttggcgacttcgcctgccgcctggtccgcttcctcttctatgccaacctgcacggcagcatcctcttcctcacctgcatcagcttccagcgctacctgggcatctgccacccgctggccccctggcacaaacgtgggggccgccgggctgcctggctagtgtgtgtagccgtgtggctggccgtgacaacccagtgcctgcccacagccatcttcgctgccacaggcatccagcgtaaccgcactgtctgctatgacctcagcccgcctgccctggccacccactatatgccctatggcatggctctcactgtcatcggcttcctgctgccctttgctgccctgctggcctgctactgtctcctggcctgccgcctgtgccgccaggatggcccggcagagcctgtggcccaggagcggcgtggcaaggcggcccgcatggccgtggtggtggctgctgcctttgccatcagcttcctgccttttcacatcaccaagacagcctacctggcagtgcgctcgacgccgggcgtcccctgcactgtattggaggcctttgcagcggcctacaaaggcacgcggccgtttgccagtgccaacagcgtgctggaccccatcctcttctacttcacccagaagaagttccgccggcgaccacatgagctcctacagaaactcacagccaaatggcagaggcagggtcgctgagtcctccaggtcctgggcagccttcatatttgccattgtgtccggggcaccaggagccccaccaaccccaaaccatgcggagaattagagttcagctcagctgggcatggagttaagatccctcacaggacccagaagctcaccaaaaactatttcttcagccccttctctggcccagaccctgtgggcatggagatggacagacctgggcctggctcttgagaggtcccagtcagccatggagagctggggaaaccacattaaggtgctcacaaaaatacagtgtgacgtgtactgtcatcaa

SEQ ID NO: 9025 - protein, 49 aa, Homo sapiens
MHIQEKLLRNLIFLSSKIPVDFAFFYNISAYKNTVLINYHPMSWLKSWR

SEQ ID NO: 9026 - DNA, 1833 bp, Homo sapiens
aaggacagaggaggggcccttcctgtcagctggctgggagcagaggtggctttgtcttttcggaagaactggttctgtggaatttgtgcttatttcccatcaaggatcaaggacctgctctggggctacctcagggccccacaggatgaggggctggttttcagatgagttttctgcttgcctgtcatctggatagtgtctaaaaatttgcaaactgccttcttgtcagtgtcttgctcattcttcatgacactcctgatatgtctctcggtttcctcatctgctgcctctccagacttctgccagaacattgcacgcgacagtttcaggcacagaactgactggcagcaggggctgctccacgagtgggaatttgctccagcacttcacggactgcaagcgaggcacttgctaactcttggataacaagacctctgccagaagaaccatggctttggaaggcggagttcaggctgaggagatgggtgcggtcctcagtgagcccctgcctccctgaacataggaaacccacctgggcagccatggaatgggacaatggcacaggccaggctctgggcttgccacccaccacctgtgtctaccgcgagaacttcaagcaactgctgctgccacctgtgtattcggcggtgctggcggctggcctgccgctgaacatctgtgtcattacccagatctgcacgtcccgccgggccctgacccgcacggccgtgtacaccctaaaccttgctctggctgacctgctatatgcctgctccctgcccctgctcatctacaactatgcccaaggtgatcactggccctttggcgacttcgcctgccgcctggtccgcttcctcttctatgccaacctgcacggcagcatcctcttcctcacctgcatcagcttccagcgctacctgggcatctgccacccgctggccccctggcacaaacgtgggggccgccgggctgcctggctagtgtgtgtagccgtgtggctggccgtgacaacccagtgcctgcccacagccatcttcgctgccacaggcatccagcgtaaccgcactgtctgctatgacctcagcccgcctgccctggccacccactatatgccctatggcatggctctcactgtcatcggcttcctgctgccctttgctgccctgctggcctgctactgtctcctggcctgccgcctgtgccgccaggatggcccggcagagcctgtggcccaggagcggcgtggcaaggcggcccgcatggccgtggtggtggctgctgcctttgccatcagcttcctgccttttcacatcaccaagacagcctacctggcagtgcgctcgacgccgggcgtcccctgcactgtattggaggcctttgcagcggcctacaaaggcacgcggccgtttgccagtgccaacagcgtgctggaccccatcctcttctacttcacccagaagaagttccgccggcgaccacatgagctcctacagaaactcacagccaaatggcagaggcagggtcgctgagtcctccaggtcctgggcagccttcatatttgccattgtgtccggggcaccaggagccccaccaaccccaaaccatgcggagaattagagttcagctcagctgggcatggagttaagatccctcacaggacccagaagctcaccaaaaactatttcttcagccccttctctggcccagaccctgtgggcatggagatggacagacctgggcctggctcttgagaggtcccagtcagccatggagagctggggaaaccacattaaggtgctcacaaaaatacagtgtgacgtgtactgtcatcaa

SEQ ID NO: 9027 - protein, 59 aa, Homo sapiens
MTLLICLSVSSSAASPDFCQNIARDSFRHRTDWQQGLLHEWEFAPALHGLQARHLLTLG

SEQ ID NO: 9028 - DNA, 2356 bp, Homo sapiens
accggtggtcagagtgaaacagaacagaacgggaggtttcacaatgtccttccatacaatctctggaatctatagataacaacagctgctaggtcaggggtcgaattttaactaccaggcttaggtcaggcaggcccaggcctggtttcgggtctggttccttggtttcgggtctggttccttggtttcaggtctggtttttaggcgccgggctacctgcctttagtttcgcttctctttccttttccgagtataaaacagtatgagagggtctctctcctccctcagtgccatcctcatccctgggtgggagttgtctggatccatagggttggagccacagataacagagccattaatctcggggtctcagcctctcttaacggaccttccaggcactgctgagaaaaccaggttaatggtttcctgcggcagcaatgagcagaagcagggccatctccagactccagagaagccaggagagggctggggtgataatggggaggaggataaaaaacagccacccaatgcgtgccttccctgtgccaggcccttgtcctgaaatgttatctcactccatcctcccaacagtcccttgggctaaattggtgatgctgcttgtttgagtgagcaaacagagggtgaatgaagtgacttgcgggcagctgggtagaggatgagtcagcattggtgtaaaggactggagcttcagggttctcgggattcgagtcctggccctgctgcttgccagctctgtgctgtggcaagttacttcctctccccaggtctctcggtttcctcatctgctgcctctccagacttctgccagaacattgcacgcgacagtttcaggcacagaactgactggcagcaggggctgctccacgagtgggaatttgctccagcacttcacggactgcaagcgaggcacttgctaactcttggataacaagacctctgccagaagaaccatggctttggaaggcggagttcaggctgaggagatgggtgcggtcctcagtgagcccctgcctccctgaacataggaaacccacctgggcagccatggaatgggacaatggcacaggccaggctctgggcttgccacccaccacctgtgtctaccgcgagaacttcaagcaactgctgctgccacctgtgtattcggcggtgctggcggctggcctgccgctgaacatctgtgtcattacccagatctgcacgtcccgccgggccctgacccgcacggccgtgtacaccctaaaccttgctctggctgacctgctatatgcctgctccctgcccctgctcatctacaactatgcccaaggtgatcactggccctttggcgacttcgcctgccgcctggtccgcttcctcttctatgccaacctgcacggcagcatcctcttcctcacctgcatcagcttccagcgctacctgggcatctgccacccgctggccccctggcacaaacgtgggggccgccgggctgcctggctagtgtgtgtagccgtgtggctggccgtgacaacccagtgcctgcccacagccatcttcgctgccacaggcatccagcgtaaccgcactgtctgctatgacctcagcccgcctgccctggccacccactatatgccctatggcatggctctcactgtcatcggcttcctgctgccctttgctgccctgctggcctgctactgtctcctggcctgccgcctgtgccgccaggatggcccggcagagcctgtggcccaggagcggcgtggcaaggcggcccgcatggccgtggtggtggctgctgcctttgccatcagcttcctgccttttcacatcaccaagacagcctacctggcagtgcgctcgacgccgggcgtcccctgcactgtattggaggcctttgcagcggcctacaaaggcacgcggccgtttgccagtgccaacagcgtgctggaccccatcctcttctacttcacccagaagaagttccgccggcgaccacatgagctcctacagaaactcacagccaaatggcagaggcagggtcgctgagtcctccaggtcctgggcagccttcatatttgccattgtgtccggggcaccaggagccccaccaaccccaaaccatgcggagaattagagttcagctcagctgggcatggagttaagatccctcacaggacccagaagctcaccaaaaactatttcttcagccccttctctggcccagaccctgtgggcatggagatggacagacctgggcctggctcttgagaggtcccagtcagccatggagagctggggaaaccacattaaggtgctcacaaaaatacagtgtgacgtgtactgtcatcaa

SEQ ID NO: 9029 - protein, 90 aa, Homo sapiens
MSQHWCKGLELQGSRDSSPGPAACQLCAVASYFLSPGLSVSSSAASPDFCQNIARDSFRHRTDWQQGLLHEWEFAPALHGLQARHLLTLG

SEQ ID NO: 9030 - DNA, 1585 bp, Homo sapiens
gtcagcattggtgtaaaggactggagcttcagggttctcgggattcgagtcctggccctgctgcttgccagctctgtgctgtggcaagttacttcctctccccaggtctctcggtttcctcatctgctgcctctccagacttctgccagaacattgcacgcgacagtttcaggcacagaactgactggcagcaggggctgctccacgagtgggaatttgctccagcacttcacggactgcaagcgaggcacttgctaactcttggcctccctgaacataggaaacccacctgggcagccatggaatgggacaatggcacaggccaggctctgggcttgccacccaccacctgtgtctaccgcgagaacttcaagcaactgctgctgccacctgtgtattcggcggtgctggcggctggcctgccgctgaacatctgtgtcattacccagatctgcacgtcccgccgggccctgacccgcacggccgtgtacaccctaaaccttgctctggctgacctgctatatgcctgctccctgcccctgctcatctacaactatgcccaaggtgatcactggccctttggcgacttcgcctgccgcctggtccgcttcctcttctatgccaacctgcacggcagcatcctcttcctcacctgcatcagcttccagcgctacctgggcatctgccacccgctggccccctggcacaaacgtgggggccgccgggctgcctggctagtgtgtgtagccgtgtggctggccgtgacaacccagtgcctgcccacagccatcttcgctgccacaggcatccagcgtaaccgcactgtctgctatgacctcagcccgcctgccctggccacccactatatgccctatggcatggctctcactgtcatcggcttcctgctgccctttgctgccctgctggcctgctactgtctcctggcctgccgcctgtgccgccaggatggcccggcagagcctgtggcccaggagcggcgtggcaaggcggcccgcatggccgtggtggtggctgctgcctttgccatcagcttcctgccttttcacatcaccaagacagcctacctggcagtgcgctcgacgccgggcgtcccctgcactgtattggaggcctttgcagcggcctacaaaggcacgcggccgtttgccagtgccaacagcgtgctggaccccatcctcttctacttcacccagaagaagttccgccggcgaccacatgagctcctacagaaactcacagccaaatggcagaggcagggtcgctgagtcctccaggtcctgggcagccttcatatttgccattgtgtccggggcaccaggagccccaccaaccccaaaccatgcggagaattagagttcagctcagctgggcatggagttaagatccctcacaggacccagaagctcaccaaaaactatttcttcagccccttctctggcccagaccctgtgggcatggagatggacagacctgggcctggctcttgagaggtcccagtcagccatggagagctggggaaaccacattaaggtgctcacaaaaatacagtgtgacgtgtactgtc

SEQ ID NO: 9031 - protein, 328 aa, Homo sapiens; identical to SEQ ID NO: 1307

SEQ ID NO: 9032 - DNA, 2827 bp, Homo sapiens
gtcagcattggtgtaaaggactggagcttcagggttctcgggattcgagtcctggccctgctgcttgccagctctgtgctgtggcaagttacttcctctccccaggtctctcggtttcctcatctgctgcctctccagacttctgccagaacattgcacgcgacagtttcaggcacagaactgactggcagcaggggctgctccacgagtgggaatttgctccagcacttcacggactgcaagcgaggcacttgctaactcttggcctccctgaacataggaaacccacctgggcagccatggaatgggacaatggcacaggccaggctctgggcttgccacccaccacctgtgtctaccgcgagaacttcaagcaactgctgctgccacctgtgtattcggcggtgctggcggctggcctgccgctgaacatctgtgtcattacccagatctgcacgtcccgccgggccctgacccgcacggccgtgtacaccctaaaccttgctctggctgacctgctatatgcctgctccctgcccctgctcatctacaactatgcccaaggtgatcactggccctttggcgacttcgcctgccgcctggtccgcttcctcttctatgccaacctgcacggcagcatcctcttcctcacctgcatcagcttccagcgctacctgggcatctgccacccgctggccccctggcacaaacgtgggggccgccgggctgcctggctagtgtgtgtagccgtgtggctggccgtgacaacccagtgcctgcccacagccatcttcgctgccacaggcatccagcgtaaccgcactgtctgctatgacctcagcccgcctgccctggccacccactatatgccctatggcatggctctcactgtcatcggcttcctgctgccctttgctgccctgctggcctgctactgtctcctggcctgccgcctgtgccgccaggatggcccggcagagcctgtggcccaggagcggcgtggcaaggcggcccgcatggccgtggtggtggctgctgcctttgccatcagcttcctgccttttcacatcaccaagacagcctacctggcagtgcgctcgacgccgggcgtcccctgcactgtattggaggcctttgcagcggcctacaaaggcacgcggccgtttgccagtgccaacagcgtgctggaccccatcctcttctacttcacccagaagaagttccgccggcgaccacatgagctcctacagaaactcacagccaaatggcagaggcagggtcgctgagtcctccaggtcctgggcagccttcatatttgccattgtgtccggggcaccaggagccccaccaaccccaaaccatgcggagaattagagttcagctcagctgggcatggagttaagatccctcacaggacccagaagctcaccaaaaactatttcttcagccccttctctggcccagaccctgtgggcatggagatggacagacctgggcctggctcttgagaggtcccagtcagccatggagagctggggaaaccacattaaggtgctcacaaaaatacagtgtgacgtgtactgtcatcaaggggtatgctccatgctttgagtcaccaatgaagcgggtgagggaagatgagagggggaggtgagagcttctgggaaggggcatttgagctgggttttgagggatgattatgagctctctggagaggagtgatattccatttatttagaaagcctttactgacaccttgtgctcaggcctgtgttggttctggggccctagaagaaccagtcctagccctggtccatacgggctcccaactgctggaagtacagactggcacagcaacatcagggttgtgacagagggaagcatggctggggggagggggtacacagacagtgcccatgacccagtccaaggagtcaggaaagagctctctgaggagggagcatctgagccagatgttgagggctgagtgggaacttggcaagcagaagtggggagcactttaatgcaacccaggtatgctccatgcatatccagctgggccagcctcgtgctgggctctgccctgggcagacaggcagagggccagagcagaggacacatggccttgcgtgtgtgaaagctgagaaaatgggagctgtgcttcagctaccctccagacaagggcaagagttagccagatgctccaggcagtgggaagccaatggagggattaagcggcggaagcttcttagaagaggcagggggcgaagtgcagtggctcatgcctgtaatctcagcaatttgggaggccaaggaaggaggaatgcttgagcccaagagttttagaccagcctgggcaacacagtaagaccctgtttctacaaaaaaatataaaaaatagcctggtgtggtggtgtctgactgtagtactaactactcaggaagctgaggtgctgagttcgagattacagtgagctaggagtgatccagtgcattccagcctgagcgacagagggagacactgtctctaaaaaaattaaaataaatcgggagcagtggctcacatctgtaatcccagcactttgggaggctgaagcaggtggatcacttgaggtcaggaatttgagaccagcctggccaacacagtgaaaccctgtctctaccgaaaatacaaaaattagctgggcatggtggctggtgcctgtaatcccagctactcgggaggctaaggcaagcgaattgcttgaacctgggaggcggaggttgcagtgagccgagatcacatcactgcattccagcctgggcgatggagcgagaacctgtctca

SEQ ID NO: 9033 - protein, 328 aa, Homo sapiens; identical to SEQ ID NO: 1307

SEQ ID NO: 9034 - DNA, 1432 bp, Homo sapiens
tgccagaacattgcacgcgacagtttcaggcacagaactgactggcagcaggggctgctccacgagtgggaatttgctccagcacttcacggactgcaagcgaggcacttgctaactcttggataacaagacctctgccagaagaaccatggctttggaaggcggagttcaggctgaggagatgggtgcggtcctcagtgagcccctgcctccctgaacataggaaacccacctgtgtattcggcggtgctggcggctggcctgccgctgaacatctgtgtcattacccagatctgcacgtcccgccgggccctgacccgcacggccgtgtacaccctaaaccttgctctggctgacctgctatatgcctgctccctgcccctgctcatctacaactatgcccaaggtgatcactggccctttggcgacttcgcctgccgcctggtccgcttcctcttctatgccaacctgcacggcagcatcctcttcctcacctgcatcagcttccagcgctacctgggcatctgccacccgctggccccctggcacaaacgtgggggccgccgggctgcctggctagtgtgtgtagccgtgtggctggccgtgacaacccagtgcctgcccacagccatcttcgctgccacaggcatccagcgtaaccgcactgtctgctatgacctcagcccgcctgccctggccacccactatatgccctatggcatggctctcactgtcatcggcttcctgctgccctttgctgccctgctggcctgctactgtctcctggcctgccgcctgtgccgccaggatggcccggcagagcctgtggcccaggagcggcgtggcaaggcggcccgcatggccgtggtggtggctgctgcctttgccatcagcttcctgccttttcacatcaccaagacagcctacctggcagtgcgctcgacgccgggcgtcccctgcactgtattggaggcctttgcagcggcctacaaaggcacgcggccgtttgccagtgccaacagcgtgctggaccccatcctcttctacttcacccagaagaagttccgccggcgaccacatgagctcctacagaaactcacagccaaatggcagaggcagggtcgctgagtcctccaggtcctgggcagccttcatatttgccattgtgtccggggcaccaggagccccaccaaccccaaaccatgcggagaattagagttcagctcagctgggcatggagttaagatccctcacaggacccagaagctcaccaaaaactatttcttcagccccttctctggcccagaccctgtgggcatggagatggacagacctgggcctggctcttgagaggtcccagtcagccatggagagctggggaaaccacattaaggtgctcacaaaaatacagtgtgacgtgtactgtcatcaa

SEQ ID NO: 9035 - protein, 180 aa, Homo sapiens
MTSARLPWPPTICPMAWLSLSSASCCPLLPCWPATVSWPAACAARMARQSLWPRSGVARRPAWPWWWLLPLPSASCLFTSPRQPTWQCARRRASPALYWRPLQRPTKARGRLPVPTACWTPSSSTSPRRSSAGDHMSSYRNSQPNGRGRVAESSRSWAAFIFAIVSGAPGAPPTPNHAEN

SEQ ID NO: 9036 - DNA, 1033 bp, Homo sapiens
cgacagtttcaggcacagaactgactggcagcaggggctgctccacgagtgggaatttgctccagcacttcacggactgcaagcgaggcacttgctaactcttggataacaagacctctgccagaagaaccatggctttggaaggcggagttcaggctgaggagatgggtgcggtcctcagtgagcccctgcctccctgaacataggaaacccacctgggcagccatggaatgggacaatggcacaggcatccagcgtaaccgcactgtctgctatgacctcagcccgcctgccctggccacccactatatgccctatggcatggctctcactgtcatcggcttcctgctgccctttgctgccctgctggcctgctactgtctcctggcctgccgcctgtgccgccaggatggcccggcagagcctgtggcccaggagcggcgtggcaaggcggcccgcatggccgtggtggtggctgctgcctttgccatcagcttcctgccttttcacatcaccaagacagcctacctggcagtgcgctcgacgccgggcgtcccctgcactgtattggaggcctttgcagcggcctacaaaggcacgcggccgtttgccagtgccaacagcgtgctggaccccatcctcttctacttcacccagaagaagttccgccggcgaccacatgagctcctacagaaactcacagccaaatggcagaggcagggtcgctgagtcctccaggtcctgggcagccttcatatttgccattgtgtccggggcaccaggagccccaccaaccccaaaccatgcggagaattagagttcagctcagctgggcatggagttaagatccctcacaggacccagaagctcaccaaaaactatttcttcagccccttctctggcccagaccctgtgggcatggagatggacagacctgggcctggctcttgagaggtcccagtcagccatggagagctggggaaaccacattaaggtgctcacaaaaatacagtgtgacgtgtactgtcatcaa

SEQ ID NO: 9037 - protein, 192 aa, Homo sapiens
MAQASSVTALSAMTSARLPWPPTICPMAWLSLSSASCCPLLPCWPATVSWPAACAARMARQSLWPRSGVARRPAWPWWWLLPLPSASCLFTSPRQPTWQCARRRASPALYWRPLQRPTKARGRLPVPTACWTPSSSTSPRRSSAGDHMSSYRNSQPNGRGRVAESSRSWAAFIFAIVSGAPGAPPTPNHAEN

SEQ ID NO: 9038 - DNA, 435 bp, Homo sapiens
actttgaaaggctgaattttatggtatgtgaattatgtcttaattttgtttaaatccgggagcaggaatatagaaactacatagaagcttgagatgaatgttggtcctcaggtaggtgaaagggaaacttcactgtgagtttcctggcagctggagtgaaaagggagaagcagcctccaaaatgaggaaaccaactcttcaggggcttaggtccagggcaagattcctataaacccaagttggcccactgcatcactgcatcataatgtcagaaatacagattttttttttttttttgaaactccgtcaaaaaaagaaagaaagaaagagagagtcagagagagagagggggaaagaaaagaaaggaaggaaagaaagaaagaaagaaagaaaagaaagaaagaaagaaagaaagaaagaaagaaagaaagaaag

SEQ ID NO: 9039 - protein, 55 aa, Homo sapiens
MSEIQIFFFFLKLRQKKKERKRESERERGKEKKGRKERKKERKERKKERKKERKK

SEQ ID NO: 9040 - DNA, 1464 bp, Homo sapiens
gaaacagaggaagctgctcactctgtcagagaagttgcagcctagctgagggcaggagagtggggagcctcaggtctggcttccctttgccccaacacacttgggaccaccagcgtgctgcagggacaggaggctgcctcctccctgaacataggaaacccacctgggcagccatggaatgggacaatggcacaggccaggctctgggcttgccacccaccacctgtgtctaccgcgagaacttcaagcaactgctgctgccacctgtgtattcggcggtgctggcggctggcctgccgctgaacatctgtgtcattacccagatctgcacgtcccgccgggccctgacccgcacggccgtgtacaccctaaaccttgctctggctgacctgctatatgcctgctccctgcccctgctcatctacaactatgcccaaggtgatcactggccctttggcgacttcgcctgccgcctggtccgcttcctcttctatgccaacctgcacggcagcatcctcttcctcacctgcatcagcttccagcgctacctgggcatctgccacccgctggccccctggcacaaacgtgggggccgccgggctgcctggctagtgtgtgtagccgtgtggctggccgtgacaacccagtgcctgcccacagccatcttcgctgccacaggcatccagcgtaaccgcactgtctgctatgacctcagcccgcctgccctggccacccactatatgccctatggcatggctctcactgtcatcggcttcctgctgccctttgctgccctgctggcctgctactgtctcctggcctgccgcctgtgccgccaggatggcccggcagagcctgtggcccaggagcggcgtggcaaggcggcccgcatggccgtggtggtggctgctgcctttgccatcagcttcctgccttttcacatcaccaagacagcctacctggcagtgcgctcgacgccgggcgtcccctgcactgtattggaggcctttgcagcggcctacaaaggcacgcggccgtttgccagtgccaacagcgtgctggaccccatcctcttctacttcacccagaagaagttccgccggcgaccacatgagctcctacagaaactcacagccaaatggcagaggcagggtcgctgagtcctccaggtcctgggcagccttcatatttgccattgtgtccggggcaccaggagccccaccaaccccaaaccatgcggagaattagagttcagctcagctgggcatggagttaagatccctcacaggacccagaagctcaccaaaaactatttcttcagccccttctctggcccagaccctgtgggcatggagatggacagacctgggcctggctcttgagaggtcccagtcagccatggagagctggggaaaccacattaaggtgctcacaaaaatacagtgtgacgtgtactgtcatcaa

SEQ ID NO: 9041 - protein, 328 aa, Homo sapiens; identical to SEQ ID NO: 1307

SEQ ID NO: 9042 - DNA, 2595 bp, Homo sapiens
ttgaaatcttgattctgatgggaaagcaaaacatacctctggatggacatgaggctgatgaaatcccagaaggtctctttactccagataactttcaggcactgctggagtgtcggataaattctggtgaagaggttctgagaaagcggtttgagacaacagcagttaacacgttgttttgttcaaaaacacagcagaggcagatgctagagatctgtgagagctgtattcgagaagaaactctcagggaagtgagagactcacacttcttttccattatcactgacgatgtagtggacatagcaggggaagagcacctacctgtgttggtgaggtttgttgatgaatctcataacctaagagaggaatttataggcttcctgccttatgaagccgatgcagaaattttggctgtgaaatttcacactatgataactgagaagtggggattaaatatggagtattgtcgtggccaggcttacattgtctctagtggattttcttccaaaatgaaagttgttgcttctagacttttagagaaatatccccaagctatctacacactctgctcttcctgtgccttaaatatgtggttggcaaaatcagtacctgttatgggagtatctgttgcattaggaacaattgaggaagtttgttcttttttccatcgatcaccacaactgcttttagaacttgacaacgtaatttctgttctttttcagaacagtaaagaaaggggtaaagaactgaaggaaatctgccattctcagtggacaggcaggcatgatgcttttgaaattttagtggaactcctgcaagcacttgttttatgtttagatggtataaatagtgacacaaatattagatggaataactatatagctggccgagcatttgtactctgcagtgcagtgtcagattttgatttcattgttactattgttgttcttaaaaatgtcctatcttttacaagagcctgggaaattccgcagagctcaccagggtaacttggaatctcagctaacctctgagagttactataaagaaaccctaagtgtcccaacagtggagcacattattcaggaacttaaagatatattctcagaacagcacctcaaagctcttaaatgcttatctctggtaccctcagtcatgggacaactcaaattcaatacgtcggaggaacaccatgctgacatgtatagaagtgacttacccaatcctgacacgctgtcagctgagcttcattgttggagaatcaaatggaaacacagggggaaagatatagagcttccgtccaccatctatgaagccctccacctgcctgacatcaagttttttcctaatgtgtatgcattgctgaaggtcctgtgtattcttcctgtgatgaaggttgagaatgagcggtatgaaaatggacgaaagcgtcttaaagcatatttgaggaacactttgacagaccaaaggtcaagtaacttggctttgcttaacataaattttgatataaaacacgacctggatttaatggtggacacatatattaaactctatacaagtaagtcagagcttcctacagataattccgaaactgtggaaaatacctaagagacttttaaaaataggctttcttatatttgatatttggaagaaaaagccgtaaggtgtatgtagaccacttaatcactaaatatctttgcctataggactccattgaatacattagccattgataatctacctgtttaaatggcccctgtttgaactctcaagctttgaagacctacctgttcttccagaagagaacgttgaaagtgccatgtttccttttgcgtgatctctgttgatggcactctggaattgtttcagttaagtcattttagacatagcatttattatcactgtggatctctacttgttgggtgttatgaattctttgaagaaatatattttgaagaggtgtgggaggaaggaatacattttataaaatgttgtagtgaagcccacaattgacctttgactaataggagttttaagtatgttaaaaatctatactggacagttacaagaaattaccggagaaaagcttgtgagctcaccaaacaaggatttcagtgtagattttgtctttcttgaacttaaagaaacaaatgacaaagtttgaatggaaaagcctgctgttgttccacatctcgttgctgtttacattcctttgtggagcctacatcttcctaagctttttagcaggtatatgttgaacacttctgtttcatggttgagacagaatcagaggccatggatactgacaactgatttgtctgttttttttctctgtctttttccatgactcttatatactgcctcatcttgatttataagcaaaacctggaaaacctacaaaataagtgttgtggtttatctagaaaaatatggaaaatattgctgttatttttggtgaagaaaatcaattttgtatagtttatttcaatctaaataaaatgtgaattttgtttaaagcttaggcacattattttttgtggggtcaaaacattcttgtgtaaattctcttaaacatttgataaacagcttcacaattca

SEQ ID NO: 9043 - protein, 329 aa, Homo sapiens
MGKQNIPLDGHEADEIPEGLFTPDNFQALLECRINSGEEVLRKRFETTAVNTLFCSKTQQRQMLEICESCIREETLREVRDSHFFSIITDDVVDIAGEEHLPVLVRFVDESHNLREEFIGFLPYEADAEILAVKFHTMITEKWGLNMEYCRGQAYIVSSGFSSKMKVVASRLLEKYPQAIYTLCSSCALNMWLAKSVPVMGVSVALGTIEEVCSFFHRSPQLLLELDNVISVLFQNSKERGKELKEICHSQWTGRHDAFEILVELLQALVLCLDGINSDTNIRWNNYIAGRAFVLCSAVSDFDFIVTIVVLKNVLSFTRAWEIPQSSPG

SEQ ID NO: 9044 - DNA, 6877 bp, Homo sapiens
ttatagacgtgagccaccggcctcctccatatgaatttgaaagtccttttgtcaagttctcctagaacttcttttgggattttcattataattgctttgaattgacatctttacaatattagctattgtaaatttattactagtttagtattactgttagtaaacgaatattactagtttactgttacagtataaactattgtaaagtattaactagttctatccatgaagagaaaaaaaatcccataaaatacctatcaaataacagcaatcattgacaaaactaaatactagttttttgaaaagaatattagaatacttttaggagtacagaaaacgaaaaattttgagagcttttgttacagttgtttaaatgagaatgtatgcattcttagatcacttcttaaatacattatggttcttactggtatagatgatatattctggttgaaattgtttccagcacttttgaagaacttctttttaagttaatcctagtaagtcttctgagtttttcctctgttactgattgtatcatctgcaaataaggagaaatttgtctctttcagttcttattattttaattttttctgttgcctgtcttgtttagtcaagatccctggtactatgttgaacaattctagtaatgtcatacttgccttgccccattaagtataatgtttgctgttggtattgttagatagtttttatcaagttaaggaaattcccttctactcccatattcagagttttgttgtttttttttaagatggggtctcactctgtcacccaagccagagtgcagtggggcagacactgctcactgcagcctccacctcctgggctgaagcaatcctcttacctcagcctcccaagtagctgggaccacaggtgtgtgccaccatgcctggcttatttttttgtatttttttttatagatggagtcatgccatgttgcccagtttggtctcaaactcctgggctcaagcagtcctcttacctcagctccccaaagtgctgggattacaatagtgagccaccacgcctgacctatattctgtttttatatttaacttatcacatgctttcattgcatgtatttaatagacaagttcatttttttcattctttaatgcaataagtaatactaatggattttctgtgaaccatctgcatttctgtaatgaactctagttgactgcaatatgtctatttgcttttatataccattggattcaattggtcaatattttatttaggattttacatttgtgaatcttggtctgtagccttcttttcatgtactcttattacccagttataatatcaaggttctattggcctcataaaataagttgggtatcttttttttttttttctcctagaaaaatttgtgtaggtagatgttatctgctcttgaaagtaaggtagaacttggtaaaaccattagatggcttgcggtggatgagggaaagttttgattgccattctgctatctttattggttttctttctttcttgtgttttgttaatgtttctaaaagtttatgaaactttaataatcttttcaaagaaccagtagttttgtcagtgattgttgtacttatgaactattttattggtttttctttgattagggtgatttattttttgactctttttctagcttcttgaatgtttagctcatatttatgtgtattcaaagctataaaagtctctcttaggtccattttagctataccctacaactttagacatatagtgttgtcatgtctggctgtaggtattttgtaatttctctattttgttaacataggattgtttttcttagtttccagatgtggaattatttttaattgctatatgatattttaaattttaaatgttattaagagatacgtagaggatacatatagtctatgtgatgttgattctttctgatttttttgcatccattattgctattcaagtctgtgccagcctgattcttgttcctttttaggtaatcttcttttctccctcaaagctttttagaaggtttctttatatttgacattttaaaatttgctaacctgtatctagatgtgagttttttttttatgtaccttaatttgtcatcttacaactgaggacttacaccttaaattctgagaaatccttagtttttatttttctttatgcattttcccctctatttgtttatttctattttcctgggacttagatgaatactgacacttacattacagtcctccatatcagctttcttcttggtgtccatggaggactgattccaggagcttccctcagagagcaaaatccacagatacttgattcccttatatacagtggtgtagtatttgcatataacttacacacatcctcccgtgactttaaatcatttataatacctaatacaatgtagtgctatgtaaatagttgttctgttacattgtttagagaataatgacaagaacaaaaatctgtgtgttcagtatagacacaaccatccttttcttttttttttttttgagacagagtctcgctcttgttgcccaggctggagtgcaagggtgcgatctcagctcaccgcaacctccgcctcccgggttcaagcaattctcctgcctcagccccccgagtagctgggatcacaggcatgtgccaccacgcccggctctttttgtatttttagtagagacgagggttctccatgttggtcaggctggtcttgaactcccgacctcaggtgatcctcccgcctcagcttcccaaagtgctgggattacagacgtgagccaccatgcccggcacaaccatccattttcaaataatacctagattatttatgatacttaatacatttatgtgtttgtaacacctactacaatgtaaatgctatgtaaatagttatgctacgttatgtaggggaagaatgagaaaaaaagtctgtacatgttcaagatagatacaaccatccattttttccccagcattttcaatgcatggttggttaaatccatagatatgaagtgtaatatgtatcaggatgaggagctcaatcacttgctgtcctgtagctatcatttccctgtagtctgtccctcagagagcctcacatatctcacagcaggcatactcttcctgacccaccatccttataaacgtgcagtccgtaggataaggaggggatgtccaggttgaccagcctgctgatgtttcttgttatcagcaccatgtccagtgctgcccaacaggcatcctgctgtcttcagctgtcactggcattgctgcttttctgccacagaaagtaacaggtggctcatgatttaagcattgtagagggttggaaggaaagtaaaggatgcagctggaaagttcttcctttgtctaaccctattggtgccacttggcctactatgctctgtgtatgctctgtgtatctcttccatgctggtactttcaccttctgcttctcagggatttctcatcacttttgtgttgagtcctgagattcagcaacctccttcttatgggacatctccagggttaaattgggaagtaagatgatttgtgtcctcttgaatttaactccaagtgccatggtgtatttttgtgcctttcattagccagtaaacacttataacccaaagttacgatgatttaggtagaaaataagcaaaatgatgtattcttttttccctaagactttgttataaccttggagtcattaacagcttattctggttttctcattgtctgtttgtttgaagaatgtgtactatataaagaatttatgctcttgaaagaattaaattgactcagaataggcatttgtatttgtgagtctaagatgatacactagaggtcagttttttaaagatgatttgtttttttctttttttttcttgacatttagagtgaagatgaaatcaggacactgaaacagaaaaaaattgatgaaacttctgagcaggaacaaaaacataaagaaaccaacaatagcaatgctcagaaccccagcgaagaagagggtgaagggcaagatgaggacattttacctctaacccttgaagagaaggaaaacaaagaatacctaaaatctctatttgaaatcttgattctgatgggaaagcaaaacatacctctggatggacatgaggctgatgaaatcccagaaggtctctttactccagataactttcaggcactgctggagtgtcggataaattctggtgaagaggttctgagaaagcggtttgagacaacagcagttaacacgttgttttgttcaaaaacacagcagaggcagatgctagagatctgtgagagctgtattcgagaagaaactctcagggaagtgagagactcacacttcttttccattatcactgacgatgtagtggacatagcaggggaagagcacctacctgtgttggtgaggtttgttgatgaatctcataacctaagagaggaatttataggcttcctgccttatgaagccgatgcagaaattttggctgtgaaatttcacactatgataactgagaagtggggattaaatatggagtattgtcgtggccaggcttacattgtctctagtggattttcttccaaaatgaaagttgttgcttctagacttttagagaaatatccccaagctatctacacactctgctcttcctgtgccttaaatatgtggttggcaaaatcagtacctgttatgggagtatctgttgcattaggaacaattgaggaagtttgttcttttttccatcgatcaccacaactgcttttagaacttgacaacgtaatttctgttctttttcagaacagtaaagaaaggggtaaagaactgaaggaaatctgccattctcagtggacaggcaggcatgatgcttttgaaattttagtggaactcctgcaagcacttgttttatgtttagatggtataaatagtgacacaaatattagatggaataactatatagctggccgagcatttgtactctgcagtgcagtgtcagattttgatttcattgttactattgttgttcttaaaaatgtcctatcttttacaagagcctttgggaaaaacctccaggggcaaacctctgatgtcttctttgcggccggtagcttgactgcagtactgcattcactcaacgaagtgatggaaaatattgaagtttatcatgaattttggtttgaggaagccacaaatttggcaaccaaacttgatattcaaatgaaactccctgggaaattccgcagagctcaccagggtaacttggaatctcagctaacctctgagagttactataaagaaaccctaagtgtcccaacagtggagcacattattcaggaacttaaagatatattctcagaacagcacctcaaagctcttaaatgcttatctctggtaccctcagtcatgggacaactcaaattcaatacgtcggaggaacaccatgctgacatgtatagaagtgacttacccaatcctgacacgctgtcagctgagcttcattgttggagaatcaaatggaaacacagggggaaagatatagagcttccgtccaccatctatgaagccctccacctgcctgacatcaagttttttcctaatgtgtatgcattgctgaaggtcctgtgtattcttcctgtgatgaaggttgagaatgagcggtatgaaaatggacgaaagcgtcttaaagcatatttgaggaacactttgacagaccaaaggtcaagtaacttggctttgcttaacataaattttgatataaaacacgacctggatttaatggtggacacatatattaaactctatacaagtaagtcagagcttcctacagataattccgaaactgtggaaaatacctaagagacttttaaaaataggctttcttatatttgatatttggaagaaaaagccgtaaggtgtatgtagaccacttaatcactaaatatctttgcctataggactccattgaatacattagccattgataatctacctgtttaaatggcccctgtttgaactctcaagctttgaagacctacctgttcttccagaagagaacgttgaaagtgccatgtttccttttgcgtgatctctgttgatggcactctggaattgtttcagttaagtcattttagacatagcatttattatcactgtggatctctacttgttgggtgttatgaattctttgaagaaatatattttgaagaggtgtgggaggaaggaatacattttataaaatgttgtagtgaagcccacaattgacctttgactaataggagttttaagtatgttaaaaatctatactggacagttacaagaaattaccggagaaaagcttgtgagctcaccaaacaaggatttcagtgtagattttgtctttcttgaacttaaagaaacaaatgacaaagtttgaatggaaaagcctgctgttgttccacatctcgttgctgtttacattcctttgtggagcctacatcttcctaagctttttagcaggtatatgttgaacacttctgtttcatggttgagacagaatcagaggccatggatactgacaactgatttgtctgttttttttctctgtctttttccatgactcttatatactgcctcatcttgatttataagcaaaacctggaaaacctacaaaataagtgttgtggtttatctagaaaaatatggaaaatattgctgttatttttggtgaagaaaatcaattttgtatagtttatttcaatctaaataaaatgtgaattttgtttaaagcttaggcacattattttttgtggggtcaaaacattcttgtgtaaattctcttaaacatttgataaacagcttcacaattca

SEQ ID NO: 9045 - protein, 586 aa, Homo sapiens
MGKQNIPLDGHEADEIPEGLFTPDNFQALLECRINSGEEVLRKRFETTAVNTLFCSKTQQRQMLEICESCIREETLREVRDSHFFSIITDDVVDIAGEEHLPVLVRFVDESHNLREEFIGFLPYEADAEILAVKFHTMITEKWGLNMEYCRGQAYIVSSGFSSKMKVVASRLLEKYPQAIYTLCSSCALNMWLAKSVPVMGVSVALGTIEEVCSFFHRSPQLLLELDNVISVLFQNSKERGKELKEICHSQWTGRHDAFEILVELLQALVLCLDGINSDTNIRWNNYIAGRAFVLCSAVSDFDFIVTIVVLKNVLSFTRAFGKNLQGQTSDVFFAAGSLTAVLHSLNEVMENIEVYHEFWFEEATNLATKLDIQMKLPGKFRRAHQGNLESQLTSESYYKETLSVPTVEHIIQELKDIFSEQHLKALKCLSLVPSVMGQLKFNTSEEHHADMYRSDLPNPDTLSAELHCWRIKWKHRGKDIELPSTIYEALHLPDIKFFPNVYALLKVLCILPVMKVENERYENGRKRLKAYLRNTLTDQRSSNLALLNINFDIKHDLDLMVDTYIKLYTSKSELPTDNSETVENT

SEQ ID NO: 9046 - DNA, 3276 bp, Homo sapiens
atgccgaacttctgcgctgcccccaactgcacgcggaagagcacgcagtccgacttggccttcttcaggttcccgcgggaccctgccagatgccagaagtgggtggagaactgtaggagagcagacttagaagataaaacacctgatcagctaaataaacattatcgattatgtgccaaacattttgagacctctatgatctgtagaactagtccttataggacagttcttcgagataatgcaataccaacaatatttgatcttaccagtcatttgaacaacccacatagtagacacagaaaacgaataaaagaactgagtgaagatgaaatcaggacactgaaacagaaaaaaattgatgaaacttctgagcaggaacaaaaacataaagaaaccaacaatagcaatgctcagaaccccagcgaagaagagggtgaagggcaagatgaggacattttacctctaacccttgaagagaaggaaaacaaagaatacctaaaatctctatttgaaatcttgattctgatgggaaagcaaaacatacctctggatggacatgaggctgatgaaatcccagaaggtctctttactccagataactttcaggcactgctggagtgtcggataaattctggtgaagaggttctgagaaagcggtttgagacaacagcagttaacacgttgttttgttcaaaaacacagcagaggcagatgctagagatctgtgagagctgtattcgagaagaaactctcagggaagtgagagactcacacttcttttccattatcactgacgatgtagtggacatagcaggggaagagcacctacctgtgttggtgaggtttgttgatgaatctcataacctaagagaggaatttataggcttcctgccttatgaagccgatgcagaaattttggctgtgaaatttcacactatgataactgagaagtggggattaaatatggagtattgtcgtggccaggcttacattgtctctagtggattttcttccaaaatgaaagttgttgcttctagacttttagagaaatatccccaagctatctacacactctgctcttcctgtgccttaaatatgtggttggcaaaatcagtacctgttatgggagtatctgttgcattaggaacaattgaggaagtttgttcttttttccatcgatcaccacaactgcttttagaacttgacaacgtaatttctgttctttttcagaacagtaaagaaaggggtaaagaactgaaggaaatctgccattctcagtggacaggcaggcatgatgcttttgaaattttagtggaactcctgcaagcacttgttttatgtttagatggtataaatagtgacacaaatattagatggaataactatatagctggccgagcatttgtactctgcagtgcagtgtcagattttgatttcattgttactattgttgttcttaaaaatgtcctatcttttacaagagcctttgggaaaaacctccaggggcaaacctctgatgtcttctttgcggccggtagcttgactgcagtactgcattcactcaacgaagtgatggaaaatattgaagtttatcatgaattttggtttgaggaagccacaaatttggcaaccaaacttgatattcaaatgaaactccctgggaaattccgcagagctcaccagggtaacttggaatctcagctaacctctgagagttactataaagaaaccctaagtgtcccaacagtggagcacattattcaggaacttaaagatatattctcagaacagcacctcaaagctcttaaatgcttatctctggtaccctcagtcatgggacaactcaaattcaatacgtcggaggaacaccatgctgacatgtatagaagtgacttacccaatcctgacacgctgtcagctgagcttcattgttggagaatcaaatggaaacacagggggaaagatatagagcttccgtccaccatctatgaagccctccacctgcctgacatcaagttttttcctaatgtgtatgcattgctgaaggtcctgtgtattcttcctgtgatgaaggttgagaatgagcggtatgaaaatggacgaaagcgtcttaaagcatatttgaggaacactttgacagaccaaaggtcaagtaacttggctttgcttaacataaattttgatataaaacacgacctggatttaatggtggacacatatattaaactctatacaagtaagtcagagcttcctacagataattccgaaactgtggaaaatacctaagagacttttaaaaataggctttcttatatttgatatttggaagaaaaagccgtaaggtgtatgtagaccacttaatcactaaatatctttgcctataggactccattgaatacattagccattgataatctacctgtttaaatggcccctgtttgaactctcaagctttgaagacctacctgttcttccagaagagaacgttgaaagtgccatgtttccttttgcgtgatctctgttgatggcactctggaattgtttcagttaagtcattttagacatagcatttattatcactgtggatctctacttgttgggtgttatgaattctttgaagaaatatattttgaagaggtgtgggaggaaggaatacattttataaaatgttgtagtgaagcccacaattgacctttgactaataggagttttaagtatgttaaaaatctatactggacagttacaagaaattaccggagaaaagcttgtgagctcaccaaacaaggatttcagtgtagattttgtctttcttgaacttaaagaaacaaatgacaaagtttgaatggaaaagcctgctgttgttccacatctcgttgctgtttacattcctttgtggagcctacatcttcctaagctttttagcaggtatatgttgaacacttctgtttcatggttgagacagaatcagaggccatggatactgacaactgatttgtctgttttttttctctgtctttttccatgactcttatatactgcctcatcttgatttataagcaaaacctggaaaacctacaaaataagtgttgtggtttatctagaaaaatatggaaaatattgctgttatttttggtgaagaaaatcaattttgtatagtttatttcaatctaaataaaatgtgaattttgtttaaagcttaggcacattattttttgtggggtcaaaacattcttgtgtaaattctcttaaacatttgataaacagcttcacaattca

SEQ ID NO: 9047 - protein, 761 aa, Homo sapiens; identical to SEQ ID NO: 1315

SEQ ID NO: 9048 - DNA, 2510 bp, Homo sapiens
ttgaaatcttgattctgatgggaaagcaaaacatacctctggatggacatgaggctgatgaaatcccagaaggtctctttactccagataactttcaggcactgctggagtgtcggataaattctggtgaagaggttctgagaaagcggtttgagacaacagcagttaacacgttgttttgttcaaaaacacagcagaggcagatgctagagatctgtgagagctgtattcgagaagaaactctcagggaagtgagagactcacacttcttttccattatcactgacgatgtagtggacatagcaggggaagagcacctacctgtgttggtgaggtttgttgatgaatctcataacctaagagaggaatttataggcttcctgccttatgaagccgatgcagaaattttggctgtgaaatttcacactatgataactgagaagtggggattaaatatggagtattgtcgtggccaggcttacattgtctctagtggattttcttccaaaatgaaagttgttgcttctagacttttagagaaatatccccaagctatctacacactctgctcttcctgtgccttaaatatgtggttggcaaaatcagtacctgttatgggagtatctgttgcattaggaacaattgaggaagtttgttcttttttccatcgatcaccacaactgcttttagaacttgacaacgtaatttctgttctttttcagaacagtaaagaaaggggtaaagaactgaaggaaatctgccattctcagtggacaggcaggcatgatgcttttgaaattttagtggaactcctgcaagcacttgttttatgtttagatggtataaatagtgacacaaatattagatggaataactatatagctggccgagcatttgtactctgcagtgcagtgtcagattttgatttcattgttactattgttgttcttaaaaatgtcctatcttttacaagagcctgggaaattccgcagagctcaccagggtaacttggaatctcagctaacctctgagagttactataaagaaaccctaagtgtcccaacagtggagcacattattcaggaacttaaagatatattctcagaacagcacctcaaagctcttaaatgcttatctctggtaccctcagtcatgggacaactcaaattcaatacgtcggaggaacaccatgctgacatgtatagaagtgacttacccaatcctgacacgctgtcagctgagcttcattgttggagaatcaaatggaaacacagggggaaagatatagagcttccgtccaccatctatgaagccctccacctgcctgacatcaagttttttcctaatgtgtatgcattgctgaaggtcctgtgtattcttcctgtgatgaaggttgagaatgagcggtatgaaaatggacgaaagcgtcttaaagcatatttgaggaacactttgacagaccaaaggtcaagtaacttggctttgcttaacataaattttgatataaaacacgacctggatttaatggtggacacatatattaaactctatacaagtaagtcagagcttcctacagataattccgaaactgtggaaaatacctaagagacttttaaaaataggctttcttatatttgatatttggaagaaaaagccgtaaggtgtatgtagaccacttaatcactaaatatctttgcctataggactccattgaatacattagccattgataatctacctgtttaaatggcccctgtttgaactctcaagctttgaagacctacctgttcttccagaagagaacgttgaaagtgccatgtttccttttgcgtgatctctgttgatggcactctggaattgtttcagttaagtcattttagacatagcatttattatcactgtggatctctacttgttgggtgttatgaattctttgaagaaatatattttgaagaggtgtgggaggaaggaatacattttataaaatgttgtagtgaagcccacaattgacctttgactaataggagttttaagtatgttaaaaatctatactggacagttacaagaaattaccggagaaaagcttgtgagctcaccaaacaaggatttcagtgtagattttgtctttcttgaacttaaagaaacaaatgacaaagtttgaatggaaaagcctgctgttgttccacatctcgttgctgtttacattcctttgtggagcctacatcttcctaagctttttagcaggtatatgttgaacacttctgtttcatggttgagacagaatcagaggccatggatactgacaactgatttgtctgttttttttctctgtctttttccatgactcttatatactgcctcatcttgatttataagcaaaacctggaaaacctacaaaataagtgttgtggtttatctagaaaaatatggaaaatattgctgttatttttggtgaagaaaatcaattttgtatagtttatttcaatctaaataaaatgtgaattttgttt

SEQ ID NO: 9049 - protein, 329 aa, Homo sapiens; identical to SEQ ID NO: 9043

SEQ ID NO: 9050 - DNA, 6792 bp, Homo sapiens
ttatagacgtgagccaccggcctcctccatatgaatttgaaagtccttttgtcaagttctcctagaacttcttttgggattttcattataattgctttgaattgacatctttacaatattagctattgtaaatttattactagtttagtattactgttagtaaacgaatattactagtttactgttacagtataaactattgtaaagtattaactagttctatccatgaagagaaaaaaaatcccataaaatacctatcaaataacagcaatcattgacaaaactaaatactagttttttgaaaagaatattagaatacttttaggagtacagaaaacgaaaaattttgagagcttttgttacagttgtttaaatgagaatgtatgcattcttagatcacttcttaaatacattatggttcttactggtatagatgatatattctggttgaaattgtttccagcacttttgaagaacttctttttaagttaatcctagtaagtcttctgagtttttcctctgttactgattgtatcatctgcaaataaggagaaatttgtctctttcagttcttattattttaattttttctgttgcctgtcttgtttagtcaagatccctggtactatgttgaacaattctagtaatgtcatacttgccttgccccattaagtataatgtttgctgttggtattgttagatagtttttatcaagttaaggaaattcccttctactcccatattcagagttttgttgtttttttttaagatggggtctcactctgtcacccaagccagagtgcagtggggcagacactgctcactgcagcctccacctcctgggctgaagcaatcctcttacctcagcctcccaagtagctgggaccacaggtgtgtgccaccatgcctggcttatttttttgtatttttttttatagatggagtcatgccatgttgcccagtttggtctcaaactcctgggctcaagcagtcctcttacctcagctccccaaagtgctgggattacaatagtgagccaccacgcctgacctatattctgtttttatatttaacttatcacatgctttcattgcatgtatttaatagacaagttcatttttttcattctttaatgcaataagtaatactaatggattttctgtgaaccatctgcatttctgtaatgaactctagttgactgcaatatgtctatttgcttttatataccattggattcaattggtcaatattttatttaggattttacatttgtgaatcttggtctgtagccttcttttcatgtactcttattacccagttataatatcaaggttctattggcctcataaaataagttgggtatcttttttttttttttctcctagaaaaatttgtgtaggtagatgttatctgctcttgaaagtaaggtagaacttggtaaaaccattagatggcttgcggtggatgagggaaagttttgattgccattctgctatctttattggttttctttctttcttgtgttttgttaatgtttctaaaagtttatgaaactttaataatcttttcaaagaaccagtagttttgtcagtgattgttgtacttatgaactattttattggtttttctttgattagggtgatttattttttgactctttttctagcttcttgaatgtttagctcatatttatgtgtattcaaagctataaaagtctctcttaggtccattttagctataccctacaactttagacatatagtgttgtcatgtctggctgtaggtattttgtaatttctctattttgttaacataggattgtttttcttagtttccagatgtggaattatttttaattgctatatgatattttaaattttaaatgttattaagagatacgtagaggatacatatagtctatgtgatgttgattctttctgatttttttgcatccattattgctattcaagtctgtgccagcctgattcttgttcctttttaggtaatcttcttttctccctcaaagctttttagaaggtttctttatatttgacattttaaaatttgctaacctgtatctagatgtgagttttttttttatgtaccttaatttgtcatcttacaactgaggacttacaccttaaattctgagaaatccttagtttttatttttctttatgcattttcccctctatttgtttatttctattttcctgggacttagatgaatactgacacttacattacagtcctccatatcagctttcttcttggtgtccatggaggactgattccaggagcttccctcagagagcaaaatccacagatacttgattcccttatatacagtggtgtagtatttgcatataacttacacacatcctcccgtgactttaaatcatttataatacctaatacaatgtagtgctatgtaaatagttgttctgttacattgtttagagaataatgacaagaacaaaaatctgtgtgttcagtatagacacaaccatccttttcttttttttttttttgagacagagtctcgctcttgttgcccaggctggagtgcaagggtgcgatctcagctcaccgcaacctccgcctcccgggttcaagcaattctcctgcctcagccccccgagtagctgggatcacaggcatgtgccaccacgcccggctctttttgtatttttagtagagacgagggttctccatgttggtcaggctggtcttgaactcccgacctcaggtgatcctcccgcctcagcttcccaaagtgctgggattacagacgtgagccaccatgcccggcacaaccatccattttcaaataatacctagattatttatgatacttaatacatttatgtgtttgtaacacctactacaatgtaaatgctatgtaaatagttatgctacgttatgtaggggaagaatgagaaaaaaagtctgtacatgttcaagatagatacaaccatccattttttccccagcattttcaatgcatggttggttaaatccatagatatgaagtgtaatatgtatcaggatgaggagctcaatcacttgctgtcctgtagctatcatttccctgtagtctgtccctcagagagcctcacatatctcacagcaggcatactcttcctgacccaccatccttataaacgtgcagtccgtaggataaggaggggatgtccaggttgaccagcctgctgatgtttcttgttatcagcaccatgtccagtgctgcccaacaggcatcctgctgtcttcagctgtcactggcattgctgcttttctgccacagaaagtaacaggtggctcatgatttaagcattgtagagggttggaaggaaagtaaaggatgcagctggaaagttcttcctttgtctaaccctattggtgccacttggcctactatgctctgtgtatgctctgtgtatctcttccatgctggtactttcaccttctgcttctcagggatttctcatcacttttgtgttgagtcctgagattcagcaacctccttcttatgggacatctccagggttaaattgggaagtaagatgatttgtgtcctcttgaatttaactccaagtgccatggtgtatttttgtgcctttcattagccagtaaacacttataacccaaagttacgatgatttaggtagaaaataagcaaaatgatgtattcttttttccctaagactttgttataaccttggagtcattaacagcttattctggttttctcattgtctgtttgtttgaagaatgtgtactatataaagaatttatgctcttgaaagaattaaattgactcagaataggcatttgtatttgtgagtctaagatgatacactagaggtcagttttttaaagatgatttgtttttttctttttttttcttgacatttagagtgaagatgaaatcaggacactgaaacagaaaaaaattgatgaaacttctgagcaggaacaaaaacataaagaaaccaacaatagcaatgctcagaaccccagcgaagaagagggtgaagggcaagatgaggacattttacctctaacccttgaagagaaggaaaacaaagaatacctaaaatctctatttgaaatcttgattctgatgggaaagcaaaacatacctctggatggacatgaggctgatgaaatcccagaaggtctctttactccagataactttcaggcactgctggagtgtcggataaattctggtgaagaggttctgagaaagcggtttgagacaacagcagttaacacgttgttttgttcaaaaacacagcagaggcagatgctagagatctgtgagagctgtattcgagaagaaactctcagggaagtgagagactcacacttcttttccattatcactgacgatgtagtggacatagcaggggaagagcacctacctgtgttggtgaggtttgttgatgaatctcataacctaagagaggaatttataggcttcctgccttatgaagccgatgcagaaattttggctgtgaaatttcacactatgataactgagaagtggggattaaatatggagtattgtcgtggccaggcttacattgtctctagtggattttcttccaaaatgaaagttgttgcttctagacttttagagaaatatccccaagctatctacacactctgctcttcctgtgccttaaatatgtggttggcaaaatcagtacctgttatgggagtatctgttgcattaggaacaattgaggaagtttgttcttttttccatcgatcaccacaactgcttttagaacttgacaacgtaatttctgttctttttcagaacagtaaagaaaggggtaaagaactgaaggaaatctgccattctcagtggacaggcaggcatgatgcttttgaaattttagtggaactcctgcaagcacttgttttatgtttagatggtataaatagtgacacaaatattagatggaataactatatagctggccgagcatttgtactctgcagtgcagtgtcagattttgatttcattgttactattgttgttcttaaaaatgtcctatcttttacaagagcctttgggaaaaacctccaggggcaaacctctgatgtcttctttgcggccggtagcttgactgcagtactgcattcactcaacgaagtgatggaaaatattgaagtttatcatgaattttggtttgaggaagccacaaatttggcaaccaaacttgatattcaaatgaaactccctgggaaattccgcagagctcaccagggtaacttggaatctcagctaacctctgagagttactataaagaaaccctaagtgtcccaacagtggagcacattattcaggaacttaaagatatattctcagaacagcacctcaaagctcttaaatgcttatctctggtaccctcagtcatgggacaactcaaattcaatacgtcggaggaacaccatgctgacatgtatagaagtgacttacccaatcctgacacgctgtcagctgagcttcattgttggagaatcaaatggaaacacagggggaaagatatagagcttccgtccaccatctatgaagccctccacctgcctgacatcaagttttttcctaatgtgtatgcattgctgaaggtcctgtgtattcttcctgtgatgaaggttgagaatgagcggtatgaaaatggacgaaagcgtcttaaagcatatttgaggaacactttgacagaccaaaggtcaagtaacttggctttgcttaacataaattttgatataaaacacgacctggatttaatggtggacacatatattaaactctatacaagtaagtcagagcttcctacagataattccgaaactgtggaaaatacctaagagacttttaaaaataggctttcttatatttgatatttggaagaaaaagccgtaaggtgtatgtagaccacttaatcactaaatatctttgcctataggactccattgaatacattagccattgataatctacctgtttaaatggcccctgtttgaactctcaagctttgaagacctacctgttcttccagaagagaacgttgaaagtgccatgtttccttttgcgtgatctctgttgatggcactctggaattgtttcagttaagtcattttagacatagcatttattatcactgtggatctctacttgttgggtgttatgaattctttgaagaaatatattttgaagaggtgtgggaggaaggaatacattttataaaatgttgtagtgaagcccacaattgacctttgactaataggagttttaagtatgttaaaaatctatactggacagttacaagaaattaccggagaaaagcttgtgagctcaccaaacaaggatttcagtgtagattttgtctttcttgaacttaaagaaacaaatgacaaagtttgaatggaaaagcctgctgttgttccacatctcgttgctgtttacattcctttgtggagcctacatcttcctaagctttttagcaggtatatgttgaacacttctgtttcatggttgagacagaatcagaggccatggatactgacaactgatttgtctgttttttttctctgtctttttccatgactcttatatactgcctcatcttgatttataagcaaaacctggaaaacctacaaaataagtgttgtggtttatctagaaaaatatggaaaatattgctgttatttttggtgaagaaaatcaattttgtatagtttatttcaatctaaataaaatgtgaattttgttt

SEQ ID NO: 9051 - protein, 586 aa, Homo sapiens; identical to SEQ ID NO: 9045

SEQ ID NO: 9052 - DNA, 3464 bp, Homo sapiens
cgtctcgggcgggcgggaggtgcaccagcggcggcggcggcggtaaatcctcccggccgctcacagcactgtggagccgcgtccccagcccggcctcggaccgcggcacccctcctggccctcgcggcttctagcccgcccgcccctcccccgcgcgtcggccctgccgagccggccggccggcctggctcccctccccggccccgacgggcgggcggactgccctgaggaggcggggaggggagggctgggccggccggcgggcgggcgacgatgccgaacttctgcgctgcccccaactgcacgcggaagagcacgcagtccgacttggccttcttcaggttcccgcgggaccctgccagatgccagaagtgggtggagaactgtaggagagcagacttagaagataaaacacctgatcagctaaataaacattatcgattatgtgccaaacattttgagacctctatgatctgtagaactagtccttataggacagttcttcgagataatgcaataccaacaatatttgatcttaccagtcatttgaacaacccacatagtagacacagaaaacgaataaaagaactgagtgaagatgaaatcaggacactgaaacagaaaaaaattgatgaaacttctgagcaggaacaaaaacataaagaaaccaacaatagcaatgctcagaaccccagcgaagaagagggtgaagggcaagatgaggacattttacctctaacccttgaagagaaggaaaacaaagaatacctaaaatctctatttgaaatcttgattctgatgggaaagcaaaacatacctctggatggacatgaggctgatgaaatcccagaaggtctctttactccagataactttcaggcactgctggagtgtcggataaattctggtgaagaggttctgagaaagcggtttgagacaacagcagttaacacgttgttttgttcaaaaacacagcagaggcagatgctagagatctgtgagagctgtattcgagaagaaactctcagggaagtgagagactcacacttcttttccattatcactgacgatgtagtggacatagcaggggaagagcacctacctgtgttggtgaggtttgttgatgaatctcataacctaagagaggaatttataggcttcctgccttatgaagccgatgcagaaattttggctgtgaaatttcacactatgataactgagaagtggggattaaatatggagtattgtcgtggccaggcttacattgtctctagtggattttcttccaaaatgaaagttgttgcttctagacttttagagaaatatccccaagctatctacacactctgctcttcctgtgccttaaatatgtggttggcaaaatcagtacctgttatgggagtatctgttgcattaggaacaattgaggaagtttgttcttttttccatcgatcaccacaactgcttttagaacttgacaacgtaatttctgttctttttcagaacagtaaagaaaggggtaaagaactgaaggaaatctgccattctcagtggacaggcaggcatgatgcttttgaaattttagtggaactcctgcaagcacttgttttatgtttagatggtataaatagtgacacaaatattagatggaataactatatagctggccgagcatttgtactctgcagtgcagtgtcagattttgatttcattgttactattgttgttcttaaaaatgtcctatcttttacaagagcctttgggaaaaacctccaggggcaaacctctgatgtcttctttgcggccggtagcttgactgcagtactgcattcactcaacgaagtgatggaaaatattgaagtttatcatgaattttggtttgaggaagccacaaatttggcaaccaaacttgatattcaaatgaaactccctgggaaattccgcagagctcaccagggtaacttggaatctcagctaacctctgagagttactataaagaaaccctaagtgtcccaacagtggagcacattattcaggaacttaaagatatattctcagaacagcacctcaaagctcttaaatgcttatctctggtaccctcagtcatgggacaactcaaattcaatacgtcggaggaacaccatgctgacatgtatagaagtgacttacccaatcctgacacgctgtcagctgagcttcattgttggagaatcaaatggaaacacagggggaaagatatagagcttccgtccaccatctatgaagccctccacctgcctgacatcaagttttttcctaatgtgtatgcattgctgaaggtcctgtgtattcttcctgtgatgaaggttgagaatgagcggtatgaaaatggacgaaagcgtcttaaagcatatttgaggaacactttgacagaccaaaggtcaagtaacttggctttgcttaacataaattttgatataaaacacgacctggatttaatggtggacacatatattaaactctatacaagtaagtcagagcttcctacagataattccgaaactgtggaaaatacctaagagacttttaaaaataggctttcttatatttgatatttggaagaaaaagccgtaaggtgtatgtagaccacttaatcactaaatatctttgcctataggactccattgaatacattagccattgataatctacctgtttaaatggcccctgtttgaactctcaagctttgaagacctacctgttcttccagaagagaacgttgaaagtgccatgtttccttttgcgtgatctctgttgatggcactctggaattgtttcagttaagtcattttagacatagcatttattatcactgtggatctctacttgttgggtgttatgaattctttgaagaaatatattttgaagaggtgtgggaggaaggaatacattttataaaatgttgtagtgaagcccacaattgacctttgactaataggagttttaagtatgttaaaaatctatactggacagttacaagaaattaccggagaaaagcttgtgagctcaccaaacaaggatttcagtgtagattttgtctttcttgaacttaaagaaacaaatgacaaagtttgaatggaaaagcctgctgttgttccacatctcgttgctgtttacattcctttgtggagcctacatcttcctaagctttttagcaggtatatgttgaacacttctgtttcatggttgagacagaatcagaggccatggatactgacaactgatttgtctgttttttttctctgtctttttccatgactcttatatactgcctcatcttgatttataagcaaaacctggaaaacctacaaaataagtgttgtggtttatctagaaaaatatggaaaatattgctgttatttttggtgaagaaaatcaattttgtatagtttatttcaatctaaataaaatgtgaattttgttt

SEQ ID NO: 9053 - protein, 761 aa, Homo sapiens; identical to SEQ ID NO: 1315

SEQ ID NO: 9054 - DNA, 686 bp, Homo sapiens
cgtctcgggcgggcgggaggtgcaccagcggcggcggcggcggtaaatcctcccggccgctcacagcactgtggagccgcgtccccagcccggcctcggaccgcggcacccctcctggccctcgcggcttctagcccgcccgcccctcccccgcgcgtcggccctgccgagccggccggccggcctggctcccctccccggccccgacgggcgggcggactgccctgaggaggcggggaggggagggctgggccggccggcgggcgggcgacgatgccgaacttctgcgctgcccccaactgcacgcggaagagcacgcagtccgacttggccttcttcaggttcccgcgggaccctgccagatgccagaagtgggtggagaactgtaggagagcagacttagaagataaaacacctgatcagctaaataaacattatcgattatgtgccaaacattttgagacctctatgatctgtagaactatacattttgcagaggcatcagaaaactaaagaatgattgggttattttatttctcaaaattaattgaagcagatacttgtgaagtcattgggagagtccttataggacagttcttcgagataatgcaataccaacaatatttgatcttaccagtcatttgaacaacccacatagtagacacagaaaacgaataaaagaactg

SEQ ID NO: 9055 - protein, 79 aa, Homo sapiens
MPNFCAAPNCTRKSTQSDLAFFRFPRDPARCQKWVENCRRADLEDKTPDQLNKHYRLCAKHFETSMICRTIHFAEASEN

SEQ ID NO: 9056 - DNA, 1016 bp, Homo sapiens
gtaattcctgagttctaagatttttaaccctctgtgattctcttgctgtgatttataaaaggcacaaataaggcaaatttgattgaaatgaagcagacttgtttcagtgtaactaatgtaacacctcagatattgggatagacataaacttgattcaaaggtacactatatgttgttatgcagcaatttattttgatatttttttcagatacattttgcagaggcatcagaaaactaaagaatgattgggttattttatttctcaaaattaattgaagcagatacttgtgaagtcattgggaggtgagccaattccggttcaacagtttaatcacaaatatttgaggaatatttttgccttgatttgttaaaagggtaataatgatcaaccaaaataaaaggtttcatatgtttaaaaggcaaactacttttatgttcttgacatgaagtaaaaatatcccaaattattttaaatacatttgccatatgcatttttgcatttttattttagtaataaatatggtctcttaattagataattctaaccagattgtgagaaatttaaaggatagttcattcttacattctttagttagagaatagaacagaaagatgagccaggtttgcttttttaatttctaaatgattcttcaatcttgaataaatgaacgcaaatgtgagaaaatgttctttctatacgtctaggagatgttgttattaaaaactggatttctgggctggatatggtagctcacacctgtaatcccagcactttgggaggctgaggcgggcagatcatttgcggtcaggagtttgagaccagcctggccaacggggaaaccccttctctactaaaaataccaaacaaaacaaaacaaaaaaaattttgctgggcatggcggtgcacacgtgtaatcccagctgctcaggaggctgaaacaggagagattgcttgagcctaggaattcagagccagcctgggcaacatggtggtgagaccctgtctttaaacagac

SEQ ID NO: 9057 - protein, 32 aa, Homo sapiens
MQQFILIFFSDTFCRGIRKLKNDWVILFLKIN

SEQ ID NO: 9058 - DNA, 1147 bp, Homo sapiens
gccgcagtgcgactgcgcacagtctaatccgcggggagagagaattgcgcatgcgcgcctgtctcccgggacgctagagcaggcggttcctgggctgctccggtaggtttggcgtgcgcgggtttctgcagatctagggcgagcttgcacgttacatcaccgatgcatctcttcttgcttgcttaatttgccaccacttaggcctttcttgcagaattcgccatatactccttaagggccgcggaatcggagcgaccttggtgactggcaaactctcggcagatgtgcgtgcactggtttgatgcagacgtggttgtaggcgatttaatttttcccagctttgcagcgactgttggcttcccagaacggatctccccagcctcgactggaagctgagggacaaaaattcataaaagcaattactctttcccggcgaggcttctagaagagcaagaagagcgatatgattacacctgcagccctataaagattgatctgtccgtctttcccttacagtcgtggcctgttaaacgttcctgtgttgttcagtgccagaatgagtgaccgctatttagaacaaaggattagtatcaaattttgcgtgaaattgaacaagtctgcaagtgagacccaccatcttttaaaagaagcttatggggatgaagtcatgtcaagggccagagtttttgactggcacaaaaggtttaaagaaggacgggaagatgttcgagatgatgcccgaagtgggcgtccagtcacccaccgaacagatgacaatatccagaaggtcaaggacttggtttgttcaaacaggcagttaaccgtgaggatgatggctgaagagttaaatttagacaaagaaactgttaggctcattttgaaagaaaacttgaacatgaggaagatttctgcaaaagttatttcgggtgttttgaagggtgagcctaaaccacgaaaacttgactttcggtccgatctttcaaaggaaactaggaaaaatagctcatgtttgaggaaaaaggatgtttttcttctctactagcccaggacctcctaaaagccaagcccacatctgattgttccatgttccctgcatccagaataaaccttgcgtggaactgctcaataaatgtttgatagatgaatg

SEQ ID NO: 9059 - protein, 161 aa, Homo sapiens
MSDRYLEQRISIKFCVKLNKSASETHHLLKEAYGDEVMSRARVFDWHKRFKEGREDVRDDARSGRPVTHRTDDNIQKVKDLVCSNRQLTVRMMAEELNLDKETVRLILKENLNMRKISAKVISGVLKGEPKPRKLDFRSDLSKETRKNSSCLRKKDVFLLY

SEQ ID NO: 9060 - DNA, 1310 bp, Homo sapiens
gccgcagtgcgactgcgcacagtctaatccgcggggagagagaattgcgcatgcgcgcctgtctcccgggacgctagagcaggcggttcctgggctgctccggtaggtttggcgtgcgcgggtttctgcagatctagggcgagcttgcacgttacatcaccgatgcatctcttcttgcttgcttaatttgccaccacttaggcctttcttgcagaattcgccatatactccttaagggccgcggaatcggagcgaccttggtgactggcaaactctcggcagatgtgcgtgcactggtttgatgcagacgtggttgtaggcgatttaatttttcccagctttgcagcgactgttggcttcccagaacggatctccccagcctcgactggaagctgagggacaaaaattcataaaagcaattactctttcccggcgaggcttctagaagagcaagaagagcgatatgattacacctgcagccctataaagattgatctgtccgtctttcccttacagtcgtggcctgttaaacgttcctgtgttgttcagtgccagaatgagtgaccgctatttagaacaaaggattagtatcaaattttgcgtgaaattgaacaagtctgcaagtgagacccaccatcttttaaaagaagcttatggggatgaagtcatgtcaagggccagagtttttgactggcacaaaaggtttaaagaaggacgggaagatgttcgagatgatgcccgaagtgggcgtccagtcacccaccgaacagatgacaatatccagaaggtcaaggacttggtttgttcaaacaggcagttaaccgtgaggatgatggctgaagagttaaatttagacaaagaaactgttaggctcattttgaaagaaaacttgaacatgaggaagatttctgcaaaagttatttcgggtgttttgaagggtgagcctaaaccacgaaaacttgactttcggtccgatctttcaaaggaaactaggaaaaatagctcatgtttgaggaaaaagagacggaacctcactatgttgcccaggctggtctcgaactccttgtctcaagggatcctcccaccttggcctcccaaagctctgggattatcagcatgagccaccatgccaagccaaaaccaggagttcaatggtgtaaattccagtctgagtccacaggccgaagagcgaggagtgctgatgtacaagggcaggagaagatggatgtcacagctcaagaagcgagaacaaatttgcccttctatctttttgttctattcaggtcctcaatgaattggatgatgtccat

SEQ ID NO: 9061 - protein, 187 aa, Homo sapiens
MSDRYLEQRISIKFCVKLNKSASETHHLLKEAYGDEVMSRARVFDWHKRFKEGREDVRDDARSGRPVTHRTDDNIQKVKDLVCSNRQLTVRMMAEELNLDKETVRLILKENLNMRKISAKVISGVLKGEPKPRKLDFRSDLSKETRKNSSCLRKKRRNLTMLPRLVSNSLSQGILPPWPPKALGLSA

SEQ ID NO: 9062 - DNA, 5408 bp, Homo sapiens
gccgcagtgcgactgcgcacagtctaatccgcggggagagagaattgcgcatgcgcgcctgtctcccgggacgctagagcaggcggttcctgggctgctccggtaggtttggcgtgcgcgggtttctgcagatctagggcgagcttgcacgttacatcaccgatgcatctcttcttgcttgcttaatttgccaccacttaggcctttcttgcagaattcgccatatactccttaagggccgcggaatcggagcgaccttggtgactggcaaactctcggcagatgtgcgtgcactggtttgatgcagacgtggttgtaggcgatttaatttttcccagctttgcagcgactgttggcttcccagaacggatctccccagcctcgactggaagctgagggacaaaaattcataaaagcaattactctttcccggcgaggcttctagaagagcaagaagagcgatatgattacacctgcagccctataaagattgatctgtccgtctttcccttacagtcgtggcctgttaaacgttcctgtgttgttcagtgccagaatgagtgaccgctatttagaacaaaggattagtatcaaattttgcgtgaaattgaacaagtctgcaagtgagacccaccatcttttaaaagaagcttatggggatgaagtcatgtcaagggccagagtttttgactggcacaaaaggtttaaagaaggacgggaagatgttcgagatgatgcccgaagtgggcgtccagtcacccaccgaacagatgacaatatccagaaggtcaaggacttggtttgttcaaacaggcagttaaccgtgaggatgatggctgaagagttaaatttagacaaagaaactgttaggctcattttgaaagaaaacttgaacatgaggaagatttctgcaaaagttatttcgggtgttttgaaggagacggaacctcactatgttgcccaggctggtctcgaactccttgtctcaagggatcctcccaccttggcctcccaaagctctgggattatcagcatgagccaccatgccaagccaaaaccaggagttcaatggtgtaaattccagtctgagtccacaggccgaagagcgaggagtgctgatgtacaagggcaggagaagatggatgtcacagctcaagaagcgagaacaaatttgcccttctatctttttgttctattcaggtcctcaatgaattggatgatgtccatgcacattagggagggctgcctcttcattactcggtctaccaattcaaatgctaatctcttccggaaacatccccacagacacacccagaaataatgttttcccatctatctcagtaccccatgatccagtcaagtgaacatataaaattggctgtcacatctccattttgtttatttatttacttatttattttagactagttaagttcagtagtgagaaagagggaaggaatagaacgaggagttcaatctgtgactgacagtgaacaattgattgagataactcactacctttggaccagccatctccattttataaataagaaaactgaagctcagaaaggttgtctaaactgccaaagccatagaactttaagtgcggaaataggttttgtgttcaatctgcttctctataaaatcccatacaggacatccaggcatctaaaaggtagctcagtatctctgccttctctccattgttagccttgatggacaatttttgctggagcaaatattctgaaaaagattcctcctgtttcctatgggagtagacagcaagcaggtgaagccgggctctcttgagcctgggaccccccggtaggagcatttggctggaaagatgtggaagtcaataagcatttcctccaccacccagaagcatctccaagctcaggcaggaggtgggcagtgaaggggaataccaagcatcctgcacatcaggtagaaggaggaagcccaggccatggcaggacttacctgttgagtcctgctgggtttgggcaatgtctcagcagagactggcatactctcaggcttttcacttccttccttagactgggggcgcctcttgccctgtgcatcttgcacaaagcctggtcctgagtaggtgccctgcaaaggtgcaggggatcaatgggggtgactgagtctaactgaagaaaaagaaggcatttcaagtctctataggttggggactttaatgagtgtaaatagctaccctttattgagcattgtttatgtgtggacactttttatgcatgtatattggaatatttttagctgtaagtaatgataactaacagtgacttaaataagtagttattttctggcataataagaattccaaaggtgctcctttggtctttccatcttggttacaagatggctgtgacaccctgccctcacctccaagttcaaggcaggcaggggttgggaggtgcggacagttcagactcagcagtcctgtttcatcaggaaagcaaaagctctcccagtaactcccagcagagttctactaaatctcattggcccaagggagctgcagtggtaggtaacaaggagcaaatggcttttgggtagccagtcaacagggtctgccatgtgcatagaaagcacagtatgtatttggcatggagtcggtactcaataagcattagctatttggcgtgcctgtgtgtgtttgtgtgtctgcgtgtggttatatgtatattttccattttcccaaacagtccttggaagtagcatcctcctttactaatgggacctaacacacagctggcaaaaggcacagttagagccacacatcagactcatttctttctgactgaagtctgagggctctttccattgccatgctatgttccaccctccccttcaactgcccctctaaagtcttgtcttggagtcacatgaggtccaagtgggcttgatgaagaaagaatagggaaggagatcagatcagtactgttgtccaggctggagcgcagttgattgtagctcactgcagcctccaactccatggctcaagtgatcctcctgcctcagccttccaagtagctaggacaacaggtgcgtgctaccatgcatggctaattaattaaaagaattttttttggtagagacagggtctcactatgttgcccaggctggtcttgaactcctgggctccagtgatcctcccccttcagcctcccaaagtgctagaattacaggcattagccaccatgcctggcctggagatcagttcttttttacttttttttgagacaggctctccctatgtcaccgaggctacagtgcagtggttcaatcgcagctcactgtagcctctatctcctgggctcaagtgatcctcccacctcagcctcctgagtagctgggactagaggcatgtatcaccatgcccagctaatttttgcattttttgtagagtcagggtttcaccctgttgcccactctggtctcaaactcctgggctcaaccaatctgcccacctaggcctcccaaaatgctgggactataggtgtgagccactgcacctggcctggagctcagttctgaaataagttgacacctgtccctggggctatccacagagtaacgatgaagtcatgagaggaggttcaataactgtgtgctagagtcatacctccacctgagtgcagccactttggaatggtcaggctagaaggttcagcctttattctgatgatgccactactgcccagaactcctctgggactctttgcaagttgcaaaagacctcaatctcattactgtaatattgcacctcatttctgaccccaaacccagctgcagcttctcatctcacgaatttcaagtgacttttgactattgccaaaaatcaaaaatcattccctgaaaacagaatctattgtaatttagatgcaaaagaatgtgttgtctgctttgcagccaattttcaaataaaaaagaaatgtttaaagcagtggaagcactgtttaaataaatatgccgggccaggcgtggtggctcacgcctgtaatcccagcactttaggaggccaaggcgggtcgatcacgaagtcaggagatcgagaccaacctggctaacacagtgaaaccccgtctctaccaaaaatacaaaaaattagctgggagtggtggcgggtgcctgtagtcccagctatttgggaggctgaggcaggagaatggcaagaacctgggaggcggagcttgcagtgagccaaggtcacaccactgcactccagcctgggctacagagcgagactctgtctcaaaaaataaataaaataaaataaaataaataaataaataaatatgccctcccaggttgacatcttggaagaggataactctaagtttggttgtataatttctgctgtgtttaagaaaaattacttaacttgtgagacattatgaaaaggatgctggacttggtaaagatacaaatgggcttataatgttggtcaggtgagacatgttgcattggtgaaattataaattgatattgttttctcagagcaatttcgcaatgagcatcacgaagctttaaagagtttaaaccacaccggtcacagtggttcacgcctgtaatcccaatactttgggaggccgaggtgggcagatcacaagtcaggagctagagaccagcctggtcaacatggtgaaaccccttctctactaaaaatacaaaaattagctgggtgtggtggtgcatgcctgtaatcccagctactcgggaggctgaggcaggagcatcgcttgaacctgggaggtggaggttgcagtgagctgagatcgcaccactgcactccagcctgggcggcagagcaagactccctctcaaaaaaaaaaaaaaaaaaaaaaaaaaagaatttaagccagttgacctaggaatcttctaggacgatttcttaggaatctttcttaggaaaacagtcagagatgcagacaaagatttatgtaacagccattcattgcagacttatttgtaaaagtagtaaaaagaaggaaataacccaaatgtcccacaatggagaaattgttaagaaaattacagcatactcattaagtgaaataatgcagctatttaagatgatgtttttaaagaactgtcaatgatgtttgaagatgttcacaataagataggtgataaaacagactataaaaccacatgcattatatagtcccatttttactttctgtatgctaaaacaaacccctcaagatagatccaaaacattaccagtggtttgatctgggtgatgaaattataagtgattttaaacttgcttcattatgcttttatatatataatttttcttattataacaataaatattacttttgtagttagaaaatatgtataatgaacattaaaattacttgttaagaaag

SEQ ID NO: 9063 - protein, 254 aa, Homo sapiens
MSDRYLEQRISIKFCVKLNKSASETHHLLKEAYGDEVMSRARVFDWHKRFKEGREDVRDDARSGRPVTHRTDDNIQKVKDLVCSNRQLTVRMMAEELNLDKETVRLILKENLNMRKISAKVISGVLKETEPHYVAQAGLELLVSRDPPTLASQSSGIISMSHHAKPKPGVQWCKFQSESTGRRARSADVQGQEKMDVTAQEARTNLPFYLFVLFRSSMNWMMSMHIREGCLFITRSTNSNANLFRKHPHRHTQK

SEQ ID NO: 9064 - DNA, 4228 bp, Homo sapiens
agaattgcgcatgcgcgcctgtctcccgggacgctagagcaggcggttcctgggctgctccgagacggaacctcactatgttgcccaggctggtctcgaactccttgtctcaagggatcctcccaccttggcctcccaaagctctgggattatcagcatgagccaccatgccaagccaaaaccaggagttcaatggtgtaaattccagtctgagtccacaggccgaagagcgaggagtgctgatgtacaagggcaggagaagatggatgtcacagctcaagaagcgagaacaaatttgcccttctatctttttgttctattcagcccaggatccctgggacaggaagcagcagcagttaaacagtcacacatcagtgctccagcaagtgaactgaggtgcatccaactaaggagcagatccaggaccagaggaaataaaattatctgggagcagggccaggaaggtgctggtctgcacggtcgatgcattttcaacgagcagtgattctgttcctcatctttcattgctttatgggacttcagggaatgaaagcataacatcctgctttcccataagttctctggctgctacactggcaccaattaaagacatgtctatgcaattaatcaaaaccaatttggaagcactctggtgctgctcctctgatgtgctgcctgctccacatacagtagttcctcagctgcggtgatggagccaggcacataggagcttttgatgaactggctgtactggccccaagtgttaactatgtcatctgacatgactaatgaggctccggacttgatccgcgtgagcggagcagccctgctgtctggaggaggctcagtttccacagccagcctgggaagaggctgcaacgtgcagggtacacactgcatcatgtcagctggagtcctagaggcctctagcgttggagctgggagtcatccatggagagggtgatggaaactgtgggccaggctctgtgttgggcgccagtgtgaatgtgacccaatttaaacttctagctcagcctcctcattttagacctgaaaatcaagacccagcaaaagtgtgaggcttgccaaagacctgaactttggagagagaaatgatggagaaagcagggtctctgccctagatgagaggtaaatatgtatgagggtaacaactggggcctggtgcaagtatacttcatcaagggttaaccataggcttcctttcttccttctgcaaacctttatcaaggggaagggttgcttgtgcccttgtcacctcagcaattccaagagcatggaatttggagtcaacagatctgtgtttgagtcccagccctactttgagttgatgtaatcttgcaaatcacttcatttttctgagccttggtttcctcagctgtaacattggaataggccatatactgcccagccagcctacctccatgagcccttctgtgactcaactgagttaatgggtgtgaaagtgtaagtaagagcctctgcacgtgttagttattattccagttttcatccccctaaggagcactggctgaaatctctggaatatggatccacagatagctttaactctcttcctcttcctgcctctttcaaatggacataaaaaccaattggtcatccgcctaaaatctcaacagctttcccagagagcccatgcatagaaagaggaagaactcaaccgttgtaaattaatgtcattccatacattgattgagcacctaccacatgccagacattgtgtgagggatcggagttggataagacatgtttcttggccaccttgagaagctcaccatttagtaggagaaacagagctgggcataaataactataatgtactgcagacaaatgcaattgccataggaaagatacaaatcaagtgttttgggagccagaggatggagtgattcattccccaaaaggagactggaaaaaggttcatcaacgaagtggtactgaaggatgggcagggcttagctctgtcaggaagaacgaggcagggcactccagacagagagaccagcataggcaaatgtatgaaatctggaaaggaatggtgatctaaaggacagaataaaatcaagtaaggtattgggagtgagcatgaatcaaagaaaaatcactgcaccccaactctgaaactcaggcataaatgttgctgtttcactgttctctttgctggctgaggtcaccttggcctctgtccctcagtcagagaaaatcccacactggcccttcctccagcaaagccaaacccaagccccagccagcagaagcaaaaacaaatgaacagggatcaacaataccattagatgcaaaaattcttgagctgggaaggccaggtcacagccatacctccccagccagggtaacagcttgatcagatgtggcaatgacaccaaccctggagcacgatggcaaggaacttaacttaagcctcttggcatgggtcacaggctacatttttctccttcccccctcatccaaaagaagctagcttcttctttatgagtgctgctgtcagaatggctttggaaagcctagagctgcagctgaactcaaggcatggccatgggccaccccagggacttgtattttctcagtctttctatctttcgttgcgaattttttttattgtgcaaataatacagtgttaagaacggaaacttcaagaagagaaagaggaaagagagcatccactcacatgtcatctgtttccatttctccttgccctttcctgctgttgtccatgagcataattttttggccgcttttattactgatacaactacgtattctgtttttattgcttagccttgtatcatacaaggctacttattgccagcccctggtgtccacactggcttggcattgttctcccaagactgaaaaaatatgccaggtgtcatgtaaagggactttccgcagataacatgatcgccattgacaactggcatcatgtggcagaggaaaagcttcgaccgctctgccatcatgttgacttgggttggaatctcagctcctctacttcgaagctagatggccctgggcagatcattccatctctttgagccacagttcctcatctataagatggggatggcattagtaccatcttatgatactaatgggatcacagtgagaattaagtgagataccaaaaggggaatgctcaataaagagcagctctccttcccaacccttgaggggctgacctagacaccactctgctttttcctctcttgcccacatttggccacctcccctcccctggacccagcaggccccctgggtgagcccacctaaattatgacaggcataccagtctgcatatttattattcactgggtgaatttgctatcttttacttaagtattttcctctgatgaaacttttgtttttgtccagtttttcactatttccaataatgatgcaaaaaaaaataccagtgtgtgccgctcaccctatgctttaaaaattgtattttctcagaaacaatccccaggagtaggatcactgagatagaggatagaaacattttcaaggtttctgatgtgtatttccaaattgcttttcagatttgtacctgttatgctgccaccaatttgagggagggaaccacttaggctacattggaggccgctgggccctggtcacaaacttctgtctctgctttatttctaccattgtcttctcttaacatggctcctgaacttctcactctatgggacaattcattgtttgtccccaaaatgatgctcccatacttttgtgcctttgtacttcctattagtcttcaccacccttgcccaagaatattcttcctttaagataccctctcaccttagagctcaacctttgtggaactgggaacttctatactctcttcaagacccagttcaaacacccctctctccgtgaaccagttccaatccccccaagcagagttcgtcacttttgttataagtggtacctggaggaacccttggcatccaagtgttcaccaagagtcagccatcccctaacctcagctacaggccccagttttcgtgattctctcttctcttttcctctctcactctttgcaccaggcaatctcaccaggttttcccaactcatgtcctaaatattcttagatccacttatctttgcctcatggtcattgccagagctatcacctctccaggattcctgcaatggtccccac

SEQ ID NO: 9065 - protein, 115 aa, Homo sapiens
MSHHAKPKPGVQWCKFQSESTGRRARSADVQGQEKMDVTAQEARTNLPFYLFVLFSPGSLGQEAAAVKQSHISAPASELRCIQLRSRSRTRGNKIIWEQGQEGAGLHGRCIFNEQ

SEQ ID NO: 9066 - DNA, 2899 bp, Homo sapiens
acttaggcctttcttgcagaattcgccatatactccttaagggccgcggaatcggagcgaccttggtgactggcaaactctcggcagatgtgcgtgcactggtttgatgcagacgtggttgtaggcgatttaatttttcccagctttgcagcgactgttggcttcccagaacggatctccccagcctcgactggaagctgagggacaaaaattcataaaagcaattactctttcccggcgaggcttctagaagagcaagaagagcgatatgattacacctgcagccctataaagattgatctgtccgtctttcccttacagtcgtggcctgttaaacgttcctgtgttgttcagtgccagaatgagtgaccgctatttagaacaaaggattagtatcaaattttgcgtgaaattgaacaagtctgcaagtgagacccaccatcttttaaaagaagcttatggggatgaagtcatgtcaagggccagagtttttgactggcacaaaaggtttaaagaaggacgggaagatgttcgagatgatgcccgaagtgggcgtccagtcacccaccgaacagatgacaatatccagaaggtcaaggacttggtttgttcaaacaggcagttaaccgtgaggatgatggctgaagagttaaatttagacaaagaaactgttaggctcattttgaaagaaaacttgaacatgaggaagatttctgcaaaagttatttcgggtgttttgaagggtgagcctaaaccacgaaaacttgactttcggtccgatctttcaaaggaaactaggaaaaatagctcatgtttgaggaaaaaggtaacaggttctgaaacatggagttatctccagggtgaagctggtggggaaatgcccctgccggtatcccatcccagagtccactactctgccagtcagcttctgcaggcgtcatcttcaacaagccttccccccagggtagctgagaattggttcaccccatggtgagaggaatgtgagttagctgaaccagaactaggatgctgcctcactgttaggcaccttctttggctgctcacgtatttttcagtcttcaccactcctccctatgtgccatggccctcctcattactctttgctggactcttggaccattttccttgctgttctccataactttgaaaaacttttggctgttcccttctggtatttgcttgttcttgatttcttttgctcaacaagtttggatttcttctctgcccagaccttagcttgttgtggctgtcctgttcctttgttctcaaccttctgcctcagaggatcatgccagtgagaagagaggaacaggatctcctggaatctgtatctctgtgcccagggaagcatgcttttctgggaggaccccaaaagaaggcttacagtttcagcctgctttgcagtcagggcctgaggtatggtacagaaggtagtagcatgctggtattactgaacagtgctgggcctaggggctgatctggcccagatgactcagtaggcacccttaggaatcaggggttggccaccaatactgatcttctcacaggcctacacctcacagaagagctgggtttgtttcattctagtcctatgctttggacctccactcatttgggtatcacccctgttggaagaggaggatctggtgctagaaaatataaacccggggacccaggcaaggctgtgttgtgtggggaggaagaccaggtggctctctagtccctgaattaagggagcctgctgcctatgtgcggattcccacacagcagcctgtttttagtaactaatgcctatagttttgagaacttgctgtttttaggacactgctgggcattgacaatgtggaggttatgaacaagatctccaagggctgatgggcttcatggatgagatggttcttgaactggatccatgaggatgggtgagacagggctgtgaaattagggaaagcttccggggcaggtggaacagcatgaggcttccaacctgcatcagtagaaaatgacactggccaggtgtggtgaatcacgcctgtaatcccagcactttgggagactgaggtgggtggatcacaaggtcaagagatcgagaccatcctggccaacatggtgaaaccccgtctctactaaaaatacaaaaattagctgggcgtggtggtgcacacctgtagtcccaactactcaggaggctgaggcaggagaatctgttgaacccggaaggcagaggttgcagtgagtggagattgcgccactgtactccaacctggcgacagagctagactctgtcccaaaaaaaaaaaaaaggaattagaaaatgatgacactattggctaaaataacaaagtttaaagaggaagataatggtgttgcagcagatgaacaatttgggataatttgctttctctcctaagcctccaactctatgccacttgttgttaaattgcttcccctgagtctgtgaataggtttgtaacaaccaatttgatatctgattttccatttggaccccgacaagcagtttctgcaagttcaaactctgtctcttctcttcctgcctctgccaggatttatggaatggaacttttcccaagtgggttccaagtaataccacatagactggaaacattcagggggcaggggtttggtaatagcatttcacagaattggccagtctttgttttactcaaggatttttagatataacagctcctcttaaacaatattgcttgatagtagaggcacaacactcattcatcacagttacttttagtgctgttctttcactttctctactcacctccaaaaattacaagttcctcattaacacctgtttttgttttgttttgttttttgagatggagtcttgctctgctgccca

SEQ ID NO: 9067 - protein, 210 aa, Homo sapiens
MSDRYLEQRISIKFCVKLNKSASETHHLLKEAYGDEVMSRARVFDWHKRFKEGREDVRDDARSGRPVTHRTDDNIQKVKDLVCSNRQLTVRMMAEELNLDKETVRLILKENLNMRKISAKVISGVLKGEPKPRKLDFRSDLSKETRKNSSCLRKKVTGSETWSYLQGEAGGEMPLPVSHPRVHYSASQLLQASSSTSLPPRVAENWFTPW

SEQ ID NO: 9068 - DNA, 711 bp, Homo sapiens
gagaagagaggaacaggatctcctggaatctgtatctctgtgcccagggaagcatgcttttctgggaggaccccaaaagaaggcttacagtttcagcctgctttgcagtcagggcctgagcccaggatccctgggacaggaagcagcagcagttaaacagtcacacatcagtgctccagcaagtgaactgaggtgcatccaactaaggagcagatccaggaccagaggaaataaaattatctgggagcagggccaggaaggtgctggtctgcacggtcgatgcattttcaacgagcagtgattctgttcctcatctttcattgctttatgggacttcagggaatgaaagcataacatcctgctttcccataagttctctggctgctacactggcaccaattaaagacatgtctatgcaattaatcaaaaccaatttggaagcactctggtgctgctcctctgatgtgctgcctgctccacatacagtagttcctcagctgcggtgatggagccaggcacataggagcttttgatgaactggctgtactggccccaagtgttaactatgtcatctgacatgactaatgaggctccggacttgatccgcgtgagcggagcagccctgctgtctggaggaggctcagtttccacagccagcctgggaagaggctgcaacgtgcagggtacacactgcatcatgtcagctggagt

SEQ ID NO: 9069 - protein, 58 aa, Homo sapiens
MNWLYWPQVLTMSSDMTNEAPDLIRVSGAALLSGGGSVSTASLGRGCNVQGTHCIMSA

SEQ ID NO: 9070 - DNA, 692 bp, Homo sapiens
gcggccaagatggcgctagcggttggagcaggggctctgctgcgacctttacggtagtgaggttagggacgatgggagagcagctttgttcctgaagtgccgtcgaggattaggatcgagtttcttcgatcgtgagggcaattattagtggcctctagccccccagatggcatcttgaggagagagaatccacgctacgagaactaacatagtggacatcgcagttgtccgtagccgatttgcgggttacggagttgttgcaagtaaagaaggggaaatccgagcgttctcgcgttggatttcctccacgtgtgaagtgggaatggtagtgatatctcgtgctatctctgtcaagggcaagaaggagaaggaatttatttgaggccctacgacgtggtgcggtggctcacgcctgtaatcccaacactttgggaggccgaggcaggcggatcatctgagatcgagagttcgagaccagcttgaccaacatggagaaaccccgtctctactaaaagtacaaaattagccaggcatggtggcacatgcccgtaatcccagctactcgggaggctgaggcaggagagtagcttgagcccaggaggcggaggttgtggtgagccgagatcgcgccattgcacagcctgggcaacgagcgaaactccatctcaaaaaaataaataaaaattttttta

SEQ ID NO: 9071 - protein, 55 aa, Homo sapiens
SGNGSDISCYLCQGQEGEGIYLRPYDVVRWLTPVIPTLWEAEAGGSSEIESSRPA

SEQ ID NO: 9072 - DNA, 755 bp, Homo sapiens
gtggcgtcacacgtagcggccaagatggcgctagcggttggagcaggggctctgctgcgacctttacggtagtgaggttagggacgatgggagagcagctttgttcctgaagtgccgtcgaggattaggatcgagtttcttcgatcgtgagggcaattattagtggcctctagccccccagatggcatcttgaggagagagaatccacgctacgagaactaacatagtggacatcgcagttgtccgtagccgatttgcgggttacggagttgttgcaagtaaagaaggggaaatccgagcgttctcgcgttggatttcctccacgtgtgaagtgggaatggtagtgatatctcgtgctatctctgtcaagggcaagaaggagaaggaatttatttgaggccctacgacgtggtaggttcaccctcagcctttgttcttatttcatcttatttgtggagaaggtcttttcgttcctattttacaggtgcggtggctcacgcctgtaatcccaacactttgggaggccgaggcaggcggatcatctgagatcgagagttcgagaccagcttgaccaacatggagaaaccccgtctctactaaaagtacaaaattagccaggcatggtggcacatgcccgtaatcccagctactcgggaggctgaggcaggagagtagcttgagcccaggaggcggaggttgtggtgagccgagatcgcgccattgcacagcctgggcaacgagcgaaactccatctc

SEQ ID NO: 9073 - protein, 71 aa, Homo sapiens
SGNGSDISCYLCQGQEGEGIYLRPYDVVGSPSAFVLISSYLWRRSFRSYFTGAVAHACNPNTLGGRGRRII

SEQ ID NO: 9074 - DNA, 931 bp, Homo sapiens
gtcgccatcttgccccttcagaggcaccgcaaacaaacccaattcctggtgtcccctagtcttggcggaggagccttttagatgagccccgaaaggccgggcagggaggacaagctctttggggctaccaaacagaagcagcaatgcctgttgtgtggccaacccttctggatctcagcagggatgaatgcaaaagaattcttcgaaaattggaattggaggcatatgctggagttatcagtgcacttcgggcacagggggatctcaccaaggaaaagaaagatcttcttggagaactatcaaaagttcttagcatctcaacagaacgccaccgtgctgaagttcggagagcagtaaacgatgaacggttaacaacaattgcacataagtaagccattagtcgtaccatccctgattttttatgacatagtataacacagttttgaaacagtcttcctattgtgtagcagattcctgagtcttttaagtaacaatatctctatactcagggatcctgatcatagcagtaaaagtgatattaactgtttattcagttgggtttttttttgcatttggttaggcaagctttaagtactcaggtcaaatcctgttacaatgtaatctctgtctaactaaaaatcaccacaatttagcagatgattcacttacttgaggccaagttcagtaacaaagtattgtgacccctaaaattgaaagccctttagaggttctttgtaatggtatttgatatgttattaccttataaataggcgttgtaacttttttgatatctgactcattatttcatgtattttgagattcagaaaaaaatgtaaaatttgtgttctgtctttaagaaatatgaatataacatctcttaatttatttttaaaaagccaaaaaaataaaacgattaaagattcttaccaaa

SEQ ID NO: 9075 - protein, 91 aa, Homo sapiens [sequence omitted]

SEQ ID NO: 9076 - DNA, 5517 bp, Homo sapiens
gtcgccatcttgccccttcagaggcaccgcaaacaaacccaattcctggtgtcccctagtcttggcggaggagccttttagatgagccccgaaaggccgggcagggaggacaagctctttggggctaccaaacagaagcagcaatgcctgttgtgtggccaacccttctggatctcagcagggatgaatgcaaaagaattcttcgaaaattggaattggaggcatatgctggagttatcagtgcacttcgggcacagggggatctcaccaaggaaaagaaagatcttcttggagaactatcaaaagttcttagcatctcaacagaacgccaccgtgctgaagttcggagagcagtaaacgatgaacggttaacaacaattgcacataatatgtctggacctaatagctcttcagaatggtccattgaaggtcgtcgattggtaccactgatgccccggctcgttccccaaaccgcctttactgtaacagctaatgctgttgctaatgcagctatccagcataatgcatctcttccagtgcctgcagaaacaggaagcaaggaagtagtggtttgctattcctacacaagtaccacgtcaaccccaacctctacccctgttccaagtggcagcatagcaacggttaagtctccaagacctgccagtcctgcctccaatgtagttgtcttgccaagtggaagtactgtttatgtcaaaagtgtaagctgttcagatgaagatgaaaaacccagaaaacgaaggcgaacaaactcttccagctcctctcctgttgttctaaaggaagttccaaaggccgttgttccagtctcaaagacgatcactgtgcctgtgagtggtagtcccaagatgagcaacatcatgcagagcattgccaactccttaccaccccacatgtctcctgtaaaaataaccttcactaaaccatcaacacagacaacaaacacaacaacacagaaggttattatagtcaccacatcaccaagctcaaccttcgtgcccaacattctctccaaatcccataactatgcagcagtcactaagcttgtaccaacgtcagtcattgcttctacaacccagaagccaccagttgttataactgcttcacagtcctctctggtcagtaatagcagcagtggcagcagcagttctacaccatcacctattcctaatacagttgcagtaacagctgtggtgtcctctacaccatctgtggtcatgtcaacagtagcacaaggtgtatctacatcagcaatcaaaatggcatcaaccagacttccttcccccaaaagcttagtgagtgccccaactcagattcttgcacagttccctaaacaacatcaacagtctcctaagcagcagttatatcaagtgcaacagcagacacagcaacaagtggcccagccttctccagtatctcatcagcaacagcctcagcagtctcctttgccacctggtattaaacctaccatccaaatcaaacaggagtcaggtgttaaaatcatcacacaacaggttcaaccaagtaaaatcttacccaaaccagtgacagcaactctacccaccagtagcaattcccctattatggtggttagcagtaatggtgcaattatgacaactaaactggtaaccactcctactggcacacaagcaacctatacccggccaacagtgagcccatccattggtcggatggctgcaacccctggagctgcaacctatgtgaaaactacgagtggtagcatcattacagtagtacccaaatcattagctaccttggggggcaagataattagcagtaatatagtttctggaacgactaccaaaatcactacaatcccaatgacttccaagcccaacgtgattgttgtacaaaagactacaggaaaaggaacgaccattcaaggcctcccgggcaaaaatgttgtcacaacgttgctaaatgctggaggagaaaagactattcagacagtgccaacaggagcaaagccagctatccttactgctacaagacccatcaccaaaatgattgtaacgcagccaaaaggaataggttctacagttcaaccagcagctaaaatcatcccaacaaaaattgtttatgggcagcaagggaaaacgcaggttcttattaaacccaaaccagtgacttttcaagcgacagttgttagtgaacaaacaagacagctagtaacagaaacattacagcaagcatccagggtagcagaggctggtaattcatctattcaggaaggaaaagaagaaccacagaattatacagatagtagttcctcttctacagagtcctcccagagttcccaagattcccagcctgtagttcatgtaattgcttcccggcgtcaggattggtcagaacatgagattgcaatggagactagccctaccataatttatcaggatgtatccagtgaatcacaatcagctacttcaacaatcaaagctctgttagaactccaacagacaacagtaaaggaaaaattggaatctaaaccaagacaacccactattgacctgagtcaaatggcagtgcctattcagatgacccaggaaaagagacattctcctgagagtccatcaattgctgtggtagagtcagaactagtagctgaatacatcactactgaacgcactgatgaggggacagaggttgcttttccccttctagtcagccatcgctcccagccccaacagccttcccagccccagcggaccctgctccagcatgtggctcagtcacagaccgcaacacagacttcggtggtggtgaagtccatcccagcatcttcccctggagcaatcacccacattatgcagcaggcattaagcagtcacactgcttttaccaaacacagcgaggaacttggaactgaggagggcgaggttgaagagatggacactttagaccctcagacaggtctgttttaccgatctgccctgactcagtcacagtcagctaaacagcagaaacttagccagcccccgctggaacagactcagctgcaagtgaaaactctgcagtgcttccagactaaacagaagcagaccatccacctgcaggcagaccagctccagcacaaactcccgcaaatgccccagctttccatcaggcatcaaaaactcacccctctccagcaagaacaagcacagcccaagccagatgtacagcacacacagcatcccatggtggccaaagacaggcagcttcctaccttaatggcacagcccccgcaaactgtagtacaggtgcttgcagtgaaaaccacgcagcagctccctaaactgcagcaggctccgaaccaaccaaaaatctacgtgcaaccccaaaccccccagagccaaatgtcgctcccagcttcttcagagaaacagacggcaagccaggtggagcagccaattataacccaaggatcctctgttacaaagataacttttgaggggcgccagcctcccacagttacaaagataactggtggcagttctgtgcctaagctgacatcaccagttacaagcatatctcccattcaggcctctgagaagacagcagtgtctgacattttgaaaatgtctttgatggaagctcagattgatacaaatgtagaacatatgatagtggatcccccaaagaaggctcttgccactagcatgctcactggtgaagcaggatcattaccctccacccacatggtggtggcagggatggcgaattccactccccagcaacagaaatgtagagagtcctgttcgagtccatccactgttggctcttccctaacgacaaggaaaattgatccaccagcagtgcctgcgacaggccagttcatgcgtattcagaatgtaggccaaaagaaagctgaagagagtccagcagaaattatcatccaggctattcctcagtatgctattccttgtcactccagctccaatgtggtggtggagcccagtgggcttcttgagctaaacaacttcactagtcaacagctggatgatgaggagacagcaatggagcaggacatagacagtagcacggaggatggaactgaacccagcccttctcagagctctgctgaacggtcctagtgtttggacacaatagtgcactttaaaacctgcttggttaccaagtgtccagggaaacccttgtattttgatgactaaaaagagcactttgcccgtacttaggctgtggaccctaaaacagcagtgtttcaacaagatgttgctgcaggagcagctttttaaaacaagataaaactcacaggggaatgtacttttttaaaaaaaaatgaaaaagaaaaaaaaagctgcacatttacagtgacttaagacctggtcttctttctctgttggatcatggccggtgaaacagttttgtcttgcagtggaaagagacttcctgtgaatgtttctcaactggtttctactgagcaaaataccatctaaaaggagaatgtgaatagttgtattttgaaatgatgtgtcaggaaaagttttttaaaaacttgtatgtttttgcaaatccctggaagtgttgaattggttaaaattttacattttctcagttcataattagtttataaacacctagaataatactggcattaaagaatccttgttggatggtagaaatcagatccctaaccagtgggaggtactttttgggtggcttgtgcattcttatcagttgtgtgctaatttattgtattgttcctttgtgctctaagcagcacacttgccttctatttatttaagtgtaaacatttcaaagcaggccgtactccttctgacaaatttcttgtaaaccaggattgcctacgctttccactgtcgtcgtctccccactttccctcttcctttaagaaaacttactaaaaaatgtttcattgcgaagcagaggaaaagaaacgttttcagacctaaaggaaatgtttggtcatgttaagaaaacaaattattcattcatatgatgctttcttaacgttgaaattgcacattcacattggactgagactttgaaaataacttttacatacttttgtttaagcccctttgaaatgtataaaaagttcatttacagttctaaatgtaatgtttttaagccttctatctttttaggacacagtttgtttaagcaatatgttttggtcttgtgatcactgtctgtcacaagtagagtgaaaggggtaagggggtgggagggtaagagttttgacaagttgtggcaaaggaaactatacttttcatttttaaaaatgtaaatagaaaagtttttaacggttttatatagatttcactataaataagcattttaagactgacaaatgttgaactgtacatacatttatcagcataactgcccagtttttttggtgctgaagtactgtaagtagaattcatcaacggtctcctaatttttgcatctacatctggggggaaaaagctgtgatactatagttaataaattcccactagagtgacactg

SEQ ID NO: 9077 - protein, 1323 aa, Homo sapiens
MPVVWPTLLDLSRDECKRILRKLELEAYAGVISALRAQGDLTKEKKDLLGELSKVLSISTERHRAEVRRAVNDERLTTIAHNMSGPNSSSEWSIEGRRLVPLMPRLVPQTAFTVTANAVANAAIQHNASLPVPAETGSKEVVVCYSYTSTTSTPTSTPVPSGSIATVKSPRPASPASNVVVLPSGSTVYVKSVSCSDEDEKPRKRRRTNSSSSSPVVLKEVPKAVVPVSKTITVPVSGSPKMSNIMQSIANSLPPHMSPVKITFTKPSTQTTNTTTQKVIIVTTSPSSTFVPNILSKSHNYAAVTKLVPTSVIASTTQKPPVVITASQSSLVSNSSSGSSSSTPSPIPNTVAVTAVVSSTPSVVMSTVAQGVSTSAIKMASTRLPSPKSLVSAPTQILAQFPKQHQQSPKQQLYQVQQQTQQQVAQPSPVSHQQQPQQSPLPPGIKPTIQIKQESGVKIITQQVQPSKILPKPVTATLPTSSNSPIMVVSSNGAIMTTKLVTTPTGTQATYTRPTVSPSIGRMAATPGAATYVKTTSGSIITVVPKSLATLGGKIISSNIVSGTTTKITTIPMTSKPNVIVVQKTTGKGTTIQGLPGKNVVTTLLNAGGEKTIQTVPTGAKPAILTATRPITKMIVTQPKGIGSTVQPAAKIIPTKIVYGQQGKTQVLIKPKPVTFQATVVSEQTRQLVTETLQQASRVAEAGNSSIQEGKEEPQNYTDSSSSSTESSQSSQDSQPVVHVIASRRQDWSEHEIAMETSPTIIYQDVSSESQSATSTIKALLELQQTTVKEKLESKPRQPTIDLSQMAVPIQMTQEKRHSPESPSIAVVESELVAEYITTERTDEGTEVAFPLLVSHRSQPQQPSQPQRTLLQHVAQSQTATQTSVVVKSIPASSPGAITHIMQQALSSHTAFTKHSEELGTEEGEVEEMDTLDPQTGLFYRSALTQSQSAKQQKLSQPPLEQTQLQVKTLQCFQTKQKQTIHLQADQLQHKLPQMPQLSIRHQKLTPLQQEQAQPKPDVQHTQHPMVAKDRQLPTLMAQPPQTVVQVLAVKTTQQLPKLQQAPNQPKIYVQPQTPQSQMSLPASSEKQTASQVEQPIITQGSSVTKITFEGRQPPTVTKITGGSSVPKLTSPVTSISPIQASEKTAVSDILKMSLMEAQIDTNVEHMIVDPPKKALATSMLTGEAGSLPSTHMVVAGMANSTPQQQKCRESCSSPSTVGSSLTTRKIDPPAVPATGQFMRIQNVGQKKAEESPAEIIIQAIPQYAIPCHSSSNVVVEPSGLLELNNFTSQQLDDEETAMEQDIDSSTEDGTEPSPSQSSAERS

SEQ ID NO: 9078 - DNA, 3189 bp, Homo sapiens
atcttgccccttcagaggcaccgcaaacaaacccaattcctggtgtcccctagtcttggcggaggagccttttagatgagccccgaaaggccgggcagggaggacaagctctttggggctaccaaacagaagcagcaatgcctgttgtgtggccaacccttctggatctcagcagggatgaatgcaaaagaattcttcgaaaattggaattggaggcatatgctggagttatcagtgcacttcgggcacagggggatctcaccaaggaaaagaaagatcttcttggagaactatcaaaagttcttagcatctcaacagaacgccaccgtgctgaagttcggagagcagtaaacgatgaacggttaacaacaattgcacataatatgtctggacctaatagctcttcagaatggtccattgaaggtcgtcgattggtaccactgatgccccggctcgttccccaaaccgcctttactgtaacagctaatgctgttgctaatgcagctatccagcataatgcatctcttccagtgcctgcagaaacaggaagcaaggaaggtgagtagaaaaatatgcctgtgttagagattacttttcttagaatcttcaagaaaatttcaagaaaagttgtcttatttttcatctacttttattctagtgtttaaaggttatgaaacatagtaggaaactctaattctgaaattagactgccaggtttttagccttagacaaaatttagtctcccttttgtcgaaggtgtgaattatgttaatcatcaaaattgcaaaaacctcggaatagatttttgatatcagtgtgtcttgttaaaaatgaatagaaggccttaatggatgacattagaaaataaataaggtaacagaagtcatttagctactaaaaaatgattctgaactgatagctttagaaaataaagctgttttcattttctggaatcagtgatatatgctacttctttgttctggttaatgaatgtgctgaatccattccctggcagaagggttttatcattatttatctagtaattgacacatgctttaaaaatcctccaatgctctagaggccaccaagagtaatattaaatttgagagagcatatttggattgactcaagtagtttagtttgatgttgcatgacaatgaccctaaaaacaatgcatttgtcaggttactctggggaattgtctttgcttacctagcaatggccatggaacagagtaagacactttttttatgcatgacaggctctgttttagggtgagaaaaggtatatttggaggaagacagtgtataaacttggcctccatcgagttcttccatctactgacgctcaggtagagtggaaagaatacagagtttccactagtcaaatccatgtttgaatcttaatttgtcatttcctagctgtatgacctccagcaagtttgagcttctgtgagccttgggttcctcatctttaaaatgagaatgtgatgttgtgagaattagtgaagatgtatggaaaggatttagtgtgtggtactcaataaatggtgcctataacctattcttactgttgtttagctgtatcccttcgttgaatgataggttgaaatatgatgttgtcattattttagttgagttgttgtgctgcttggatggcaatgactagcgagttgatttatagaaaagaacgtttccttgattgttccctagtggccacattggaaattgctaaggttagggaaaaattatccacccatatcattggtgctgctattagtattaaaagggaatacaagtaagtgcctgttgtcccactcctgccatgagtgaaaattattttcattttttctcagtataattttaaactttatttctttgtaactgtgtttttctccgtcagcaatgtcacctgtagacaagctgttaaatacttgggaaaaatctatttaagtgataattttcaggaaaggttattaatgccttttaatctgtggacctaatacctagtactggcctctgacttctgatcacatgaaaatgttaaaattggcctgcaataaaaataatttttttgtatgcctggacagttttggtgaaagttaacagcaaacttttttatcgttccttcagtagtggtttgctattcctacacaagtaccacgtcaaccccaacctctacccctgttccaagtggcagcatagcaacggttaagtctccaagacctgccagtcctgcctccaatgtagttgtcttgccaagtggaagtactgtttatgtcaaaagtaagtgatattctcagtgttatcagggccttcttggctaaatgctgcagtctaggctctgattagacctgccttcctggattaaatcattggtccactagctgttagtaggttagtttttgaagattttaaagaattcctttctttacatatgactaggtatatattgcttttttaatcagttctggggtttcagaagtgacttcattttcattgtctgtgggtaatctgcctttgaactgtgttatccttaagaattcacttttttgattgtcatgaaatagaaatattgtgaatagaaactgaaggaatgtgcttatgtaatttattcaatatttctcctataattttaatctttgtagtattttcttagattattttatataatgtattatccagctgttatattcagtgaaacattctagagagcctatctttatttctaattgactgtaatttttgaagtttcttttgtttgtagtttttaattccttgattctaccctatgaagcagtttggtgtcctgttcatttttttttcatttttttgtttttaatttctgttaagacaatgttgctttatatatacattttgtaatttataaagaaaaggggccgggcacggtggctcacgcgtgtaatcctagcactttgggaggccgaggcgggcgaatcatctgaggtcaggagttcaagaccagcctggccaacctgacgaaacctcgtctctactaaaaatacaacaacaacaaaaagttagctgggcgtggtgacacatgcctgtagtcccagctactcgggaggccgagacaggaaaattgcttgaacccgggaggcagaggttgcagtgagccgagattgcgccactgcactccaccctgggcgacagagcaagactctgtctc

SEQ ID NO: 9079 - protein, 142 aa, Homo sapiens
MPVVWPTLLDLSRDECKRILRKLELEAYAGVISALRAQGDLTKEKKDLLGELSKVLSISTERHRAEVRRAVNDERLTTIAHNMSGPNSSSEWSIEGRRLVPLMPRLVPQTAFTVTANAVANAAIQHNASLPVPAETGSKEGE

SEQ ID NO: 9080 - DNA, 5214 bp, Homo sapiens
atcttgccccttcagaggcaccgcaaacaaacccaattcctggtgtcccctagtcttggcggaggagccttttagatgagccccgaaaggccgggcagggaggacaagctctttggggctaccaaacagaagcagcaatgcctgttgtgtggccaacccttctggatctcagcagggatgaatgcaaaagaattcttcgaaaattggaattggaggcatatgctggagttatcagtgcacttcgggcacagggggatctcaccaaggaaaagaaagatcttcttggagaactatcaaaagttcttagcatctcaacagaacgccaccgtgctgaagttcggagagcagtaaacgatgaacggttaacaacaattgcacataatatgtctggacctaatagctcttcagaatggtccattgaaggtcgtcgattggtaccactgatgccccggctcgttccccaaaccgcctttactgtaacagctaatgctgttgctaatgcagctatccagcataatgcatctcttccagtgcctgcagaaacaggaagcaaggaagtagtggtttgctattcctacacaagtaccacgtcaaccccaacctctacccctgttccaagtggcagcatagcaacggttaagtctccaagacctgccagtcctgcctccaatgtagttgtcttgccaagtggaagtactgtttatgtcaaaagtgtaagctgttcagatgaagatgaaaaacccagaaaacgaaggcgaacaaactcttccagctcctctcctgttgttctaaaggaagttccaaaggccgttgttccagtctcaaagacgatcactgtgcctgtgagtggtagtcccaagatgagcaacatcatgcagagcattgccaactccttaccaccccacatgtctcctgtaaaaataaccttcactaaaccatcaacacagacaacaaacacaacaacacagaaggttattatagtcaccacatcaccaagctcaaccttcgtgcccaacattctctccaaatcccataactatgcagcagtcactaagcttgtaccaacgtcagtcattgcttctacaacccagaagccaccagttgttataactgcttcacagtcctctctggtcagtaatagcagcagtggcagcagcagttctacaccatcacctattcctaatacagttgcagtaacagctgtggtgtcctctacaccatctgtggtcatgtcaacagtagcacaaggtgttaaaatcatcacacaacaggttcaaccaagtaaaatcttacccaaaccagtgacagcaactctacccaccagtagcaattcccctattatggtggttagcagtaatggtgcaattatgacaactaaactggtaaccactcctactggcacacaagcaacctatacccggccaacagtgagcccatccattggtcggatggctgcaacccctggagctgcaacctatgtgaaaactacgagtggtagcatcattacagtagtacccaaatcattagctaccttggggggcaagataattagcagtaatatagtttctggaacgactaccaaaatcactacaatcccaatgacttccaagcccaacgtgattgttgtacaaaagactacaggaaaaggaacgaccattcaaggcctcccgggcaaaaatgttgtcacaacgttgctaaatgctggaggagaaaagactattcagacagtgccaacaggagcaaagccagctatccttactgctacaagacccatcaccaaaatgattgtaacgcagccaaaaggaataggttctacagttcaaccagcagctaaaatcatcccaacaaaaattgtttatgggcagcaagggaaaacgcaggttcttattaaacccaaaccagtgacttttcaagcgacagttgttagtgaacaaacaagacagctagtaacagaaacattacagcaagcatccagggtagcagaggctggtaattcatctattcaggaaggaaaagaagaaccacagaattatacagatagtagttcctcttctacagagtcctcccagagttcccaagattcccagcctgtagttcatgtaattgcttcccggcgtcaggattggtcagaacatgagattgcaatggagactagccctaccataatttatcaggatgtatccagtgaatcacaatcagctacttcaacaatcaaagctctgttagaactccaacagacaacagtaaaggaaaaattggaatctaaaccaagacaacccactattgacctgagtcaaatggcagtgcctattcagatgacccaggaaaagagacattctcctgagagtccatcaattgctgtggtagagtcagaactagtagctgaatacatcactactgtcagccatcgctcccagccccaacagccttcccagccccagcggaccctgctccagcatgtggctcagtcacagaccgcaacacagacttcggtggtggtgaagtccatcccagcatcttcccctggagcaatcacccacattatgcagcaggcattaagcagtcacactgcttttaccaaacacagcgaggaacttggaactgaggagggcgaggttgaagagatggacactttagaccctcagacaggtctgttttaccgatctgccctgactcagtcacagtcagctaaacagcagaaacttagccagcccccgctggaacagactcagctgcaagtgaaaactctgcagtgcttccagactaaacagaagcagaccatccacctgcaggcagaccagctccagcacaaactcccgcaaatgccccagctttccatcaggcatcaaaaactcacccctctccagcaagaacaagcacagcccaagccagatgtacagcacacacagcatcccatggtggccaaagacaggcagcttcctaccttaatggcacagcccccgcaaactgtagtacaggtgcttgcagtgaaaaccacgcagcagctccctaaactgcagcaggctccgaaccaaccaaaaatctacgtgcaaccccaaaccccccagagccaaatgtcgctcccagcttcttcagagaaacagacggcaagccaggtggagcagccaattataacccaaggatcctctgttacaaagataacttttgaggggcgccagcctcccacagttacaaagataactggtggcagttctgtgcctaagctgacatcaccagttacaagcatatctcccattcaggcctctgagaagacagcagtgtctgacattttgaaaatgtctttgatggaagctcagattgatacaaatgtagaacatatgatagtggatcccccaaagaaggctcttgccactagcatgctcactggtgaagcaggatcattaccctccacccacatggtggtggcagggatggcgaattccactccccagcaacagaaatgtagagagtcctgttcgagtccatccactgttggctcttccctaacgacaaggaaaattgatccaccagcagtgcctgcgacaggccagttcatgcgtattcagaatgtaggccaaaagaaagctgaagagagtccagcagaaattatcatccaggctattcctcagtatgctattccttgtcactccagctccaatgtggtggtggagcccagtgggcttcttgagctaaacaacttcactagtcaacagctggatgatgaggagacagcaatggagcaggacatagacagtagcacggaggatggaactgaacccagcccttctcagagctctgctgaacggtcctagtgtttggacacaatagtgcactttaaaacctgcttggttaccaagtgtccagggaaacccttgtattttgatgactaaaaagagcactttgcccgtacttaggctgtggaccctaaaacagcagtgtttcaacaagatgttgctgcaggagcagctttttaaaacaagataaaactcacaggggaatgtacttttttaaaaaaaaatgaaaaagaaaaaaaaagctgcacatttacagtgacttaagacctggtcttctttctctgttggatcatggccggtgaaacagttttgtcttgcagtggaaagagacttcctgtgaatgtttctcaactggtttctactgagcaaaataccatctaaaaggagaatgtgaatagttgtattttgaaatgatgtgtcaggaaaagttttttaaaaacttgtatgtttttgcaaatccctggaagtgttgaattggttaaaattttacattttctcagttcataattagtttataaacacctagaataatactggcattaaagaatccttgttggatggtagaaatcagatccctaaccagtgggaggtactttttgggtggcttgtgcattcttatcagttgtgtgctaatttattgtattgttcctttgtgctctaagcagcacacttgccttctatttatttaagtgtaaacatttcaaagcaggccgtactccttctgacaaatttcttgtaaaccaggattgcctacgctttccactgtcgtcgtctccccactttccctcttcctttaagaaaacttactaaaaaatgtttcattgcgaagcagaggaaaagaaacgttttcagacctaaaggaaatgtttggtcatgttaagaaaacaaattattcattcatatgatgctttcttaacgttgaaattgcacattcacattggactgagactttgaaaataacttttacatacttttgtttaagcccctttgaaatgtataaaaagttcatttacagttctaaatgtaatgtttttaagccttctatctttttaggacacagtttgtttaagcaatatgttttggtcttgtgatcactgtctgtcacaagtagagtgaaaggggtaagggggtgggagggtaagagttttgacaagttgtggcaaaggaaactatacttttcatttttaaaaatgtaaatagaaaagtttttaacggttttatatagatttcactataaataagcattttaagactgacaaatgttgaactgtacatacatttatcagcataactgcccagtttttttggtgctgaagtactgtaagtagaattcatcaacggtctcctaatttttgcatctacatctggggggaaaaagctgtgatactatagttaataaattcccactagagtgacactg

SEQ ID NO: 9081 - protein, 1224 aa, Homo sapiens
MPVVWPTLLDLSRDECKRILRKLELEAYAGVISALRAQGDLTKEKKDLLGELSKVLSISTERHRAEVRRAVNDERLTTIAHNMSGPNSSSEWSIEGRRLVPLMPRLVPQTAFTVTANAVANAAIQHNASLPVPAETGSKEVVVCYSYTSTTSTPTSTPVPSGSIATVKSPRPASPASNVVVLPSGSTVYVKSVSCSDEDEKPRKRRRTNSSSSSPVVLKEVPKAVVPVSKTITVPVSGSPKMSNIMQSIANSLPPHMSPVKITFTKPSTQTTNTTTQKVIIVTTSPSSTFVPNILSKSHNYAAVTKLVPTSVIASTTQKPPVVITASQSSLVSNSSSGSSSSTPSPIPNTVAVTAVVSSTPSVVMSTVAQGVKIITQQVQPSKILPKPVTATLPTSSNSPIMVVSSNGAIMTTKLVTTPTGTQATYTRPTVSPSIGRMAATPGAATYVKTTSGSIITVVPKSLATLGGKIISSNIVSGTTTKITTIPMTSKPNVIVVQKTTGKGTTIQGLPGKNVVTTLLNAGGEKTIQTVPTGAKPAILTATRPITKMIVTQPKGIGSTVQPAAKIIPTKIVYGQQGKTQVLIKPKPVTFQATVVSEQTRQLVTETLQQASRVAEAGNSSIQEGKEEPQNYTDSSSSSTESSQSSQDSQPVVHVIASRRQDWSEHEIAMETSPTIIYQDVSSESQSATSTIKALLELQQTTVKEKLESKPRQPTIDLSQMAVPIQMTQEKRHSPESPSIAVVESELVAEYITTVSHRSQPQQPSQPQRTLLQHVAQSQTATQTSVVVKSIPASSPGAITHIMQQALSSHTAFTKHSEELGTEEGEVEEMDTLDPQTGLFYRSALTQSQSAKQQKLSQPPLEQTQLQVKTLQCFQTKQKQTIHLQADQLQHKLPQMPQLSIRHQKLTPLQQEQAQPKPDVQHTQHPMVAKDRQLPTLMAQPPQTVVQVLAVKTTQQLPKLQQAPNQPKIYVQPQTPQSQMSLPASSEKQTASQVEQPIITQGSSVTKITFEGRQPPTVTKITGGSSVPKLTSPVTSISPIQASEKTAVSDILKMSLMEAQIDTNVEHMIVDPPKKALATSMLTGEAGSLPSTHMVVAGMANSTPQQQKCRESCSSPSTVGSSLTTRKIDPPAVPATGQFMRIQNVGQKKAEESPAEIIIQAIPQYAIPCHSSSNVVVEPSGLLELNNFTSQQLDDEETAMEQDIDSSTEDGTEPSPSQSSAERS

SEQ ID NO: 9082 - DNA, 5653 bp, Homo sapiens
atcttgccccttcagaggcaccgcaaacaaacccaattcctggtgtcccctagtcttggcggaggagccttttagatgagccccgaaaggccgggcagggaggacaagctctttggggctaccaaacagaagcagcaatgcctgttgtgtggccaacccttctggatctcagcagggatgaatgcaaaagaattcttcgaaaattggaattggaggcatatgctggagttatcagtgcacttcgggcacagggggatctcaccaaggaaaagaaagatcttcttggagaactatcaaaagttcttagcatctcaacagaacgccaccgtgctgaagttcggagagcagtaaacgatgaacggttaacaacaattgcacataatatgtctggacctaatagctcttcagaatggtccattgaaggtcgtcgattggtaccactgatgccccggctcgttccccaaaccgcctttactgtaacagctaatgctgttgctaatgcagctatccagcataatgcatctcttccagtgcctgcagaaacaggaagcaaggaagtagtggtttgctattcctacacaagtaccacgtcaaccccaacctctacccctgttccaagtggcagcatagcaacggttaagtctccaagacctgccagtcctgcctccaatgtagttgtcttgccaagtggaagtactgtttatgtcaaaagtgtaagctgttcagatgaagatgaaaaacccagaaaacgaaggcgaacaaactcttccagctcctctcctgttgttctaaaggaagttccaaaggccgttgttccagtctcaaagacgatcactgtgcctgtgagtggtagtcccaagatgagcaacatcatgcagagcattgccaactccttaccaccccacatgtctcctgtaaaaataaccttcactaaaccatcaacacagacaacaaacacaacaacacagaaggttattatagtcaccacatcaccaagctcaaccttcgtgcccaacattctctccaaatcccataactatgcagcagtcactaagcttgtaccaacgtcagtcattgcttctacaacccagaagccaccagttgttataactgcttcacagtcctctctggtcagtaatagcagcagtggcagcagcagttctacaccatcacctattcctaatacagttgcagtaacagctgtggtgtcctctacaccatctgtggtcatgtcaacagtagcacaaggtgttaaaatcatcacacaacaggttcaaccaagtaaaatcttacccaaaccagtgacagcaactctacccaccagtagcaattcccctattatggtggttagcagtaatggtgcaattatgacaactaaactggtaaccactcctactggcacacaagcaacctatacccggccaacagtgagcccatccattggtcggatggctgcaacccctggagctgcaacctatgtgaaaactacgagtggtagcatcattacagtagtacccaaatcattagctaccttggggggcaagataattagcagtaatatagtttctggaacgactaccaaaatcactacaatcccaatgacttccaagcccaacgtgattgttgtacaaaagactacaggaaaaggaacgaccattcaaggcctcccgggcaaaaatgttgtcacaacgttgctaaatgctggaggagaaaagactattcagacagtgccaacaggagcaaagccagctatccttactgctacaagacccatcaccaaaatgattgtaacgcagccaaaaggaataggttctacagttcaaccagcagctaaaatcatcccaacaaaaattgtttatgggcagcaagggaaaacgcaggttcttattaaacccaaaccagtgacttttcaagcgacagttgttagtgaacaaacaagacagctagtaacagaaacattacagcaagcatccagggtagcagaggctggtaattcatctattcaggaaggaaaagaagaaccacagaattatacagatagtagttcctcttctacagagtcctcccagagttcccaagattcccagcctgtagttcatgtaattgcttcccggcgtcaggattggtcagaacatgagattgcaatggagactagccctaccataatttatcaggatgtatccagtgaatcacaatcagctacttcaacaatcaaagctctgttagaactccaacagacaacagtaaaggaaaaattggaatctaaaccaagacaacccactattgacctgagtcaaatggcagtgcctattcagatgacccaggaaaagagacattctcctgagagtccatcaattgctgtggtagagtcagaactagtagctgaatacatcactactgtcagccatcgctcccagccccaacagccttcccagccccagcggaccctgctccagcatgtggctcagtcacagaccgcaacacagacttcggtggtggtgaagtccatcccagcatcttcccctggagcaatcacccacattatgcagcaggcattaagcagtcacactgcttttaccaaacacagcgaggaacttggaactgaggagggcgaggttgaagagatggacactttagaccctcagacaggtctgttttaccgatctgccctgactcagtcacagtcagctaaacagcagaaacttagccagcccccgctggaacagactcagctgcaagtgaaaactctgcagtgcttccagactaaacagaagcagaccatccacctgcaggcagaccagctccagcacaaactcccgcaaatgccccagctttccatcaggcatcaaaaactcacccctctccagcaagaacaagcacagcccaagccagatgtacagcacacacagcatcccatggtggccaaagacaggcagcttcctaccttaatggcacagcccccgcaaactgtagtacaggtgcttgcagtgaaaaccacgcagcagctccctaaactgcagcaggctccgaaccaaccaaaaatctacgtgcaaccccaaaccccccagagccaaatgtcgctcccagcttcttcagagaaacagacggcaagccaggtggagcagccaattataacccaaggatcctctgttacaaagataacttttgaggggcgccagcctcccacagttacaaagataactggtggcagttctgtgcctaagctgacatcaccagttacaagcatatctcccattcaggcctctgagaagacagcagtgtctgacattttgaaaatgtctttgatggaagctcagattgatacaaatgtagaacatatgatagtggatcccccaaagaaggctcttgccactagcatgctcactggtgaagcaggatcattaccctccacccacatggtggtggcagggatggcgaattccactccccagcaacagaaatgtagagagtcctgttcgagtccatccactgttggctcttccctaacgacaaggaaaattgatccaccagcagtgcctgcgacaggccagttcatgcgtattcagaatgtaggccaaaagaaagctgaagagagtccagcagaaattatcatccaggctattcctcagtatgctattccttgtcactccagctccaatgtggtggtggagcccagtgggcttcttgagctaaacaacttcactagtcaacagctggatgatgaggagacagcaatggagcaggacatagacagtagcacggaggatggaactgaacccagcccttctcagagctctgctgaacggtcctagtgtttggacacaatagtgcactttaaaacctgcttggttaccaagtgtccagggaaacccttgtattttgatgactaaaaagagcactttgcccgtacttaggctgtggaccctaaaacagcagtgtttcaacaagatgttgctgcaggagcagctttttaaaacaagataaaactcacaggggaatgtacttttttaaaaaaaaatgaaaaagaaaaaaaaagctgcacatttacagtgacttaagacctggtcttctttctctgttggatcatggccggtgaaacagttttgtcttgcagtggaaagagacttcctgtgaatgtttctcaactggtttctactgagcaaaataccatctaaaaggagaatgtgaatagttgtattttgaaatgatgtgtcaggaaaagttttttaaaaacttgtatgtttttgcaaatccctggaagtgttgaattggttaaaattttacattttctcagttcataattagtttataaacacctagaataatactggcattaaagaatccttgttggatggtagaaatcagatccctaaccagtgggaggtactttttgggtggcttgtgcattcttatcagttgtgtgctaatttattgtattgttcctttgtgctctaagcagcacacttgccttctatttatttaagtgtaaacatttcaaagcaggccgtactccttctgacaaatttcttgtaaaccaggattgcctacgctttccactgtcgtcgtctccccactttccctcttcctttaagaaaacttactaaaaaatgtttcattgcgaagcagaggaaaagaaacgttttcagacctaaaggaaatgtttggtcatgttaagaaaacaaattattcattcatatgatgctttcttaacgttgaaattgcacattcacattggactgagactttgaaaataacttttacatacttttgtttaagcccctttgaaatgtataaaaagttcatttacagttctaaatgtaatgtttttaagccttctatctttttaggacacagtttgtttaagcaatatgttttggtcttgtgatcactgtctgtcacaagtagagtgaaaggggtaagggggtgggagggtaagagttttgacaagttgtggcaaaggaaactatacttttcatttttaaaaatgtaaatagaaaagtttttaacggttttatatagatttcactataaataagcattttaagactgacaaatgttgaactgtacatacatttatcagcataactgcccagtttttttggtgctgaagtactgtaagtagaattcatcaacggtctcctaatttttgcatctacatctggggggaaaaagctgtgatactatagttaataaattcccactagagtgacactgaagatttaaacacaagcattcataagatgcgctgatctctggtggttgtcactagttctgctaggtgataatgatttacccatagatggagctgttggatattattttattgtacaaattcatgtttaaaaaactttgtgactgtttctagttaagtaattttttaacctttcttgggtcatagacttctttggtaaactatgaactctcaccaaaaagatacacatgcaacatgttaaatacatgttagactttgcatacaattttaggggctcatgggcctctaagcctatccatgtattccaggttaagccctctgttatgatcaatccattacttacagattaagtttttataaaataaagtatcttttaaatattcatggatcaagtaacaagagcaaacttgaataaagttatgttctacatattttggcagc

SEQ ID NO: 9083 - protein, 1224 aa, Homo sapiens; identical to SEQ ID NO: 9081

SEQ ID NO: 9084 - DNA, 5734 bp, Homo sapiens
atcttgccccttcagaggcaccgcaaacaaacccaattcctggtgtcccctagtcttggcggaggagccttttagatgagccccgaaaggccgggcagggaggacaagctctttggggctaccaaacagaagcagcaatgcctgttgtgtggccaacccttctggatctcagcagggatgaatgcaaaagaattcttcgaaaattggaattggaggcatatgctggagttatcagtgcacttcgggcacagggggatctcaccaaggaaaagaaagatcttcttggagaactatcaaaagttcttagcatctcaacagaacgccaccgtgctgaagttcggagagcagtaaacgatgaacggttaacaacaattgcacataatatgtctggacctaatagctcttcagaatggtccattgaaggtcgtcgattggtaccactgatgccccggctcgttccccaaaccgcctttactgtaacagctaatgctgttgctaatgcagctatccagcataatgcatctcttccagtgcctgcagaaacaggaagcaaggaagtagtggtttgctattcctacacaagtaccacgtcaaccccaacctctacccctgttccaagtggcagcatagcaacggttaagtctccaagacctgccagtcctgcctccaatgtagttgtcttgccaagtggaagtactgtttatgtcaaaagtgtaagctgttcagatgaagatgaaaaacccagaaaacgaaggcgaacaaactcttccagctcctctcctgttgttctaaaggaagttccaaaggccgttgttccagtctcaaagacgatcactgtgcctgtgagtggtagtcccaagatgagcaacatcatgcagagcattgccaactccttaccaccccacatgtctcctgtaaaaataaccttcactaaaccatcaacacagacaacaaacacaacaacacagaaggttattatagtcaccacatcaccaagctcaaccttcgtgcccaacattctctccaaatcccataactatgcagcagtcactaagcttgtaccaacgtcagtcattgcttctacaacccagaagccaccagttgttataactgcttcacagtcctctctggtcagtaatagcagcagtggcagcagcagttctacaccatcacctattcctaatacagttgcagtaacagctgtggtgtcctctacaccatctgtggtcatgtcaacagtagcacaaggtgttaaaatcatcacacaacaggttcaaccaagtaaaatcttacccaaaccagtgacagcaactctacccaccagtagcaattcccctattatggtggttagcagtaatggtgcaattatgacaactaaactggtaaccactcctactggcacacaagcaacctatacccggccaacagtgagcccatccattggtcggatggctgcaacccctggagctgcaacctatgtgaaaactacgagtggtagcatcattacagtagtacccaaatcattagctaccttggggggcaagataattagcagtaatatagtttctggaacgactaccaaaatcactacaatcccaatgacttccaagcccaacgtgattgttgtacaaaagactacaggaaaaggaacgaccattcaaggcctcccgggcaaaaatgttgtcacaacgttgctaaatgctggaggagaaaagactattcagacagtgccaacaggagcaaagccagctatccttactgctacaagacccatcaccaaaatgattgtaacgcagccaaaaggaataggttctacagttcaaccagcagctaaaatcatcccaacaaaaattgtttatgggcagcaagggaaaacgcaggttcttattaaacccaaaccagtgacttttcaagcgacagttgttagtgaacaaacaagacagctagtaacagaaacattacagcaagcatccagggtagcagaggctggtaattcatctattcaggaaggaaaagaagaaccacagaattatacagatagtagttcctcttctacagagtcctcccagagttcccaagattcccagcctgtagttcatgtaattgcttcccggcgtcaggattggtcagaacatgagattgcaatggagactagccctaccataatttatcaggatgtatccagtgaatcacaatcagctacttcaacaatcaaagctctgttagaactccaacagacaacagtaaaggaaaaattggaatctaaaccaagacaacccactattgacctgagtcaaatggcagtgcctattcagatgacccaggaaaagagacattctcctgagagtccatcaattgctgtggtagagtcagaactagtagctgaatacatcactactgtcagccatcgctcccagccccaacagccttcccagccccagcggaccctgctccagcatgtggctcagtcacagaccgcaacacagacttcggtggtggtgaagtccatcccagcatcttcccctggagcaatcacccacattatgcagcaggcattaagcagtcacactgcttttaccaaacacagcgaggaacttggaactgaggagggcgaggttgaagagatggacactttagaccctcagacaggtctgttttaccgatctgccctgactcagtcacagtcagctaaacagcagaaacttagccagcccccgctggaacagactcagctgcaagtgaaaactctgcagtgcttccagactaaacagaagcagaccatccacctgcaggcagaccagctccagcacaaactcccgcaaatgccccagctttccatcaggcatcaaaaactcacccctctccagcaagaacaagcacagcccaagccagatgtacagcacacacagcatcccatggtggccaaagacaggcagcttcctaccttaatggcacagcccccgcaaactgtagtacaggtgcttgcagtgaaaaccacgcagcagctccctaaactgcagcaggctccgaaccaaccaaaaatctacgtgcaaccccaaaccccccagagccaaatgtcgctcccagcttcttcagagaaacagacggcaagccaggtggagcagccaattataacccaaggatcctctgttacaaagataacttttgaggggcgccagcctcccacagttacaaagataactggtggcagttctgtgcctaagctgacatcaccagttacaagcatatctcccattcaggcctctgagaagacagcagtgtctgacattttgaaaatgtctttgatggaagctcagattgatacaaatgtagaacatatgatagtggatcccccaaagaaggctcttgccactagcatgctcactggtgaagcaggatcattaccctccacccacatggtggtggcagggatggcgaattccactccccagcaacagaaatgtagagagtcctgttcgagtccatccactgttggctcttccctaacgacaaggaaaattgatccaccagcagtgcctgcgacaggccagttcatgcgtattcagaatgtaggccaaaagaaagctgaagagagtccagcagaaattatcatccaggctattcctcagtatgctattccttgtcactccagctccaatgtggtggtggagcccagtgggcttcttgagctaaacaacttcactagtcaacagctggatgatgaggagacagcaatggagcaggacatagacagtagcacggaggatggaactgaacccagcccttctcagagctctgctgaacggtcctagtgtttggacacaatagtgcactttaaaacctgcttggttaccaagtgtccagggaaacccttgtattttgatgactaaaaagagcactttgcccgtacttaggctgtggaccctaaaacagcagtgtttcaacaagatgttgctgcaggagcagctttttaaaacaagataaaactcacaggggaatgtacttttttaaaaaaaaatgaaaaagaaaaaaaaagctgcacatttacagtgacttaagacctggtcttctttctctgttggatcatggccggtgaaacagttttgtcttgcagtggaaagagacttcctgtgaatgtttctcaactggtttctactgagcaaaataccatctaaaaggagaatgtgaatagttgtattttgaaatgatgtgtcaggaaaagttttttaaaaacttgtatgtttttgcaaatccctggaagtgttgaattggttaaaattttacattttctcagttcataattagtttataaacacctagaataatactggcattaaagaatccttgttggatggtagaaatcagatccctaaccagtgggaggtactttttgggtggcttgtgcattcttatcagttgtgtgctaatttattgtattgttcctttgtgctctaagcagcacacttgccttctatttatttaagtgtaaacatttcaaagcaggccgtactccttctgacaaatttcttgtaaaccaggattgcctacgctttccactgtcgtcgtctccccactttccctcttcctttaagaaaacttactaaaaaatgtttcattgcgaagcagaggaaaagaaacgttttcagacctaaaggaaatgtttggtcatgttaagaaaacaaattattcattcatatgatgctttcttaacgttgaaattgcacattcacattggactgagactttgaaaataacttttacatacttttgtttaagcccctttgaaatgtataaaaagttcatttacagttctaaatgtaatgtttttaagccttctatctttttaggacacagtttgtttaagcaatatgttttggtcttgtgatcactgtctgtcacaagtagagtgaaaggggtaagggggtgggagggtaagagttttgacaagttgtggcaaaggaaactatacttttcatttttaaaaatgtaaatagaaaagtttttaacggttttatatagatttcactataaataagcattttaagactgacaaatgttgaactgtacatacatttatcagcataactgcccagtttttttggtgctgaagtactgtaagtagaattcatcaacggtctcctaatttttgcatctacatctggggggaaaaagctgtgatactatagttaataaattcccactagagtgacactgaagatttaaacacaagcattcataagatgcgctgatctctggtggttgtcactagttctgctaggtgataatgatttacccatagatggagctgttggatattattttattgtacaaattcatgtttaaaaaactttgtgactgtttctagttaagtaattttttaacctttcttgggtcatagacttctttggtaaactatgaactctcaccaaaaagatacacatgcaacatgttaaatacatgttagactttgcatacaattttaggggctcatgggcctctaagcctatccatgtattccaggttaagccctctgttatgatcaatccattacttacagattaagtttttataaaataaagtatcttttaaatattcatggatcaagtaacaagagcaaacttgaataaagttatgttctacatattttggcagcatagcatacctgtgtcccttgagaatttagccttcatatgtttctgcaattggaatggcaaataaaagtgctatcatctac

SEQ ID NO: 9085 - protein, 1224 aa, Homo sapiens; identical to SEQ ID NO: 9081

SEQ ID NO: 9086 - DNA, 6731 bp, Homo sapiens
atcttgccccttcagaggcaccgcaaacaaacccaattcctggtgtcccctagtcttggcggaggagccttttagatgagccccgaaaggccgggcagggaggacaagctctttggggctaccaaacagaagcagcaatgcctgttgtgtggccaacccttctggatctcagcagggatgaatgcaaaagaattcttcgaaaattggaattggaggcatatgctggagttatcagtgcacttcgggcacagggggatctcaccaaggaaaagaaagatcttcttggagaactatcaaaagttcttagcatctcaacagaacgccaccgtgctgaagttcggagagcagtaaacgatgaacggttaacaacaattgcacataatatgtctggacctaatagctcttcagaatggtccattgaaggtcgtcgattggtaccactgatgccccggctcgttccccaaaccgcctttactgtaacagctaatgctgttgctaatgcagctatccagcataatgcatctcttccagtgcctgcagaaacaggaagcaaggaagtagtggtttgctattcctacacaagtaccacgtcaaccccaacctctacccctgttccaagtggcagcatagcaacggttaagtctccaagacctgccagtcctgcctccaatgtagttgtcttgccaagtggaagtactgtttatgtcaaaagtgtaagctgttcagatgaagatgaaaaacccagaaaacgaaggcgaacaaactcttccagctcctctcctgttgttctaaaggaagttccaaaggccgttgttccagtctcaaagacgatcactgtgcctgtgagtggtagtcccaagatgagcaacatcatgcagagcattgccaactccttaccaccccacatgtctcctgtaaaaataaccttcactaaaccatcaacacagacaacaaacacaacaacacagaaggttattatagtcaccacatcaccaagctcaaccttcgtgcccaacattctctccaaatcccataactatgcagcagtcactaagcttgtaccaacgtcagtcattgcttctacaacccagaagccaccagttgttataactgcttcacagtcctctctggtcagtaatagcagcagtggcagcagcagttctacaccatcacctattcctaatacagttgcagtaacagctgtggtgtcctctacaccatctgtggtcatgtcaacagtagcacaaggtgttaaaatcatcacacaacaggttcaaccaagtaaaatcttacccaaaccagtgacagcaactctacccaccagtagcaattcccctattatggtggttagcagtaatggtgcaattatgacaactaaactggtaaccactcctactggcacacaagcaacctatacccggccaacagtgagcccatccattggtcggatggctgcaacccctggagctgcaacctatgtgaaaactacgagtggtagcatcattacagtagtacccaaatcattagctaccttggggggcaagataattagcagtaatatagtttctggaacgactaccaaaatcactacaatcccaatgacttccaagcccaacgtgattgttgtacaaaagactacaggaaaaggaacgaccattcaaggcctcccgggcaaaaatgttgtcacaacgttgctaaatgctggaggagaaaagactattcagacagtgccaacaggagcaaagccagctatccttactgctacaagacccatcaccaaaatgattgtaacgcagccaaaaggaataggttctacagttcaaccagcagctaaaatcatcccaacaaaaattgtttatgggcagcaagggaaaacgcaggttcttattaaacccaaaccagtgacttttcaagcgacagttgttagtgaacaaacaagacagctagtaacagaaacattacagcaagcatccagggtagcagaggctggtaattcatctattcaggaaggaaaagaagaaccacagaattatacagatagtagttcctcttctacagagtcctcccagagttcccaagattcccagcctgtagttcatgtaattgcttcccggcgtcaggattggtcagaacatgagattgcaatggagactagccctaccataatttatcaggatgtatccagtgaatcacaatcagctacttcaacaatcaaagctctgttagaactccaacagacaacagtaaaggaaaaattggaatctaaaccaagacaacccactattgacctgagtcaaatggcagtgcctattcagatgacccaggaaaagagacattctcctgagagtccatcaattgctgtggtagagtcagaactagtagctgaatacatcactactgtcagccatcgctcccagccccaacagccttcccagccccagcggaccctgctccagcatgtggctcagtcacagaccgcaacacagacttcggtggtggtgaagtccatcccagcatcttcccctggagcaatcacccacattatgcagcaggcattaagcagtcacactgcttttaccaaacacagcgaggaacttggaactgaggagggcgaggttgaagagatggacactttagaccctcagacaggtctgttttaccgatctgccctgactcagtcacagtcagctaaacagcagaaacttagccagcccccgctggaacagactcagctgcaagtgaaaactctgcagtgcttccagactaaacagaagcagaccatccacctgcaggcagaccagctccagcacaaactcccgcaaatgccccagctttccatcaggcatcaaaaactcacccctctccagcaagaacaagcacagcccaagccagatgtacagcacacacagcatcccatggtggccaaagacaggcagcttcctaccttaatggcacagcccccgcaaactgtagtacaggtgcttgcagtgaaaaccacgcagcagctccctaaactgcagcaggctccgaaccaaccaaaaatctacgtgcaaccccaaaccccccagagccaaatgtcgctcccagcttcttcagagaaacagacggcaagccaggtggagcagccaattataacccaaggatcctctgttacaaagataacttttgaggggcgccagcctcccacagttacaaagataactggtggcagttctgtgcctaagctgacatcaccagttacaagcatatctcccattcaggcctctgagaagacagcagtgtctgacattttgaaaatgtctttgatggaagctcagattgatacaaatgtagaacatatgatagtggatcccccaaagaaggctcttgccactagcatgctcactggtgaagcaggatcattaccctccacccacatggtggtggcagggatggcgaattccactccccagcaacagaaatgtagagagtcctgttcgagtccatccactgttggctcttccctaacgacaaggaaaattgatccaccagcagtgcctgcgacaggccagttcatgcgtattcagaatgtaggccaaaagaaagctgaagagagtccagcagaaattatcatccaggctattcctcagtatgctattccttgtcactccagctccaatgtggtggtggagcccagtgggcttcttgagctaaacaacttcactagtcaacagctggatgatgaggagacagcaatggagcaggacatagacagtagcacggaggatggaactgaacccagcccttctcagagctctgctgaacggtcctagtgtttggacacaatagtgcactttaaaacctgcttggttaccaagtgtccagggaaacccttgtattttgatgactaaaaagagcactttgcccgtacttaggctgtggaccctaaaacagcagtgtttcaacaagatgttgctgcaggagcagctttttaaaacaagataaaactcacaggggaatgtacttttttaaaaaaaaatgaaaaagaaaaaaaaagctgcacatttacagtgacttaagacctggtcttctttctctgttggatcatggccggtgaaacagttttgtcttgcagtggaaagagacttcctgtgaatgtttctcaactggtttctactgagcaaaataccatctaaaaggagaatgtgaatagttgtattttgaaatgatgtgtcaggaaaagttttttaaaaacttgtatgtttttgcaaatccctggaagtgttgaattggttaaaattttacattttctcagttcataattagtttataaacacctagaataatactggcattaaagaatccttgttggatggtagaaatcagatccctaaccagtgggaggtactttttgggtggcttgtgcattcttatcagttgtgtgctaatttattgtattgttcctttgtgctctaagcagcacacttgccttctatttatttaagtgtaaacatttcaaagcaggccgtactccttctgacaaatttcttgtaaaccaggattgcctacgctttccactgtcgtcgtctccccactttccctcttcctttaagaaaacttactaaaaaatgtttcattgcgaagcagaggaaaagaaacgttttcagacctaaaggaaatgtttggtcatgttaagaaaacaaattattcattcatatgatgctttcttaacgttgaaattgcacattcacattggactgagactttgaaaataacttttacatacttttgtttaagcccctttgaaatgtataaaaagttcatttacagttctaaatgtaatgtttttaagccttctatctttttaggacacagtttgtttaagcaatatgttttggtcttgtgatcactgtctgtcacaagtagagtgaaaggggtaagggggtgggagggtaagagttttgacaagttgtggcaaaggaaactatacttttcatttttaaaaatgtaaatagaaaagtttttaacggttttatatagatttcactataaataagcattttaagactgacaaatgttgaactgtacatacatttatcagcataactgcccagtttttttggtgctgaagtactgtaagtagaattcatcaacggtctcctaatttttgcatctacatctggggggaaaaagctgtgatactatagttaataaattcccactagagtgacactgaagatttaaacacaagcattcataagatgcgctgatctctggtggttgtcactagttctgctaggtgataatgatttacccatagatggagctgttggatattattttattgtacaaattcatgtttaaaaaactttgtgactgtttctagttaagtaattttttaacctttcttgggtcatagacttctttggtaaactatgaactctcaccaaaaagatacacatgcaacatgttaaatacatgttagactttgcatacaattttaggggctcatgggcctctaagcctatccatgtattccaggttaagccctctgttatgatcaatccattacttacagattaagtttttataaaataaagtatcttttaaatattcatggatcaagtaacaagagcaaacttgaataaagttatgttctacatattttggcagcatagcatacctgtgtcccttgagaatttagccttcatatgtttctgcaattggaatggcaaataaaagtgctatcatctacatttttttaaagaattacaaatattaagaaattatcaagtgaaatttaaaatttttcttttaaaggtgttaattccaaatagagcatgcattcatttatttattcaacaaatattaattgagcatcttctgtatgacaagtagtattctgtgcactggggataccatagtgaacaaacaggaaatcctatccttatgaagtttataaacagggcttcctgctcatgaaatggatacaaggaatgaagacaggagaaaataagaacaatacttaggtttttttataaagtggatagatgatgatgccatatatggattttcagacatccctttactgaaagtcttagcattatatctattagtattccacatttaagtacataatttaaaagtaatttaaagtcatctctttgaaggatattaacaaattacaatgcaaatgctacagaatttttagaatcctaacaactattaggcagtgataagaaaaatccatttggcttaaagtaaactttaataagtgcctagtattgcagatgcagtttatggtgaacttagaggattaaaaaccaaagggggcttcattgagatattcacatgccataaactctcccatttaaagtataccgtttaatggttttagtatatccacagagttgggcaagccattaccacaatcaatttgagaacattttcattaatcacaaaagaaatcctgaaatgaaaccaccaccaccatcgctccagccctgggtggccactcctctactttctgcctcttatggatgtgccataagaaatgtggacatttcatataaatgagattatataatatgtggtcttttgtgacttctttcacttagcgtattttcaaggttcatccgtgttgtagaatgtgtcagtactacatttctttttatggccattccattgtgtgaaatatatcacattttgtttacccgtttatcagctgatggatatttgcattgtttacactt

SEQ ID NO: 9087 - protein, 1224 aa, Homo sapiens; identical to SEQ ID NO: 9081

SEQ ID NO: 9088 - DNA, 827 bp, Homo sapiens
atgaattttgatcctgcgctggggctgctaactccaactctgtgtcccgaggtgagcccccctccccctacttcccatagtcctctcagctcagaacaaacccaaggcaagaagaactggactgcgcgccccagccggcagtatgacataaagaaaaggggtggggaggaggaagaaggggcagagccaaaggaatcctctccctccacaagccagtccccgcctcccgacaggatcttggaggcggccggcgactgctcgaaccgagcaccacgtcacggcatcccggcgcgtcctagccaggggaccccagagcggggccgcaacgcatcggaaacccgggcagtagtttccggagcccgctcggggaaccaggatcttgtaggatccttccccactcaagtgtcaaggagacaagcccgccccgccccctctccaaacacgcactccctagcagcaccacaacaagagcagccagcccaggctcctcacccggacctctcggcgccggtcccaatgtcaagtccacgacccaagcccctctgggccagtagctgttgtcaggggtcccggccggcacccgcgcctcactccctccccagcggagaggacaaccgagagagagtaagccagcggatacccagccagacgacctggactcaccgggagtctcccagagctaaacccccagagtcccagcaccaggccagccagagtccccctgagtccaccccggggagccccacgatcccgttaggaaacaacggaggatggggctgggagccccaagccgggctccgaatgcttggcccggcgctcctctagcc

SEQ ID NO: 9089 - protein, 274 aa, Homo sapiens [sequence omitted]

SEQ ID NO: 9090 - DNA, 2622 bp, Homo sapiens
ctctcgctcgccctctctttctgtgtgtaagagagcgagggtgggggacggaggcaggcaggcgagcaggcagggaggggaagaagagaagggaagctattaaacacacacacacacacacacactcacacacgcgcgcgcacacacccgccccaaccccccagaagcctcgggattgcagctgtttcatgtggggcagcagtgctggcagggacgccggccgggagcggccgggagcgggagccggtcgtgcgcgcgcggctggaggctcgctggggctccgctccccgcgggagctattgttggtctcgctggagctgagcgcagagcccggacctgctccttcctgggcgccccgctacggctcgcggagcagaggagccgcgccgccgagagagagaggagccaccggcgcggcgccttgcctccctgccgccgtcctcgccgcttccccggcggtagcagcctgcagccacgatggaaaaactgagaatcagagagggctagtgatctctcagacacttggtcggtaggatgcctttgaactctggatctctccacctggtctgattctgtccagaggcctgggaggattggcattattaagatgttattgaaaatgctggcacatataatcggcttggattagaaaccaaagctcttcgcagagtaacaagaaaagatcccgcaccatcctccaggatccaatggccttggagagagggctgcagggcccacggacattgctgactcttcagaacgtgctgacatggagccaggtagactgaaattaccatgtgtccaaattaaaattgcatacttcaaggattatttgaaggactattcttagacccttttaagaagatttaaagaaaaaccactcggccctgagtgcggcgaggaccctgtttgtggatgtggaggagcgcgggccggaggccatggacgtgaaggagaggaagccttaccgctcgctgacccggcgccgcgacgccgagcgccgctacaccagctcgtccgcggacagcgaggagggcaaagccccgcagaaatcgtacagctccagcgagaccctgaaggcctacgaccaggacgcccgcctagcctatggcagccgcgtcaaggacattgtgccgcaggaggccgaggaattctgccgcacaggtgccaacttcaccctgcgggagctggggctggaagaagtaacgccccctcacgggaccctgtaccggacagacattggcctcccccactgcggctactccatgggggctggctctgatgccgacatggaggctgacacggtgctgtcccctgagcaccccgtgcgtctgtggggccggagcacacggtcagggcgcagctcctgcctgtccagccgggccaattccaatctcacactcaccgacaccgagcatgaaaacactgagactgatcatccgggcggcctgcagaaccacgcgcggctccggacgccgccgccgccgctctcgcacgcccacacccccaaccagcaccacgcggcctccattaactccctgaaccggggcaacttcacgccgaggagcaaccccagcccggcccccacggaccactcgctctccggagagccccctgccggcggcgcccaggagcctgcccacgcccaggagaactggctgctcaacagcaacatccccctggagaccagaaacctaggcaagcagccattcctagggacattgcaggacaacctcattgagatggacattctcggcgcctcccgccatgatggggcttacagtgacgggcacttcctcttcaagcctggaggcacctccccgctcttctgcaccacatcaccagggtacccactgacgtccagcacagtgtactctcctccgccccgacccctgccccgcagcaccttcgcccggccggcctttaacctcaagaagccctccaagtactgtaactggaagtgcgcagccctgagcgccatcgtcatctcagccactctggtcatcctgctggcatactttgtggccatgcacctgtttggcctaaactggcacctgcagccgatggaggggcagatgtatgagatcacggaggacacagccagcagttggcctgtgccaaccgacgtctccctatacccctcagggggcactggcttagagacccctgacaggaaaggcaaaggaaccacagaaggaaagcccagtagtttctttccagaggacagtttcatagattctggagaaattgatgtgggaaggcgagcttcccagaagattcctcctggcactttctggagatctcaagtgttcatagaccatcctgtgcatctgaaattcaatgtgtctctgggaaaggcagccctggttggcatttatggcagaaaaggcctccctccttcacatacacagtttgactttgtggagctgctggatggcaggaggctcctaacccaggaggcgcggagcctagaggggaccccgcgccagtctcggggaactgtgcccccctccagccatgagacaggcttcatccagtatttggattcaggaatctggcacttggctttttacaatgacggaaaggagtcagaagtggtttcctttctcaccactgccattg

SEQ ID NO: 9091 - protein, 559 aa, Homo sapiens
MDVKERKPYRSLTRRRDAERRYTSSSADSEEGKAPQKSYSSSETLKAYDQDARLAYGSRVKDIVPQEAEEFCRTGANFTLRELGLEEVTPPHGTLYRTDIGLPHCGYSMGAGSDADMEADTVLSPEHPVRLWGRSTRSGRSSCLSSRANSNLTLTDTEHENTETDHPGGLQNHARLRTPPPPLSHAHTPNQHHAASINSLNRGNFTPRSNPSPAPTDHSLSGEPPAGGAQEPAHAQENWLLNSNIPLETRNLGKQPFLGTLQDNLIEMDILGASRHDGAYSDGHFLFKPGGTSPLFCTTSPGYPLTSSTVYSPPPRPLPRSTFARPAFNLKKPSKYCNWKCAALSAIVISATLVILLAYFVAMHLFGLNWHLQPMEGQMYEITEDTASSWPVPTDVSLYPSGGTGLETPDRKGKGTTEGKPSSFFPEDSFIDSGEIDVGRRASQKIPPGTFWRSQVFIDHPVHLKFNVSLGKAALVGIYGRKGLPPSHTQFDFVELLDGRRLLTQEARSLEGTPRQSRGTVPPSSHETGFIQYLDSGIWHLAFYNDGKESEVVSFLTTA

SEQ ID NO: 9092 - DNA, 601 bp, Homo sapiens
acttcccaatataaccaactacggcgtgggggagcggaactgcgagaaggcggcagccaaagtgccattaaagctcggggcggagaggatgcgttacctgggtcccgtctgctgcgagaggcagggcaagctggaggattccctctgaatgattaagaactccgcaattcgcctctgccacaggctgcaaaggacccgaggaaccgctctctctgaactgtgctgatgggcaggaggatgggagacaggaattgagagtcacagaggaaggacagtggagtctggcatcttattggtgtctttaaaggattgccatttaatgccattcaagatctactaagcatcatttttgcatgactactgcaaaaggattactttacagataccagttcctttgtcaagagcatactttggaccctgttttcagaaagcagggcactctttaatgaagaaacaccagagctgttaaacacattgagacacagaagattctagtgactgaggatggcttcctcttggaaactaatgctgtttctgtcagtcaccatgtgtctttcagaaatctcccttcaccgcagctcataaagatattgccctgtgt

SEQ ID NO: 9093 - protein, 30 aa, Homo sapiens
MTTAKGLLYRYQFLCQEHTLDPVFRKQGTL

SEQ ID NO: 9094 - DNA, 900 bp, Homo sapiens
acttcccaatataaccaactacggcgtgggggagcggaactgcgagaaggcggcagccaaagtgccattaaagctcggggcggagaggatgcgttacctgggtcccgtctgctgcgagaggcagggcaagctggaggattccctctgaatgattaagaactccgcaattcgcctctgccacaggctgcaaaggacccgaggaaccgctctctctgaactgtgctgatgggcaggaggatgggagacaggaattgagagtcacagaggaaggacagtggagtctggcatcttattggtgtctttaaaggattgccatttaatgccattcaagatctactaagcatcatttttgcatgactactgcaaaaggattactttacagataccagttcctttgtcaagagcatactttggaccctgttttcagaaagcagggcactctttaatgaagaaacaccagagctgttaaacacattgagacacagaagattctagtgactgaggatggcttcctcttggaaactaatgctgtttctgtcagtcaccatgtgtctttcagagtattcaaaatctcttcctggtctctccacttcatatgctgctttgttaagaattaagaagagttcatcttcatctctctttggttccaaaaccagaccacgatacagcagcccttcattaggaacactgagtgcttcttcacccagctggctaggggcagctcagaattattattcccccatcaatctttatcattcctcagatgccttcaaacaagatgaaagtgtggactatgggccagtttttgtgcaagaaccagatgatattatttttccaactgattctgatgaaaagaaggtagcattgaattgtgaagttcgtggcaatccagttcccagt

SEQ ID NO: 9095 - protein, 131 aa, Homo sapiens
MASSWKLMLFLSVTMCLSEYSKSLPGLSTSYAALLRIKKSSSSSLFGSKTRPRYSSPSLGTLSASSPSWLGAAQNYYSPINLYHSSDAFKQDESVDYGPVFVQEPDDIIFPTDSDEKKVALNCEVRGNPVP

SEQ ID NO: 9096 - DNA, 7442 bp, Homo sapiens
attattggctgtgggatcaagttcgtgaaactggtcttgtacaggttgaaaaatgccttcctaacaggaggcgccaaggagcttaagtgtaactcacacacagtaaagaaaatgacgaaagttcctccggcgtttgatttcagtttcttaaatgacgaagaggccaggaagatccttcaggtgctggaaaggaatgaggagttacagagggccgagaaggacaggatcagcaaacttcagaagacaaagagggatatcagatggcttcagggagtgactggtgaatggtttgaagaaattcaaagaaaaaagttttgcaatgaaacagatgttagccaaatgttaaaacaaccacttacatacaggctaagtaaggagatggcaaaaaatgatccgatagaattacctacatcaagatctaaaaatgtaactaatcaaaaaaagccgacacctttttcttcccggatgagcttcagatcgtcatttgcttccctgttctcattcaggaaatctggaaaggagacttcaaagcttccatcactgggacagaaaggatgtgatggccatgcaggacctcctatgcctgtgaggggagctgctgtgcaggcaaaaatatacaattcacctctggaaaatcatctagttgacagtacatttgtcccaaagccagcagtcatgagggaggagagtggcatgcctccaccgtgggatgcttcactgctggagaatgagtttttccaagttttagatgacttggatagcaaattggctcaggaacagtctgcaagctcagtgaataccagaacacccctcaactatggatcaagaacacagttcggtcacttttattccagtggtaacagacatggtaatatcacagaaaggcacaaaaaacactataatgaaacttccaatatgtctatctatgacatcctaagaccaggaactcctagggaaggttttaaaaccttttctcctaggacaagcacaatttatgatatgtataggacaagggagcccagagtctttaaagaagattatgtgcaaaagaatacttttggcagtacttcgctgtgttttgacagcaggcaacggtcggccttaccagccacagggcatttcacagcaagaagcttacattttccagccacaactcagagcaagagtgggtttataccaccaaggcaccagcagagtccaaagagaactcctttatcatccatcatatggaacagatcagattcctctagagacagggagaaccaggaagagttcctgagggcaccatcaccaatggaaattgatcccgctgacaagtatgtgtatcccaggggttttcaggagaataagagatatgaatcgtaccattcacagaatgtttaccaacgtgttagtttaaatgctcccatggagaatgcaatgagtcccgacacttttgagaactcagagaacatgccattctaccatcaaagcaacacatttaccagatctttcttcagcaatacctttggacgaagcggagaacagaggagatttggacaaggtcctttttggggccaagagaaaggacattctttctggtctgactttcatcgaagcaggaaatcattcagttcttctgacagagactttgaaatgatttccatggaagcaaatagtgtatcagccattcatggccataatgtttcttctgaacactgggaatcattttcttctggttatggaacagatgtttccagaggccaagaagagccacatccttggcagtttgattttcagagatccacactggatagcatggtggtatcacatggtaatgagacccagttgactcctcattttggcacaccaaatgtttgctccatgactggttcaagctatcacgtcaaatctagtgagttggtaagtcaacaggacagttctcctgtagaagtacatataaacaaagaagcttcctcatttggaattgctcagactctagcatcctcattcaaaacttccttttcccagatttctgatgacagaaggaatcctcagagtcccaacttgcagaatcccacagtcactttgcagaaaatttttccaaataagcctgcctctcatccaatgagaagccatacagaagtcactgtgaccagcagcaattcagttgactctctgcctcttgccaaaagccagcccaatatcttggtcacagaagtaaataatgagaaagacttaaatgaatctatttcagaagaagacaaacagctaagcaagatggaccagacaaacaaggcaggtgaaataccccaacctgtttcacagacagggatctcaaactctttacctgattttcaaaatcccttatcccaggactcagccaagagcaacgggtttggttttaatgcatctaccataataagttcaaaaaagtcacccagagtcttttccaggaaagatacctccaaaatgtatataccgcacacagataaatccaatgacattaaacaagataagaggtttactgaaaacagaaaacttggctcaacagcttcccttcctttcattcaggaacacagaacaccaccatctttccccaggacagaccaaggttgtcaccaggaattaactgtaaataatgaagatatttcaagaattattacaaataaccactggagctctgcactgactgatactcaaaatgcacaatactcaaaatgcaagttaactcctggccacaagacctcgtgtgattctttagatctgtcatcagctgcactaccagattcctcaccatcaaagaattcttcccttgatgctcctgtggttccatctactacagtgttctccaggagaagtccttcagacaaagatccatcgctaggagaaagagaagaaaaagacaatgctgggaagaaccaaaagaatcagtttattgtaagccactcagaaaaccaagagagaaatgatagtcctgtgcctacacatgatgaagtggttgatgtcaaatgccattcacactctccttttaggaatgaaagaggaaaaggaaaaataaggcatcatatatcctgtattgaaaagttaagcaaaacagaaagtatatcagtacccaccagtgatcacaggagcctcattgaagcaaatcaaagcaattccaaagtttctgaacttgacacaatttattgtaccttgccaagaaaatcaagcagttttctcatacatggcaggcagtcaggaagtaaaataatggctgcttcattgaggaatgggccacctcccttccaaatcaaaaataatgtggaagatgcaatggggaactatatgttaaacaaatttagtcccagttctcctgagtcagcgaatgaatgttccaaagtcctttcagactcagccctggaagcacctgaagccacagagagaatgacaaatgtaaaaagcagtggatctacttccgttagaaaaggaccacttccattcctcatcaacagggctatgtcatgtccctcaggggagccacatgcctcaactggaagagaaggaagaaaaaagccattgacctcaggcatggatgcttctgagctaacaccaagggcttgggagagaatcattagccctgtggaaagtgactcatctgttagagattgttctttaaccaaaagacaacaccaaaaggaaaacttccaagaatacactgagaaagagggtaaaatggctgcctccaggagaagtgtatttgctctttcaaatgaagaccctttacctttttgctcagacttgtcaggaaaagaacgtgggaaaacattacataaagttaagacgactagtacgttttctgtttctggtgatgaagataatgtaaaatgtctggaggtggtctcaatatattacactctaccgaggaaacccagcaaaaaattctgtaacctccttcaacagtatacacaaaatactaatttacttatagaatcacctcaagtggagactgaaacatttcctaacgctttagaaaaagacaaacagaattattctacacgagagcagtcaggaacaccttcatgtgaaaatctaaagatgtccgtcaactctgatcagacgctcaccactgaaaatatgactgccttccgattatcaaatagggggcccctagctcctacattacaggaaatggcttctgttgaggcagctgtttctcttcctgaagaggaatctaaagctagagagattttttcagataatttagctaaaacacctctaggtgattcagaaaacaagaaggaaagaggcaaaaagttgcaaagtgaaaccctgcatacttcattgatgcttcagagaaaaaatgtatccgaagaaaaatctgaaaattgtcaacaatccattaattcaagtaacagtggtccctctagtcttccagctctttcagaagttaatattggaaattcccaaactagaagaagttcttgggagtgtacagggagtggtagagccattccatttactggaagtggcaagtgtccccagaaagatcacacatccacagctgtaggtgatggctccagtggatcacagcctagggaaggcagaggggacattggaaccaactgccaaaaaatgactaataaaacactttctcactcagagagtcaagtctttgcccttactccagcattgcataaactacagcttggtgaggagactcagtcagatgaaccaaacttagagagtctgcagtctgaaccaagagaattacctcaaagaagtcaggaggcaaatatgacagagagcaggaaggctgaagatgaaatgcagaagtcagcttgggatcaaccttcacttcctgaaggaaacaaaaataaaaccaacttggatgacctagtaaagggggaaaatagatcttcagttaaacacagattggcagccatgtctaaagccagcagaaaattcccagctaaagatgtaagccccagaagacatgtagctactatcttcccccaaagtggaagcagatctggctttgaccatttatctcttggcacagtggagtgcaacccactgttccctgagcctactccaaaatctgcagagtccattggcgaaagcaggttgagtgagaacggaaagcatgtgaagaaatccgagaaccttctccccattactgtactacccaacagagaaccttctacacacgtcagcaaccagaagtctaacagcatttcacaacgacatcagaatgagtttaaaaacgtctcagaatcaccatcaaagcatgagaattctaaagacgtcacagcagctcagaatttagtaagagaatcaggagccccatcacccatcacattcaccagcctcagggaagcagaattctctgacaatcagaggaggctgagccctccttttccactggagcctgcacagaaatctagagtaagcagtccactggccagttttctgcagcaacaaaggagtgcttcatctctggagtgggaacctgagccacacctctatcgttcaaagagtttaaaaagcattaatgttcatggcgatctactacgaaaaagccatcctccaaaagtcagggagcgccatttttctgaaagcacttctattgacaatgccctgagtcgactgacccttgggaatgaattctctgtcaacaatgggtacagtcgaagattcagatctttttctgaactcccctcctgtgatggaaatgaaagttgggcttatcgcagcgggacaaaaacaggtcccaggtctgcaatatctatatacagacctatcgactatgggatctttgggaaagaacaacagttagctttcttagaaaatgtaaagaggtcacttacacaaggaagattatggaaaccaagttttcttaagaaccctggcttcctaaaagatgatttgaggaaccctcccaacccctcagagtcattaagctcaaattctcccagtagtcaggtgccagaagatggcttatctccaagtgaaccgcttaatatctatgaggatgacccagtggactcaaattgtgacacagacacaaccacagatgatgaatactacctggatgaaaatgacaaagagtcagaactgtgaggctttttcaataaaatgctttacttttttcaccaaaagcttataatggaactaaggtgtacatgtgcatgtgcatggaaggataaaagatctagtctgggcagtgtctgctctgaaatgtcccacatctccttttttttcctccacaccctatatagacacttcctgaatgctagaacaatgaattcttgttttgagagagtctctgctattttctatctctgtaaatgttcttagcctgcctttccaccactcccacttaatccctgattcactgtctgatttgggctttctgctttacttccctcctaacatttttcatctttaattgtgatttacaaccctaatatcccaggcacatacaaaacttatgaattacccagcacaactgtgaaactctgtattgcttcttccggtccacaccctatactcatgacattaaataaaaggtagggatgataacagtggggtaaatattatcatcctgtttgactcatgaacatttaggaagtttaaggtggtgatcttctctttcaaacaaagataaaggaatttattttttaacctgagaaactgattgcaaaaaggaaaaaaaaaagataaaggaattttgtaagtacttcctgttatatccgtagtggagcctgggaggcacatggtcaaagcacatgttgaggttatagattaggacctgaatccctagtaagccaatagaaggttagcagtcctagaaattcctctgaaaccgtgggggactggctggattattaagggcttttagtcaagccaaggacttaggccaggcaacctgaccatacagaaagttgcctggtcacagaatttctgcttatgaagagaacatagctgaggagcagaggtaggaagtaggtatcccttcatgggaccgacttacctttactgcagttctctcagcaactggcttttcccatttcctcagaactatccattttcacattttcttttttttgtttttgttttttgtttggttttgttttgtttttgttttttggagacggagttttgctctgtcacccaggctggagtgcagtggcatgatctgggctcactgcaacctccgcctcccgggttcaagcgattctcctgcctcagcctccagagtagctgggatcacaggcgcacccaggcgcacgctgccacgcccagctaatatttttgtattttagtagagacggggtttcaccgtgttgcccaggctggtctcgaactcctgagctcaggcaatccgcccacttcagcctcccagagtgctaggattacaggcatgagctaccatgcccagtctttttttgttttgttttgtttttgtttttgttttgagg

SEQ ID NO: 9097 - protein, 1989 aa, Homo sapiens
MTKVPPAFDFSFLNDEEARKILQVLERNEELQRAEKDRISKLQKTKRDIRWLQGVTGEWFEEIQRKKFCNETDVSQMLKQPLTYRLSKEMAKNDPIELPTSRSKNVTNQKKPTPFSSRMSFRSSFASLFSFRKSGKETSKLPSLGQKGCDGHAGPPMPVRGAAVQAKIYNSPLENHLVDSTFVPKPAVMREESGMPPPWDASLLENEFFQVLDDLDSKLAQEQSASSVNTRTPLNYGSRTQFGHFYSSGNRHGNITERHKKHYNETSNMSIYDILRPGTPREGFKTFSPRTSTIYDMYRTREPRVFKEDYVQKNTFGSTSLCFDSRQRSALPATGHFTARSLHFPATTQSKSGFIPPRHQQSPKRTPLSSIIWNRSDSSRDRENQEEFLRAPSPMEIDPADKYVYPRGFQENKRYESYHSQNVYQRVSLNAPMENAMSPDTFENSENMPFYHQSNTFTRSFFSNTFGRSGEQRRFGQGPFWGQEKGHSFWSDFHRSRKSFSSSDRDFEMISMEANSVSAIHGHNVSSEHWESFSSGYGTDVSRGQEEPHPWQFDFQRSTLDSMVVSHGNETQLTPHFGTPNVCSMTGSSYHVKSSELVSQQDSSPVEVHINKEASSFGIAQTLASSFKTSFSQISDDRRNPQSPNLQNPTVTLQKIFPNKPASHPMRSHTEVTVTSSNSVDSLPLAKSQPNILVTEVNNEKDLNESISEEDKQLSKMDQTNKAGEIPQPVSQTGISNSLPDFQNPLSQDSAKSNGFGFNASTIISSKKSPRVFSRKDTSKMYIPHTDKSNDIKQDKRFTENRKLGSTASLPFIQEHRTPPSFPRTDQGCHQELTVNNEDISRIITNNHWSSALTDTQNAQYSKCKLTPGHKTSCDSLDLSSAALPDSSPSKNSSLDAPVVPSTTVFSRRSPSDKDPSLGEREEKDNAGKNQKNQFIVSHSENQERNDSPVPTHDEVVDVKCHSHSPFRNERGKGKIRHHISCIEKLSKTESISVPTSDHRSLIEANQSNSKVSELDTIYCTLPRKSSSFLIHGRQSGSKIMAASLRNGPPPFQIKNNVEDAMGNYMLNKFSPSSPESANECSKVLSDSALEAPEATERMTNVKSSGSTSVRKGPLPFLINRAMSCPSGEPHASTGREGRKKPLTSGMDASELTPRAWERIISPVESDSSVRDCSLTKRQHQKENFQEYTEKEGKMAASRRSVFALSNEDPLPFCSDLSGKERGKTLHKVKTTSTFSVSGDEDNVKCLEVVSIYYTLPRKPSKKFCNLLQQYTQNTNLLIESPQVETETFPNALEKDKQNYSTREQSGTPSCENLKMSVNSDQTLTTENMTAFRLSNRGPLAPTLQEMASVEAAVSLPEEESKAREIFSDNLAKTPLGDSENKKERGKKLQSETLHTSLMLQRKNVSEEKSENCQQSINSSNSGPSSLPALSEVNIGNSQTRRSSWECTGSGRAIPFTGSGKCPQKDHTSTAVGDGSSGSQPREGRGDIGTNCQKMTNKTLSHSESQVFALTPALHKLQLGEETQSDEPNLESLQSEPRELPQRSQEANMTESRKAEDEMQKSAWDQPSLPEGNKNKTNLDDLVKGENRSSVKHRLAAMSKASRKFPAKDVSPRRHVATIFPQSGSRSGFDHLSLGTVECNPLFPEPTPKSAESIGESRLSENGKHVKKSENLLPITVLPNREPSTHVSNQKSNSISQRHQNEFKNVSESPSKHENSKDVTAAQNLVRESGAPSPITFTSLREAEFSDNQRRLSPPFPLEPAQKSRVSSPLASFLQQQRSASSLEWEPEPHLYRSKSLKSINVHGDLLRKSHPPKVRERHFSESTSIDNALSRLTLGNEFSVNNGYSRRFRSFSELPSCDGNESWAYRSGTKTGPRSAISIYRPIDYGIFGKEQQLAFLENVKRSLTQGRLWKPSFLKNPGFLKDDLRNPPNPSESLSSNSPSSQVPEDGLSPSEPLNIYEDDPVDSNCDTDTTTDDEYYLDENDKESEL

SEQ ID NO: 9098 - DNA, 7315 bp, Homo sapiens
gaaacatgtcattaagtttcttaaatgacgaagaggccaggaagatccttcaggtgctggaaaggaatgaggagttacagagggccgagaaggacaggatcagcaaacttcagaagacaaagagggatatcagatggcttcagggagtgactggtgaatggtttgaagaaattcaaagaaaaaagttttgcaatgaaacagatgttagccaaatgttaaaacaaccacttacatacaggctaagtaaggagatggcaaaaaatgatccgatagaattacctacatcaagatctaaaaatgtaactaatcaaaaaaagccgacacctttttcttcccggatgagcttcagatcgtcatttgcttccctgttctcattcaggaaatctggaaaggagacttcaaagcttccatcactgggacagaaaggatgtgatggccatgcaggacctcctatgcctgtgaggggagctgctgtgcaggcaaaaatatacaattcacctctggaaaatcatctagttgacagtacatttgtcccaaagccagcagtcatgagggaggagagtggcatgcctccaccgtgggatgcttcactgctggagaatgagtttttccaagttttagatgacttggatagcaaattggctcaggaacagtctgcaagctcagtgaataccagaacacccctcaactatggatcaagaacacagttcggtcacttttattccagtggtaacagacatggtaatatcacagaaaggcacaaaaaacactataatgaaacttccaatatgtctatctatgacatcctaagaccaggaactcctagggaaggttttaaaaccttttctcctaggacaagcacaatttatgatatgtataggacaagggagcccagagtctttaaagaagattatgtgcaaaagaatacttttggcagtacttcgctgtgttttgacagcaggcaacggtcggccttaccagccacagggcatttcacagcaagaagcttacattttccagccacaactcagagcaagagtgggtttataccaccaaggcaccagcagagtccaaagagaactcctttatcatccatcatatggaacagatcagattcctctagagacagggagaaccaggaagagttcctgagggcaccatcaccaatggaaattgatcccgctgacaagtatgtgtatcccaggggttttcaggagaataagagatatgaatcgtaccattcacagaatgtttaccaacgtgttagtttaaatgctcccatggagaatgcaatgagtcccgacacttttgagaactcagagaacatgccattctaccatcaaagcaacacatttaccagatctttcttcagcaatacctttggacgaagcggagaacagaggagatttggacaaggtcctttttggggccaagagaaaggacattctttctggtctgactttcatcgaagcaggaaatcattcagttcttctgacagagactttgaaatgatttccatggaagcaaatagtgtatcagccattcatggccataatgtttcttctgaacactgggaatcattttcttctggttatggaacagatgtttccagaggccaagaagagccacatccttggcagtttgattttcagagatccacactggatagcatggtggtatcacatggtaatgagacccagttgactcctcattttggcacaccaaatgtttgctccatgactggttcaagctatcacgtcaaatctagtgagttggtaagtcaacaggacagttctcctgtagaagtacatataaacaaagaagcttcctcatttggaattgctcagactctagcatcctcattcaaaacttccttttcccagatttctgatgacagaaggaatcctcagagtcccaacttgcagaatcccacagtcactttgcagaaaatttttccaaataagcctgcctctcatccaatgagaagccatacagaagtcactgtgaccagcagcaattcagttgactctctgcctcttgccaaaagccagcccaatatcttggtcacagaagtaaataatgagaaagacttaaatgaatctatttcagaagaagacaaacagctaagcaagatggaccagacaaacaaggcaggtgaaataccccaacctgtttcacagacagggatctcaaactctttacctgattttcaaaatcccttatcccaggactcagccaagagcaacgggtttggttttaatgcatctaccataataagttcaaaaaagtcacccagagtcttttccaggaaagatacctccaaaatgtatataccgcacacagataaatccaatgacattaaacaagataagaggtttactgaaaacagaaaacttggctcaacagcttcccttcctttcattcaggaacacagaacaccaccatctttccccaggacagaccaaggttgtcaccaggaattaactgtaaataatgaagatatttcaagaattattacaaataaccactggagctctgcactgactgatactcaaaatgcacaatactcaaaatgcaagttaactcctggccacaagacctcgtgtgattctttagatctgtcatcagctgcactaccagattcctcaccatcaaagaattcttcccttgatgctcctgtggttccatctactacagtgttctccaggagaagtccttcagacaaagatccatcgctaggagaaagagaagaaaaagacaatgctgggaagaaccaaaagaatcagtttattgtaagccactcagaaaaccaagagagaaatgatagtcctgtgcctacacatgatgaagtggttgatgtcaaatgccattcacactctccttttaggaatgaaagaggaaaaggaaaaataaggcatcatatatcctgtattgaaaagttaagcaaaacagaaagtatatcagtacccaccagtgatcacaggagcctcattgaagcaaatcaaagcaattccaaagtttctgaacttgacacaatttattgtaccttgccaagaaaatcaagcagttttctcatacatggcaggcagtcaggaagtaaaataatggctgcttcattgaggaatgggccacctcccttccaaatcaaaaataatgtggaagatgcaatggggaactatatgttaaacaaatttagtcccagttctcctgagtcagcgaatgaatgttccaaagtcctttcagactcagccctggaagcacctgaagccacagagagaatgacaaatgtaaaaagcagtggatctacttccgttagaaaaggaccacttccattcctcatcaacagggctatgtcatgtccctcaggggagccacatgcctcaactggaagagaaggaagaaaaaagccattgacctcaggcatggatgcttctgagctaacaccaagggcttgggagagaatcattagccctgtggaaagtgactcatctgttagagattgttctttaaccaaaagacaacaccaaaaggaaaacttccaagaatacactgagaaagagggtaaaatggctgcctccaggagaagtgtatttgctctttcaaatgaagaccctttacctttttgctcagacttgtcaggaaaagaacgtgggaaaacattacataaagttaagacgactagtacgttttctgtttctggtgatgaagataatgtaaaatgtctggaggtggtctcaatatattacactctaccgaggaaacccagcaaaaaattctgtaacctccttcaacagtatacacaaaatactaatttacttatagaatcacctcaagtggagactgaaacatttcctaacgctttagaaaaagacaaacagaattattctacacgagagcagtcaggaacaccttcatgtgaaaatctaaagatgtccgtcaactctgatcagacgctcaccactgaaaatatgactgccttccgattatcaaatagggggcccctagctcctacattacaggaaatggcttctgttgaggcagctgtttctcttcctgaagaggaatctaaagctagagagattttttcagataatttagctaaaacacctctaggtgattcagaaaacaagaaggaaagaggcaaaaagttgcaaagtgaaaccctgcatacttcattgatgcttcagagaaaaaatgtatccgaagaaaaatctgaaaattgtcaacaatccattaattcaagtaacagtggtccctctagtcttccagctctttcagaagttaatattggaaattcccaaactagaagaagttcttgggagtgtacagggagtggtagagccattccatttactggaagtggcaagtgtccccagaaagatcacacatccacagctgtaggtgatggctccagtggatcacagcctagggaaggcagaggggacattggaaccaactgccaaaaaatgactaataaaacactttctcactcagagagtcaagtctttgcccttactccagcattgcataaactacagcttggtgaggagactcagtcagatgaaccaaacttagagagtctgcagtctgaaccaagagaattacctcaaagaagtcaggaggcaaatatgacagagagcaggaaggctgaagatgaaatgcagaagtcagcttgggatcaaccttcacttcctgaaggaaacaaaaataaaaccaacttggatgacctagtaaagggggaaaatagatcttcagttaaacacagattggcagccatgtctaaagccagcagaaaattcccagctaaagatgtaagccccagaagacatgtagctactatcttcccccaaagtggaagcagatctggctttgaccatttatctcttggcacagtggagtgcaacccactgttccctgagcctactccaaaatctgcagagtccattggcgaaagcaggttgagtgagaacggaaagcatgtgaagaaatccgagaaccttctccccattactgtactacccaacagagaaccttctacacacgtcagcaaccagaagtctaacagcatttcacaacgacatcagaatgagtttaaaaacgtctcagaatcaccatcaaagcatgagaattctaaagacgtcacagcagctcagaatttagtaagagaatcaggagccccatcacccatcacattcaccagcctcagggaagcagaattctctgacaatcagaggaggctgagccctccttttccactggagcctgcacagaaatctagagtaagcagtccactggccagttttctgcagcaacaaaggagtgcttcatctctggagtgggaacctgagccacacctctatcgttcaaagagtttaaaaagcattaatgttcatggcgatctactacgaaaaagccatcctccaaaagtcagggagcgccatttttctgaaagcacttctattgacaatgccctgagtcgactgacccttgggaatgaattctctgtcaacaatgggtacagtcgaagattcagatctttttctgaactcccctcctgtgatggaaatgaaagttgggcttatcgcagcgggacaaaaacaggtcccaggtctgcaatatctatatacagacctatcgactatgggatctttgggaaagaacaacagttagctttcttagaaaatgtaaagaggtcacttacacaaggaagattatggaaaccaagttttcttaagaaccctggcttcctaaaagatgatttgaggaaccctcccaacccctcagagtcattaagctcaaattctcccagtagtcaggtgccagaagatggcttatctccaagtgaaccgcttaatatctatgaggatgacccagtggactcaaattgtgacacagacacaaccacagatgatgaatactacctggatgaaaatgacaaagagtcagaactgtgaggctttttcaataaaatgctttacttttttcaccaaaagcttataatggaactaaggtgtacatgtgcatgtgcatggaaggataaaagatctagtctgggcagtgtctgctctgaaatgtcccacatctccttttttttcctccacaccctatatagacacttcctgaatgctagaacaatgaattcttgttttgagagagtctctgctattttctatctctgtaaatgttcttagcctgcctttccaccactcccacttaatccctgattcactgtctgatttgggctttctgctttacttccctcctaacatttttcatctttaattgtgatttacaaccctaatatcccaggcacatacaaaacttatgaattacccagcacaactgtgaaactctgtattgcttcttccggtccacaccctatactcatgacattaaataaaaggtagggatgataacagtggggtaaatattatcatcctgtttgactcatgaacatttaggaagtttaaggtggtgatcttctctttcaaacaaagataaaggaatttattttttaacctgagaaactgattgcaaaaaggaaaaaaaaaagataaaggaattttgtaagtacttcctgttatatccgtagtggagcctgggaggcacatggtcaaagcacatgttgaggttatagattaggacctgaatccctagtaagccaatagaaggttagcagtcctagaaattcctctgaaaccgtgggggactggctggattattaagggcttttagtcaagccaaggacttaggccaggcaacctgaccatacagaaagttgcctggtcacagaatttctgcttatgaagagaacatagctgaggagcagaggtaggaagtaggtatcccttcatgggaccgacttacctttactgcagttctctcagcaactggcttttcccatttcctcagaactatccattttcacattttcttttttttgtttttgttttttgtttggttttgttttgtttttgttttttggagacggagttttgctctgtcacccaggctggagtgcagtggcatgatctgggctcactgcaacctccgcctcccgggttcaagcgattctcctgcctcagcctccagagtagctgggatcacaggcgcacccaggcgcacgctgccacgcccagctaatatttttgtattttagtagagacggggtttcaccgtgttgcccaggctggtctcgaactcctgagctcaggcaatccgcccacttcagcctcccagagtgctaggattacaggcatgagctaccatgcccagtctttttttgttttgttttgtttttgtttttgttttgagg

SEQ ID NO: 9099 - protein, 1982 aa, Homo sapiens
MSLSFLNDEEARKILQVLERNEELQRAEKDRISKLQKTKRDIRWLQGVTGEWFEEIQRKKFCNETDVSQMLKQPLTYRLSKEMAKNDPIELPTSRSKNVTNQKKPTPFSSRMSFRSSFASLFSFRKSGKETSKLPSLGQKGCDGHAGPPMPVRGAAVQAKIYNSPLENHLVDSTFVPKPAVMREESGMPPPWDASLLENEFFQVLDDLDSKLAQEQSASSVNTRTPLNYGSRTQFGHFYSSGNRHGNITERHKKHYNETSNMSIYDILRPGTPREGFKTFSPRTSTIYDMYRTREPRVFKEDYVQKNTFGSTSLCFDSRQRSALPATGHFTARSLHFPATTQSKSGFIPPRHQQSPKRTPLSSIIWNRSDSSRDRENQEEFLRAPSPMEIDPADKYVYPRGFQENKRYESYHSQNVYQRVSLNAPMENAMSPDTFENSENMPFYHQSNTFTRSFFSNTFGRSGEQRRFGQGPFWGQEKGHSFWSDFHRSRKSFSSSDRDFEMISMEANSVSAIHGHNVSSEHWESFSSGYGTDVSRGQEEPHPWQFDFQRSTLDSMVVSHGNETQLTPHFGTPNVCSMTGSSYHVKSSELVSQQDSSPVEVHINKEASSFGIAQTLASSFKTSFSQISDDRRNPQSPNLQNPTVTLQKIFPNKPASHPMRSHTEVTVTSSNSVDSLPLAKSQPNILVTEVNNEKDLNESISEEDKQLSKMDQTNKAGEIPQPVSQTGISNSLPDFQNPLSQDSAKSNGFGFNASTIISSKKSPRVFSRKDTSKMYIPHTDKSNDIKQDKRFTENRKLGSTASLPFIQEHRTPPSFPRTDQGCHQELTVNNEDISRIITNNHWSSALTDTQNAQYSKCKLTPGHKTSCDSLDLSSAALPDSSPSKNSSLDAPVVPSTTVFSRRSPSDKDPSLGEREEKDNAGKNQKNQFIVSHSENQERNDSPVPTHDEVVDVKCHSHSPFRNERGKGKIRHHISCIEKLSKTESISVPTSDHRSLIEANQSNSKVSELDTIYCTLPRKSSSFLIHGRQSGSKIMAASLRNGPPPFQIKNNVEDAMGNYMLNKFSPSSPESANECSKVLSDSALEAPEATERMTNVKSSGSTSVRKGPLPFLINRAMSCPSGEPHASTGREGRKKPLTSGMDASELTPRAWERIISPVESDSSVRDCSLTKRQHQKENFQEYTEKEGKMAASRRSVFALSNEDPLPFCSDLSGKERGKTLHKVKTTSTFSVSGDEDNVKCLEVVSIYYTLPRKPSKKFCNLLQQYTQNTNLLIESPQVETETFPNALEKDKQNYSTREQSGTPSCENLKMSVNSDQTLTTENMTAFRLSNRGPLAPTLQEMASVEAAVSLPEEESKAREIFSDNLAKTPLGDSENKKERGKKLQSETLHTSLMLQRKNVSEEKSENCQQSINSSNSGPSSLPALSEVNIGNSQTRRSSWECTGSGRAIPFTGSGKCPQKDHTSTAVGDGSSGSQPREGRGDIGTNCQKMTNKTLSHSESQVFALTPALHKLQLGEETQSDEPNLESLQSEPRELPQRSQEANMTESRKAEDEMQKSAWDQPSLPEGNKNKTNLDDLVKGENRSSVKHRLAAMSKASRKFPAKDVSPRRHVATIFPQSGSRSGFDHLSLGTVECNPLFPEPTPKSAESIGESRLSENGKHVKKSENLLPITVLPNREPSTHVSNQKSNSISQRHQNEFKNVSESPSKHENSKDVTAAQNLVRESGAPSPITFTSLREAEFSDNQRRLSPPFPLEPAQKSRVSSPLASFLQQQRSASSLEWEPEPHLYRSKSLKSINVHGDLLRKSHPPKVRERHFSESTSIDNALSRLTLGNEFSVNNGYSRRFRSFSELPSCDGNESWAYRSGTKTGPRSAISIYRPIDYGIFGKEQQLAFLENVKRSLTQGRLWKPSFLKNPGFLKDDLRNPPNPSESLSSNSPSSQVPEDGLSPSEPLNIYEDDPVDSNCDTDTTTDDEYYLDENDKESEL

SEQ ID NO: 9100 - DNA, 5490 bp, Homo sapiens
gataaagctactggtgcagccactgaaccacagggctttctcttccttcactctgcctctttctgattgggaacacacaacagttgttttaaagctttccctggagggtgagtgataagaaacctattacctggaagtatcgcctttctaaagtaggagaacaaaaggccacactttccccagatgcaaacttcagaagacaaagagggatatcagatggcttcagggagtgactggtgaatggtttgaagaaattcaaagaaaaaagttttgcaatgaaacagatgttagccaaatgttaaaacaaccacttacatacaggctaagtaaggagatggcaaaaaatgatccgatagaattacctacatcaagatctaaaaatgtaactaatcaaaaaaagccgacacctttttcttcccggatgagcttcagatcgtcatttgcttccctgttctcattcaggaaatctggaaaggagacttcaaagcttccatcactgggacagaaaggatgtgatggccatgcaggacctcctatgcctgtgaggggagctgctgtgcaggcaaaaatatacaattcacctctggaaaatcatctagttgacagtacatttgtcccaaagccagcagtcatgagggaggagagtggcatgcctccaccgtgggatgcttcactgctggagaatgagtttttccaagttttagatgacttggatagcaaattggctcaggaacagtctgcaagctcagtgaataccagaacacccctcaactatggatcaagaacacagttcggtcacttttattccagtggtaacagacatggtaatatcacagaaaggcacaaaaaacactataatgaaacttccaatatgtctatctatgacatcctaagaccaggaactcctagggaaggttttaaaaccttttctcctaggacaagcacaatttatgatatgtataggacaagggagcccagagtctttaaagaagattatgtgcaaaagaatacttttggcagtacttcgctgtgttttgacagcaggcaacggtcggccttaccagccacagggcatttcacagcaagaagcttacattttccagccacaactcagagcaagagtgggtttataccaccaaggcaccagcagagtccaaagagaactcctttatcatccatcatatggaacagatcagattcctctagagacagggagaaccaggaagagttcctgagggcaccatcaccaatggaaattgatcccgctgacaagtatgtgtatcccaggggttttcaggagaataagagatatgaatcgtaccattcacagaatgtttaccaacgtgttagtttaaatgctcccatggagaatgcaatgagtcccgacacttttgagaactcagagaacatgccattctaccatcaaagcaacacatttaccagatctttcttcagcaatacctttggacgaagcggagaacagaggagatttggacaaggtcctttttggggccaagagaaaggacattctttctggtctgactttcatcgaagcaggaaatcattcagttcttctgacagagactttgaaatgatttccatggaagcaaatagtgtatcagccattcatggccataatgtttcttctgaacactgggaatcattttcttctggttatggaacagatgtttccagaggccaagaagagccacatccttggcagtttgattttcagagatccacactggatagcatggtggtatcacatggtaatgagacccagttgactcctcattttggcacaccaaatgtttgctccatgactggttcaagctatcacgtcaaatctagtgagttggtaagtcaacaggacagttctcctgtagaagtacatataaacaaagaagcttcctcatttggaattgctcagactctagcatcctcattcaaaacttccttttcccagatttctgatgacagaaggaatcctcagagtcccaacttgcagaatcccacagtcactttgcagaaaatttttccaaataagcctgcctctcatccaatgagaagccatacagaagtcactgtgaccagcagcaattcagttgactctctgcctcttgccaaaagccagcccaatatcttggtcacagaagtaaataatgagaaagacttaaatgaatctatttcagaagaagacaaacagctaagcaagatggaccagacaaacaaggcaggtgaaataccccaacctgtttcacagacagggatctcaaactctttacctgattttcaaaatcccttatcccaggactcagccaagagcaacgggtttggttttaatgcatctaccataataagttcaaaaaagtcacccagagtcttttccaggaaagatacctccaaaatgtatataccgcacacagataaatccaatgacattaaacaagataagaggtttactgaaaacagaaaacttggctcaacagcttcccttcctttcattcaggaacacagaacaccaccatctttccccaggacagaccaaggttgtcaccaggaattaactgtaaataatgaagatatttcaagaattattacaaataaccactggagctctgcactgactgatactcaaaatgcacaatactcaaaatgcaagttaactcctggccacaagacctcgtgtgattctttagatctgtcatcagctgcactaccagattcctcaccatcaaagaattcttcccttgatgctcctgtggttccatctactacagtgttctccaggagaagtccttcagacaaagatccatcgctaggagaaagagaagaaaaagacaatgctgggaagaaccaaaagaatcagtttattgtaagccactcagaaaaccaagagagaaatgatagtcctgtgcctacacatgatgaagtggttgatgtcaaatgccattcacactctccttttaggaatgaaagaggaaaaggaaaaataaggcatcatatatcctgtattgaaaagttaagcaaaacagaaagtatatcagtacccaccagtgatcacaggagcctcattgaagcaaatcaaagcaattccaaagtttctgaacttgacacaatttattgtaccttgccaagaaaatcaagcagttttctcatacatggcaggcagtcaggaagtaaaataatggctgcttcattgaggaatgggccacctcccttccaaatcaaaaataatgtggaagatgcaatggggaactatatgttaaacaaatttagtcccagttctcctgagtcagcgaatgaatgttccaaagtcctttcagactcagccctggaagcacctgaagccacagagagaatgacaaatgtaaaaagcagtggatctacttccgttagaaaaggaccacttccattcctcatcaacagggctatgtcatgtccctcaggggagccacatgcctcaactggaagagaaggaagaaaaaagccattgacctcaggcatggatgcttctgagctaacaccaagggcttgggagagaatcattagccctgtggaaagtgactcatctgttagagattgttctttaaccaaaagacaacaccaaaaggaaaacttccaagaatacactgagaaagagggtaaaatggctgcctccaggagaagtgtatttgctctttcaaatgaagaccctttacctttttgctcagacttgtcaggaaaagaacgtgggaaaacattacataaagttaagacgactagtacgttttctgtttctggtgatgaagataatgtaaaatgtctggaggtggtctcaatatattacactctaccgaggaaacccagcaaaaaattctgtaacctccttcaacagtatacacaaaatactaatttacttatagaatcacctcaagtggagactgaaacatttcctaacgctttagaaaaagacaaacagaattattctacacgagagcagtcaggaacaccttcatgtgaaaatctaaagatgtccgtcaactctgatcagacgctcaccactgaaaatatgactgccttccgattatcaaatagggggcccctagctcctacattacaggaaatggcttctgttgaggcagctgtttctcttcctgaagaggaatctaaagctagagagattttttcagataatttagctaaaacacctctaggtgattcagaaaacaagaaggaaagaggcaaaaagttgcaaagtgaaaccctgcatacttcattgatgcttcagagaaaaaatgtatccgaagaaaaatctgaaaattgtcaacaatccattaattcaagtaacagtggtccctctagtcttccagctctttcagaagttaatattggaaattcccaaactagaagaagttcttgggagtgtacagggagtggtagagccattccatttactggaagtggcaagtgtccccagaaagatcacacatccacagctgtaggtgatggctccagtggatcacagcctagggaaggcagaggggacattggaaccaactgccaaaaaatgactaataaaacactttctcactcagagagtcaagtctttgcccttactccagcattgcataaactacagcttggtgaggagactcagtcagatgaaccaaacttagagagtctgcagtctgaaccaagagaattacctcaaagaagtcaggaggcaaatatgacagagagcaggaaggctgaagatgaaatgcagaagtcagcttgggatcaaccttcacttcctgaaggaaacaaaaataaaaccaacttggatgacctagtaaagggggaaaatagatcttcagttaaacacagattggcagccatgtctaaagccagcagaaaattcccagctaaagatgtaagccccagaagacatgtagctactatcttcccccaaagtggaagcagatctggctttgaccatttatctcttggcacagtggagtgcaacccactgttccctgagcctactccaaaatctgcagagtccattggcgaaagcaggttgagtgagaacggaaagcatgtgaagaaatccgagaaccttctccccattactgtactacccaacagagaaccttctacacacgtcagcaaccagaagtctaacagcatttcacaacgacatcagaatgagtttaaaaacgtctcagaatcaccatcaaagcatgagaattctaaagacgtcacagcagctcagaatttagtaagagaatcaggagccccatcacccatcacattcaccagcctcagggaagcagaattctctgacaatcagaggaggctgagccctccttttccactggagcctgcacagaaatctagagtaagcagtccactggccagttttctgcagcaacaaaggagtgcttcatctctggagtgggaacctgagccacacctctatcgttcaaagagtttaaaaagcattaatgttcatggcgatctactacg

SEQ ID NO: 9101 - protein, 1730 aa, Homo sapiens
MLKQPLTYRLSKEMAKNDPIELPTSRSKNVTNQKKPTPFSSRMSFRSSFASLFSFRKSGKETSKLPSLGQKGCDGHAGPPMPVRGAAVQAKIYNSPLENHLVDSTFVPKPAVMREESGMPPPWDASLLENEFFQVLDDLDSKLAQEQSASSVNTRTPLNYGSRTQFGHFYSSGNRHGNITERHKKHYNETSNMSIYDILRPGTPREGFKTFSPRTSTIYDMYRTREPRVFKEDYVQKNTFGSTSLCFDSRQRSALPATGHFTARSLHFPATTQSKSGFIPPRHQQSPKRTPLSSIIWNRSDSSRDRENQEEFLRAPSPMEIDPADKYVYPRGFQENKRYESYHSQNVYQRVSLNAPMENAMSPDTFENSENMPFYHQSNTFTRSFFSNTFGRSGEQRRFGQGPFWGQEKGHSFWSDFHRSRKSFSSSDRDFEMISMEANSVSAIHGHNVSSEHWESFSSGYGTDVSRGQEEPHPWQFDFQRSTLDSMVVSHGNETQLTPHFGTPNVCSMTGSSYHVKSSELVSQQDSSPVEVHINKEASSFGIAQTLASSFKTSFSQISDDRRNPQSPNLQNPTVTLQKIFPNKPASHPMRSHTEVTVTSSNSVDSLPLAKSQPNILVTEVNNEKDLNESISEEDKQLSKMDQTNKAGEIPQPVSQTGISNSLPDFQNPLSQDSAKSNGFGFNASTIISSKKSPRVFSRKDTSKMYIPHTDKSNDIKQDKRFTENRKLGSTASLPFIQEHRTPPSFPRTDQGCHQELTVNNEDISRIITNNHWSSALTDTQNAQYSKCKLTPGHKTSCDSLDLSSAALPDSSPSKNSSLDAPVVPSTTVFSRRSPSDKDPSLGEREEKDNAGKNQKNQFIVSHSENQERNDSPVPTHDEVVDVKCHSHSPFRNERGKGKIRHHISCIEKLSKTESISVPTSDHRSLIEANQSNSKVSELDTIYCTLPRKSSSFLIHGRQSGSKIMAASLRNGPPPFQIKNNVEDAMGNYMLNKFSPSSPESANECSKVLSDSALEAPEATERMTNVKSSGSTSVRKGPLPFLINRAMSCPSGEPHASTGREGRKKPLTSGMDASELTPRAWERIISPVESDSSVRDCSLTKRQHQKENFQEYTEKEGKMAASRRSVFALSNEDPLPFCSDLSGKERGKTLHKVKTTSTFSVSGDEDNVKCLEVVSIYYTLPRKPSKKFCNLLQQYTQNTNLLIESPQVETETFPNALEKDKQNYSTREQSGTPSCENLKMSVNSDQTLTTENMTAFRLSNRGPLAPTLQEMASVEAAVSLPEEESKAREIFSDNLAKTPLGDSENKKERGKKLQSETLHTSLMLQRKNVSEEKSENCQQSINSSNSGPSSLPALSEVNIGNSQTRRSSWECTGSGRAIPFTGSGKCPQKDHTSTAVGDGSSGSQPREGRGDIGTNCQKMTNKTLSHSESQVFALTPALHKLQLGEETQSDEPNLESLQSEPRELPQRSQEANMTESRKAEDEMQKSAWDQPSLPEGNKNKTNLDDLVKGENRSSVKHRLAAMSKASRKFPAKDVSPRRHVATIFPQSGSRSGFDHLSLGTVECNPLFPEPTPKSAESIGESRLSENGKHVKKSENLLPITVLPNREPSTHVSNQKSNSISQRHQNEFKNVSESPSKHENSKDVTAAQNLVRESGAPSPITFTSLREAEFSDNQRRLSPPFPLEPAQKSRVSSPLASFLQQQRSASSLEWEPEPHLYRSKSLKSINVHGDL

SEQ ID NO: 9102 - DNA, 507 bp, Homo sapiens
cgatggatctttgtctgaaggacttctcctggagaacactgtagtagatggaaccacaggagcatcaagggaagaattctttgatggttgctacaataattccagctgtgtatacctcctgggatcataatagaaatgaacctctgaagcatcttactgaagaaggcccctacgttgactgtccagctgactgtctctacccgactgctgtcccacacaatatgggccaggcgatggtattgcctttgcaaactaaatgaagttcctcaaagtgaagctggtggcgacttcagagttaacttttcaaatggccgggcttatatagaataacctttgtaaaagtaaactatgatcatataataagatacatgtgcatttggaacgccactgcttttggaacctgtctcagtttttatcatcatacaaggttaattgtctaatgtcaattagattttatcacagtgcatttgggtcctaatctggaacaataaaagtctattaaacagc

SEQ ID NO: 9103 - protein, 70 aa, Homo sapiens
MEPQEHQGKNSLMVATIIPAVYTSWDHNRNEPLKHLTEEGPYVDCPADCLYPTAVPHNMGQAMVLPLQTK

SEQ ID NO: 9104 - DNA, 5864 bp, Homo sapiens
gtaatcgagttattcttattgggctgagaaaacctacacttgtttgaactgctttctgggaacagagaaggggagggaagcccctgtcggctggaaactaaaggaacagagcaaaggcattatttgagtgtcttgggatgttctgtattccatctaacagtgcactaaaaaaagataagttcctgagaacaattctgattttgtagttcagtttagttacttggcgatgaggaactggaataaatgtgaagaacaaactcttgagacaatatagcagagagtagagaattcagaaatgaagacaacatttatgcttgttttcttgctgggcttgcatgtggagtgactatgcctttttcaccttctgattggttggattccaattaaatggtggtgcctatcttaacccctgaatcaagactgaaagacttttgagatggacttttgaaagagtgtttgagggaactgttaatgctggctgtactgacctgcagaagatggtgcaactgggtctgaaaggtggacactgctgcctccggaccgctgtcaaagcaagaatatcaccgtgaagcaggctgaaagaaatgctctgaagggaaagctaagacattttgatgaggactatgtttctttctgctataaggaaaagccgtggaaacacacccggattgaaatgcccctggcccgcctgacccgaccctaggagaagcagccgagttacccgacatcgtggtcagcaggagctgggtcggtggctggatgctgcagcagcagggactcagcgcctgggagggctcctggggcagggagagaagcagagatgcaacatttttaaaatttcacaaagcatccggctgcacccaggtccctggaacaggagacaaacagaattaatgttttataccttcgggtataggtttgagttttttccccctcatgccaagtatttaaaacctctagaaacccatgatttgacaatcaatgattgcgcgatactttcaatttgaatattcaaaggcttaacaaaatggactatcttctgcagaaatcctgcacacaggcaccccacagagagtccagagaaacagggagtgagacccctttgggtcctggcccttgcttttattatagtttgagcattttgtcctccttcccacagatagagcagatgtcctcaaagatgctctgtatttcagccttcagggcagctaagaagccatgagtgacttaggctgccctggccatgaacaccggagccagactggctggccagactgattcccgcatcccccatctgtgttttgaggggaaatctcaggttttgaggaatgaacatggcagctagtgggtgtggcacagcaagaagtcgctctgggcccaggtggcaggccagcggcctagcagaggccttcgctctgcacctcctatttttctggctccgcctggctaccagcgggcttccctccccctttcatcccgctcttcctgggcccgacactggggtttctgctcagaatgactgcccattaagaccctttcctcctccccacagagctggggatgccaggagcctcatcctctggagactttctgactctgggtttcaccaccgcactgcgaagtgccctctttgctttttcgccttctagagccacccctgcctttttgctgtaggagcacatgttaggaaacaatgacaagtttggctcctgctcattttaactgaaaggatgtggacttaggttcaagccttctcccattggggtgagaagggggagggacttgggatcaggcttcccccttggtccaggcccaagcccctcactaatgacttgggattctactgggtcatcttctgtgagtacttactgtgcctcttccatgtgatttggaaggtgaggagacaggaatggtccacagagggagagagtgccaggccaagtcctctcatagccacccgccccctccacagaaggggacagcaagagaagagagaggcatggtgaggttccttttgcaaataaccaagatatttccaggattcaagaccagtccatggttttaggcctctgctgtttattctctgagttctcagaaatgcaaaaagtgtagtttagccccagaggcctcaagaaaaagattggggtgcccccaaatgtgtcaaatacagagggaaacacacagagcttagggaaagggcaactgagaatgacaagactgataggaattgcttggcagctgaagccacatctctgggggagaggagcaggcctgggaacacctgaggtggcacctggcagtggagggcaggatggatgtattgaaatctgacagcttctggaacttctttctacaaatgcccctgagcctgtgtcctaggtttccctgatggaccagacctgaggaggggaaggacaatgggggtggagatggcacctcccctccctgcatgccttcttcctcgctgtgcctaggccttgccccctctgaaggaacagtgaaccaagcagcttggaatctagggatggtctcttgtcctcatagcgtcttccattacttcttttcttcgctgctctcctcctttttgttatactcttattttttgatttgcttttaaaaaccttctttgttgcatttttgtttatttctttctgtgtttctttgtctctcttcctgtcattgctttcttccatttcttatctgtactactggttttctccctggcttcacgtgtctctgtgttcccctatgctggggtgtcctcccagtgctttcaggcttcatctccttcctaacctctcctttctattttttttttttttttttttgagatggagtcttgctcagtcgcccaggctggagtgctaacctctcctttcatgtggagatggacagggatggcaggagcactgagtgctcttgacaacaccattgaagatgatgctgacgatcagctaccctgtggagaaggcaggccaggctgggtgagaggggagctccttggaagtcagggggtctgtaaggacagcaaggatctctttgtcccaacctccagcagcctttatgggtgcttctgtgttggccttgtttctgggatggccatctcagtgctgttgctggctagcgatttcagaaaactagatttttctaggcctgagccctgttttgagaaagaagcttccctctggtttgtagctcaacattaatgagttttggttcctgttgtttctataattacaaaaccccagcacaggtatttaagagccaaaggccatgcttgtggaagtaagggaggatctttctaaatggatcctgcaaatcctccttacagatctgagtggatgatcaggcccagagcaaccctgagaccccaggtacccacagcattggctgttcttcataggagactcagagaagacttcataggagactcattattgtttactggacatcaggtgctatattgtatagcattcacattccacaggtgaggaaacaggctcagaggaataagtggcatgccaagatcactgagtatatcagtagcagaattaggattcagactttgttaggcctaactccaaagccctggctttttttttttttgagatggaatcttactctgtcaccgggctggagtgcagtggcatgatctcagctcactgcaatctctgcctcctgggttcaagtgattcccctgccttagcctcctgagtagctgggactacaggcatgcaccaccacgcccagctaatttttgtgtttttagtagagaggaggtttcaccgtgttggccaggatggtctcaatctcttgaccttgtgatctgcctgcctcggcctcccaaagtactgggattataggcatgagccaccatgcccggcctttgctcttaactactgatgttgtcttcctgatcttttctacaagaagcttttaaactttttggactttaacctacaataagaaatccattttacatgttcacatgtatctataacaacatttatatttctaaaacaaacttttcatgaaacaagatatacctacatatgtcaggcactctgatattttctattctagtccaccttttccatttcattctatttatgggaaatatatgttggttgggagtcactgagttaatttaatgacccactaataggctgtgagtggcattggaaaaatacctgcttgtaagatatgcgaacacacgtttcaaggttgtttgtgcatgtggaaatattttggggtgctatctgttttaccatcagtttgtacaaggacactaagacagtgtagcctgctgacttgagaatgttctgtaaggactggaaacactagaatcttgaagaaacgcctggctagaggtgagggtaagctgttaattacactgattacagtttgtgcctctcagactgagaactcttttcttcttgctgggggcattgctatctctaggatgtttgccctgaagtcctgatagtctctttggggttttaataaatggctgaaaaaattgttgtggggtttcaacaggcgttcataggcacccttgcttggcaatataacatggcttttgatgtttgggtgttggaagggatctttgaagtgctgagagggactcagtctttttccaaaatctctgcttgtgtctgtccagcctctggctccactgcttggctgagatcctggcccatagtagaatctgtgtagaggaaacgagagctcactatttgtgaggcagcctgttccactattggactgctttaaatgtagtgatcagtgattatgctataatccaatcatgtattaattgggcaccaactatgcactaggcatggtatcaagtaccaggagtacaaaaataagtaaaccttgatttctgctatcaattactctcttctcctacttctgtactactgcttttctattgtgagtttgtttagttcattaattggtttattcattcattcaacaatcatatactgattagctactctgaccaggtccagtactaactctgaagaagttatgcccatcccatcttcaccccaagccttctccttttgagactcctcatccagtttctttagttcttcatatatcactgtttttcagatctctggctatccttgccattgacctcagaaatcctgtatttgaccttaaccttcttatacccagtccatacccaaagtgatggaaatggaatagatttctttttaaagttttaaacgaatattttgactgaaaaattttggcagtcttgtatgcaaatgacactgcagagcattgttttctcccccccacgtaggagattttattcaactaaggcacaggcatattaaaagactttcagtataaggaaaaggggtagtttattccctccaaatttgactacagctcgaaattgtctttattaatgcaaagttcttttgtcaccttgactttgggacactgttaccaaacctcgtgggaaatatcaagttccagaagattgaatacatgcaggaaacaaatgttttttgggccctagagtgaacatttggtccatatgaaaatgaccaggaagacaattaggtgaaggttttttaatgatttgtgctacgtcagtctcttcccataagacatattcaaagttttaacttttccttaagaggcttccatggggagcaagcatttgataattcatcctttaagaaaaacaccaccgtacactgcttgaagagttcctcttctattacttaaaacgtttttattgtgcaacatttaaggcatacaaaaacatataaagaataccatgatgaaaatctatgactgtattaccaagcttaagaaataaaacagttgagtgatctctc

SEQ ID NO: 9105 - protein, 124 aa, Homo sapiens
MESCSVAQAGVLTSPFMWRWTGMAGALSALDNTIEDDADDQLPCGEGRPGWVRGELLGSQGVCKDSKDLFVPTSSSLYGCFCVGLVSGMAISVLLLASDFRKLDFSRPEPCFEKEASLWFVAQH

SEQ ID NO: 9106 - DNA, 967 bp, Homo sapiens
gtaatcgagttattcttattgggctgagaaaacctacacttgtttgaactgctttctgggaacagagaaggggagggaagcccctgtcggctggaaactaaaggaacagagcaaaggcattatttgagtgtcttgggatgttctgtattccatctaacagtgcactaaaaaaagataagttcctgagaacaattctgattttgtagttcagtttagttacttggcgatgaggaactggaataaatgtgaagaacaaactcttgagacaatatagcagagagtagagaattcagaaatgaagacaacatttatgcttgttttcttgctgggcttgcatgtggagtgactatgcctttttcaccttctgattggttggattccaattaaatggtggtgcctatcttaacccctgaatcaagactgaaagacttttgagatggacttttgaaagagtgtttgagggaactgttaatgctggctgtactgacctgcagaagatggtgcaactgggtctgaaaggtggacactgctgcctccggaccgctgtcaaagcaagaatatcaccgtgaagcaggctgaaagaaatgctctgaagggaaagctaagacattttgatgaggactatgtttctttctgctataaggaaaagccgtggaaacacacccggattgaaatgcccctggcccgcctgacccgaccctaggagaagcagccgagttacccgacatcgtggtcagcaggagctgggtcggtggctggatgctgcagcagcagggactcagcgcctgggagggctcctggggcagggagagaagcagagatgcaacatttttaaaatttcacaaagcatccggctgcacccaggtccctggaacaggagacaaacagaattaatgttttataccttcgggtataggtttgagttttttccccctcatgccaagtatttaaaacctctagaaaccca

SEQ ID NO: 9107 - protein, 44 aa, Homo sapiens
MLQQQGLSAWEGSWGRERSRDATFLKFHKASGCTQVPGTGDKQN

SEQ ID NO: 9108 - DNA, 1925 bp, Homo sapiens
atagaacagagaggcacaaagtcaaggcatgcgagtaagggccggggatccggagaggacgcgagccacgctgtggccgctcccactcagcgcctgtcccggagggcagaggcccagaggccgagttggccgctccggacgtccgcgtaccccaggcccccgcccgccctcccacgtatccactgttgtgtcctgagacacgcggtgcggaccctgcgcgcccagaagctgctacggggggagctagaggctcacagtgagcctgggacgggggcagagcgcaccgactgcactgagccgagctgtggcggtccctgcgcggaccccgaggggcgcccgctgcccgcggagtccggagccgatcggggaacggggtggtggggctgcgctgcggtccccgcagtgaccaggcgaggcgctggcatcctggcactatctccaggcgtccaggctgaacgcgcggtcaccctcggccgccgcacccagcgcacttcccggcgcgattcctggacgcacactgcaggcgaacccctcttgagcgcgcccgccacctcccgcgagccggggcagtccgaccgggccccgccagccccggggcggcccctaccgaagggcggcctcccggcggagtgcagggtcatcgggagccccggacggctttccccagctcgcgctgcgcggactcgccccggagcctcagtgcgcctcggagaaacgcctgccccttcctcgggcctggcccctttactaggtcagtctggcaggtacctcgccggcccaggacggggctggccaaacctcaccgcttgctcccgggctggcttccagaccaagggcacgcagaggtcggagcctgcccagaagccacacctggccagaaaaaccgaaggtgtatcaaggtgtccgagtgaagatcacagtgaaggagctgctgcagcaaagacgggcacaccaggcggcctccgggggaacccggtccggaggcagcagtgtccacctttcagacccagttgcaccatcttctgcaggactgtattttgagcctgaaccaatttcttccacgcccaattatttgcaacggggagaattttccagttgtgtttcatgtgaagaaaactcaagctgcctcgaccagatctttgattcctaccttcagacagagatgcacccggagcctttgctcaattccacacaaagtgctccacaccatttcccagacagcttccaggccacccctttctgctttaaccagagcctgatcccaggatcaccttcaaattcctccattctctctggctccttagactacagttactcgccagtgcagctgccttcatatgctccagagaattacaattcccctgcttctctggacaccagaacctgtggctaccccccagaagaccattcctaccaacacttgtcctcacacgcccagtacagctgcttctcctcggccaccacctccatctgctactgcgcatcgtgtgaggcagaggacttggatgctctccaggcagcagagtacttctacccgagcacagactgtgtggactttgccccctcagcagccgccaccagtgatttctataagagggaaacaaactgtgacatctgctatagttaatagaaattacagtaattcagaacatggcatgggtatatctatttttctaccacgtctagatgacactgcaaaatatgcaacttggtaacacaatatcccaagcacagtttacatgtcactatttccaattttctgatgctaagcattcatatgaagtcctcagacccggtcacagcgccactcctactttgtatgctcatagtttaaatttttgtaggaaactttcaattgttttactttttgtataacgaacaaatgctgtctccttttttactaataaataattttgtattactaa

SEQ ID NO: 9109 - protein, 154 aa, Homo sapiens
MHPEPLLNSTQSAPHHFPDSFQATPFCFNQSLIPGSPSNSSILSGSLDYSYSPVQLPSYAPENYNSPASLDTRTCGYPPEDHSYQHLSSHAQYSCFSSATTSICYCASCEAEDLDALQAAEYFYPSTDCVDFAPSAAATSDFYKRETNCDICYS

SEQ ID NO: 9110 - DNA, 1266 bp, Homo sapiens
tcccacgtatccactgttgtgtcctgagacacgcggtgcggaccctgcgcgcccagaagctgctacggggggagctagaggctcacagtgagcctgggacgggggcagagcgcaccgactgcactgagccgagctgtggcggtccctgcgcggaccccgaggggcgcccgctgcccgcggagtccggagccgatcggggaacggggtggtggggctgcgaaaaaccgaaggtgtatcaaggtgtccgagtgaagatcacagtgaaggagctgctgcagcaaagacgggcacaccaggcggcctccgggggaacccggtccggaggcagcagtgtccacctttcagacccagttgcaccatcttctgcaggactgtattttgagcctgaaccaatttcttccacgcccaattatttgcaacggggagaattttccagttgtgtttcatgtgaagaaaactcaagctgcctcgaccagatctttgattcctaccttcagacagagatgcacccggagcctttgctcaattccacacaaagtgctccacaccatttcccagacagcttccaggccacccctttctgctttaaccagagcctgatcccaggatcaccttcaaattcctccattctctctggctccttagactacagttactcgccagtgcagctgccttcatatgctccagagaattacaattcccctgcttctctggacaccagaacctgtggctaccccccagaagaccattcctaccaacacttgtcctcacacgcccagtacagctgcttctcctcggccaccacctccatctgctactgcgcatcgtgtgaggcagaggacttggatgctctccaggcagcagagtacttctacccgagcacagactgtgtggactttgccccctcagcagccgccaccagtgatttctataagagggaaacaaactgtgacatctgctatagttaatagaaattacagtaattcagaacatggcatgggtatatctatttttctaccacgtctagatgacactgcaaaatatgcaacttggtaacacaatatcccaagcacagtttacatgtcactatttccaattttctgatgctaagcattcatatgaagtcctcagacccggtcacagcgccactcctactttgtatgctcatagtttaaatttttgtaggaaactttcaattgttttactttttgtataacgaacaaatgctgtctccttttttactaataaataattttgtattactaa

SEQ ID NO: 9111 - protein, 154 aa, Homo sapiens; identical to SEQ ID NO: 9109

SEQ ID NO: 9112 - DNA, 1521 bp, Homo sapiens
actatctccaggcgtccaggctgaacgcgcggtcaccctcggccgccgcacccagcgcacttcccggcgcgattcctggacgcacactgcagggtagtggtcagggccggagccgccccggactcctgcggccacctccaccttgaaagctcgcccggctcggcttggcctaacagccagtccccaacctactcactgcggcttttcggggcccggggctgaggctgcccctgctcccagcgctcaggggtccctcccagcgaacccctcttgagcgcgcccgccacctcccgcgagccggggcagtccgaccgggccccgccagccccggggcggcccctaccgaagggcggcctcccggcggagtgcagggtcatcgggagccccggacggctttccccagctcgcgctgcgcggactcgccccggagcctcagtgcgcctcggagaaacgcctgccccagaaagggaggggaaaaaccgaaggtgtatcaaggtgtccgagtgaagatcacagtgaaggagctgctgcagcaaagacgggcacaccaggcggcctccgggggaacccggtccggaggcagcagtgtccacctttcagacccagttgcaccatcttctgcaggactgtattttgagcctgaaccaatttcttccacgcccaattatttgcaacggggagaattttccagttgtgtttcatgtgaagaaaactcaagctgcctcgaccagatctttgattcctaccttcagacagagatgcacccggagcctttgctcaattccacacaaagtgctccacaccatttcccagacagcttccaggccacccctttctgctttaaccagagcctgatcccaggatcaccttcaaattcctccattctctctggctccttagactacagttactcgccagtgcagctgccttcatatgctccagagaattacaattcccctgcttctctggacaccagaacctgtggctaccccccagaagaccattcctaccaacacttgtcctcacacgcccagtacagctgcttctcctcggccaccacctccatctgctactgcgcatcgtgtgaggcagaggacttggatgctctccaggcagcagagtacttctacccgagcacagactgtgtggactttgccccctcagcagccgccaccagtgatttctataagagggaaacaaactgtgacatctgctatagttaatagaaattacagtaattcagaacatggcatgggtatatctatttttctaccacgtctagatgacactgcaaaatatgcaacttggtaacacaatatcccaagcacagtttacatgtcactatttccaattttctgatgctaagcattcatatgaagtcctcagacccggtcacagcgccactcctactttgtatgctcatagtttaaatttttgtaggaaactttcaattgttttactttttgtataacgaacaaatgctgtctccttttttactaataaataattttgtattactaa

SEQ ID NO: 9113 - protein, 154 aa, Homo sapiens; identical to SEQ ID NO: 9109

SEQ ID NO: 9114 - DNA, 1231 bp, Homo sapiens
tctacacggacttaatacacctaccgcaattctatgcacctgtctttcaaattctataaaatatttgttgacactttccctttcacttgttttttacaatatattttgtacaaaaatttgtcaaacattgaaaaaaaaaaagaaagcaactttttctgagaaggaagaatctggcttaccttatagcagaaagaaacatagtcctcatcaaaatgtcttagctttcccttcagagcatttctttcagcctgcttcacggtgatattcttgctttgacagcggtccggaggcagcagtgtccacctttcagacccagttgcaccatcttctgcaggactgtattttgagcctgaaccaatttcttccacgcccaattatttgcaacggggagaattttccagttgtgtttcatgtgaagaaaactcaagctgcctcgaccagatctttgattcctaccttcagacagagatgcacccggagcctttgctcaattccacacaaagtgctccacaccatttcccagacagcttccaggccacccctttctgctttaaccagagcctgatcccaggatcaccttcaaattcctccattctctctggctccttagactacagttactcgccagtgcagctgccttcatatgctccagagaattacaattcccctgcttctctggacaccagaacctgtggctaccccccagaagaccattcctaccaacacttgtcctcacacgcccagtacagctgcttctcctcggccaccacctccatctgctactgcgcatcgtgtgaggcagaggacttggatgctctccaggcagcagagtacttctacccgagcacagactgtgtggactttgccccctcagcagccgccaccagtgatttctataagagggaaacaaactgtgacatctgctatagttaatagaaattacagtaattcagaacatggcatgggtatatctatttttctaccacgtctagatgacactgcaaaatatgcaacttggtaacacaatatcccaagcacagtttacatgtcactatttccaattttctgatgctaagcattcatatgaagtcctcagacccggtcacagcgccactcctactttgtatgctcatagtttaaatttttgtaggaaactttcaattgttttactttttgtataacgaacaaatgctgtctccttttttactaataaataattttgtattactaa

SEQ ID NO: 9115 - protein, 154 aa, Homo sapiens; identical to SEQ ID NO: 9109

SEQ ID NO: 9116 - DNA, 2899 bp, Homo sapiens
gtagaatgtggaaattactcaggctgcaggggtcaggcaggagggttgcatttgtcttgtgtcagcaagaatcaagaggttggaagaagtgagagggaattctgaccacggaaaacctcaaccacagatgaggagccacagctccggagcaagccccagccccggcccggccataccagggcgtccgtgtgaaggagccagtgaaggaactgctgaggaggaagcgaggccacgccagcagtggggcagcacctgcacctacggcggtggtgctgccccatcagcccctggcgacctacaccacagtgggtccttcctgcctggacatggaaggttctgtgtctgcagtgacagaggaggctgccctgtgtgccggctggctctcccagcccaccccggccaccctgcagcccctggccccatggacaccttacaccgagtatgtgccccatgaagctgtcagctgcccctactcagctgacatgtatgtgcagcccgtgtgccccagctacacggtggtggggccctcctcagtgttgacctatgcctctccgccactcatcaccaatgtcacgacaagaagctccgccacgcccgcagtggggcccccgctggagggcccagagcaccaggcacccctcacctatttcccgtggcctcagcccctttccacactacccacctccaccctgcagtaccagcctccggccccagccctacctgggccccagtttgtccagctccccatctctatcccagagccagtccttcaggacatggaagaccccagaagagccgccagctcgttgaccatcgacaagctgcttttggaggaagaggatagcgacgcctatgcgcttaaccacactctctctgtggaaggcttttaggcgtggctcccacctgagtcctgttccctgaaactgggattttaaaatgagcctggaattgagccccaggttcatgcttgtttggagtagtcatttcatgactacactttctacgcacagctagaattgtagacctgtaaaccttccttcccttcttccttcccctccctccctcacttcctccctctcccccatccttccattcttcccctccctcccttcttcctttccaaccccttccttccttttcctccctcccttccttccctccttcccttctccctttccaaccccttccttccttttcctccctcccttccttccctccttcccttctccctttccttctttacctccctccctccctcgcttcttctctctttcttacttcttttttcaattctgttccattttgggaggtaattatagggattttagcaataacattttatgtcaaatgttgccaagtctgtggtccatgggctttcatttctgtcacatttcatttcttggaaaaggcctccttcctccagtgcctgctgaaccatcttagggtcactcacaccctctgtaattttaagatgtatgtggtggccggcgggaagaccagccccgacagcacctcctgagaaagtcagccaagggcctaccctgatgccagagtccttgagctgtcagttcccacagttgctcctttgtttgctcttctcagcctcggccagatttacagtccaggcagcaaaatctcaaggcctggggctcagagtagtaaggggtgggaagtgggtggcagggagaaaagaacatcagggtgggtggggacaggccagtgacgaagagagggacagaggagggatgggaacaggctgtgcatcttagttggagagaggggtgtgggaggaagcttgagtttgatgcagggaggaggaaggctgaggaatgacttggctccagattacttggttattaagaagaacaataaactaaaggaaagcattgcttgaagagatggttttgctgctctccttgaggatacgtgcaagggaagttgggctgttgtaaacagggtgaagggtgtgtttggtcggccatttctgtctcacctctaggccctctgctggtgctgtggaggccaagaccccattaagcctaaaggtgatgggtcctcgcctaggcttagtgctaccatgtgggttttgtttctttccttccttccttccttccttccttccttccttccttccttccttccttccttccttccttctttccttccttccttccttccttccttcctctctctttctttcttttttttggttttttttgggacggagtctcactccattgcccaggctggagtacaatggtgcgatcttggctcactgcacctctgtctcccaagttcaagtgattctcctgcctgagcctcccgagtagctgggattacaggtgcatgccaccatgcctggctaatttttgtatttttagtagagacggggtttcaccatgttggccaggctggtctcgaactcctgaccttgtgatccgcccgcctcagcctctcagagtgctgggatcacaggcgtgagccaccgcacccagccttttaccatgtgggtttctttagtgtcttaaaagcgtccataagccaccattctgtggaaccaaggccccctccacgcaaacaccctccctcctggggacctctggagcctcagccagaagtaccattaggtttaattttaatttgttttgctggagaaacatcaggtttgtaggagactgagttgttagcaggtgtgcttagctcttgatagtgaacgtgtaccttgggaactggctcacccacctgctaatagcaccatcgtcactattaagcagacatttcagttggtagaatccatgtagaagtcatggacttttctgggaaatgacttttctgggaaatgacagtttctttgacatattttctttgcccactttaaataaaaactctggagaaagtt

SEQ ID NO: 9117 - protein, 187 aa, Homo sapiens
MEGSVSAVTEEAALCAGWLSQPTPATLQPLAPWTPYTEYVPHEAVSCPYSADMYVQPVCPSYTVVGPSSVLTYASPPLITNVTTRSSATPAVGPPLEGPEHQAPLTYFPWPQPLSTLPTSTLQYQPPAPALPGPQFVQLPISIPEPVLQDMEDPRRAASSLTIDKLLLEEEDSDAYALNHTLSVEGF

SEQ ID NO: 9118 - DNA, 2537 bp, Homo sapiens
ggcctggggagggcttgacacggggttcccacagcttgccccacaccaccttcacacccacacacagcaggtccccgcggggccggtgcaggctgtggctgcccgcgctgcgctgttgctctgtcccagctggctagctccgagtgtggagcgctctgggccggggccgctggggcgcgcacagtggggtgacaggcggcctggctgcagaaacgttgcaccggtgcctgaggtgggaggatgtgatgacgcggcccacgcagcgggaacccaggcctttaaaaagcccaggaaacagcctcagctcaagcggtggctccactggaggaaaacacaccccggtctcacattaaagaagccaaactgtcggcttcaaagagaaaaggcaacatcctgtcacaggccatgctctggcaaaaacccacagctccggagcaagccccagccccggcccggccataccagggcgtccgtgtgaaggagccagtgaaggaactgctgaggaggaagcgaggccacgccagcagtggggcagcacctgcacctacggcggtggtgctgccccatcagcccctggcgacctacaccacagtgggtccttcctgcctggacatggaaggttctgtgtctgcagtgacagaggaggctgccctgtgtgccggctggctctcccagcccaccccggccaccctgcagcccctggccccatggacaccttacaccgagtatgtgccccatgaagctgtcagctgcccctactcagctgacatgtatgtgcagcccgtgtgccccagctacacggtggtggggccctcctcagtgttgacctatgcctctccgccactcatcaccaatgtcacgacaagaagctccgccacgcccgcagtggggcccccgctggagggcccagagcaccaggcacccctcacctatttcccgtggcctcagcccctttccacactacccacctccaccctgcagtaccagcctccggccccagccctacctgggccccagtttgtccagctccccatctctatcccagagccagtccttcaggacatggaagaccccagaagagccgccagctcgttgaccatcgacaagctgcttttggaggaagaggatagcgacgcctatgcgcttaaccacactctctctgtggaaggcttttaggcgtggctcccacctgagtcctgttccctgaaactgggattttaaaatgagcctggaattgagccccaggttcatgcttgtttggagtagtcatttcatgactacactttctacgcacagctagaattgtagacctgtaaaccttacttcttttttcaattctgttccattttgggaggtaattatagggattttagcaataacattttatgtcaaatgttgccaagtctgtggtccatgggctttcatttctgtcacatttcatttcttggaaaaggcctccttcctccagtgcctgctgaaccatcttagggtcactcacaccctctgtaattttaagatgtatgtggtggccggcgggaagaccagccccgacagcacctcctgagaaagtcagccaagggcctaccctgatgccagagtccttgagctgtcagttcccacagttgctcctttgtttgctcttctcagcctcggccagatttacagtccaggcagcaaaatctcaaggcctggggctcagagtagtaaggggtgggaagtgggtggcagggagaaaagaacatcagggtgggtggggacaggccagtgacgaagagagggacagaggagggatgggaacaggctgtgcatcttagttggagagaggggtgtgggaggaagcttgagtttgatgcagggaggaggaaggctgaggaatgacttggctccagattacttggttattaagaagaacaataaactaaaggaaagcattgcttgaagagatggttttgctgctctccttgaggatacgtgcaagggaagttgggctgttgtaaacagggtgaagggtgtgtttggtcggccatttctgtctcacctctaggccctctgctggtgctgtggaggccaagaccccattaagcctaaaggtgatgggtcctcgcctaggcttagtgctaccatgtgggttttgtttttaccatgtgggtttctttagtgtcttaaaagcgtccataagccaccattctgtggaaccaaggccccctccacgcaaacaccctccctcctggggacctctggagcctcagccagaagtaccattaggtttaattttaatttgttttgctggagaaacatcaggtttgtaggagactgagttgttagcaggtgtgcttagctcttgatagtgaacgtgtaccttgggaactggctcacccacctgctaatagcaccatcgtcactattaagcagacatttcagttggtagaatccatgtagaagtcatggacttttctgggaaatgacttttctgggaaatgacagtttctttgacatattttctttgcccactttaaataaaaactctggagaaagtt

SEQ ID NO: 9119 - protein, 256 aa, Homo sapiens
MLWQKPTAPEQAPAPARPYQGVRVKEPVKELLRRKRGHASSGAAPAPTAVVLPHQPLATYTTVGPSCLDMEGSVSAVTEEAALCAGWLSQPTPATLQPLAPWTPYTEYVPHEAVSCPYSADMYVQPVCPSYTVVGPSSVLTYASPPLITNVTTRSSATPAVGPPLEGPEHQAPLTYFPWPQPLSTLPTSTLQYQPPAPALPGPQFVQLPISIPEPVLQDMEDPRRAASSLTIDKLLLEEEDSDAYALNHTLSVEGF

SEQ ID NO: 9120 - DNA, 3295 bp, Homo sapiens
gcaggcgcccatggcgggctgagtcctgcccatgccctggtggcctggaagcctgcatgggcgccgtgcaaagatcaacgttttccagaggagcttttgggctcatcactggcctggggagggcttgacacggggttcccacagcttgccccacaccaccttcacacccacacacagcaggtccccgcggggccggtgcaggctgtggctgcccgcgctgcgctgttgctctgtcccagctggctagctccgagtgtggagcgctctgggccggggccgctggggcgcgcacagtggggtgacaggcggcctggctgcagaaacgttgcaccggtgcctgaggtgggaggatgtgatgacgcggcccacgcagcgggaacccaggcctttaaaaagcccaggaaacagcctcagctcaagcggtggctccactggaggaaaacacaccccggtctcacattaaagaagccaaactgtcggcttcaaagagaaaaggcaacatcctgtcacaggccatgctctggcaaaaacccacagctccggagcaagccccagccccggcccggccataccagggcgtccgtgtgaaggagccagtgaaggaactgctgaggaggaagcgaggccacgccagcagtggggcagcacctgcacctacggcggtggtgctgccccatcagcccctggcgacctacaccacagtgggtccttcctgcctggacatggaaggttctgtgtctgcagtgacagaggaggctgccctgtgtgccggctggctctcccagcccaccccggccaccctgcagcccctggccccatggacaccttacaccgagtatgtgccccatgaagctgtcagctgcccctactcagctgacatgtatgtgcagcccgtgtgccccagctacacggtggtggggccctcctcagtgttgacctatgcctctccgccactcatcaccaatgtcacgacaagaagctccgccacgcccgcagtggggcccccgctggagggcccagagcaccaggcacccctcacctatttcccgtggcctcagcccctttccacactacccacctccaccctgcagtaccagcctccggccccagccctacctgggccccagtttgtccagctccccatctctatcccagagccagtccttcaggacatggaagaccccagaagagccgccagctcgttgaccatcgacaagctgcttttggaggaagaggatagcgacgcctatgcgcttaaccacactctctctgtggaaggcttttaggcgtggctcccacctgagtcctgttccctgaaactgggattttaaaatgagcctggaattgagccccaggttcatgcttgtttggagtagtcatttcatgactacactttctacgcacagctagaattgtagacctgtaaaccttccttcccttcttccttcccctccctccctcacttcctccctctcccccatccttccattcttcccctccctcccttcttcctttccaaccccttccttccttttcctccctcccttccttccctccttcccttctccctttccaaccccttccttccttttcctccctcccttccttccctccttcccttctccctttccttctttacctccctccctccctcgcttcttctctctttcttacttcttttttcaattctgttccattttgggaggtaattatagggattttagcaataacattttatgtcaaatgttgccaagtctgtggtccatgggctttcatttctgtcacatttcatttcttggaaaaggcctccttcctccagtgcctgctgaaccatcttagggtcactcacaccctctgtaattttaagatgtatgtggtggccggcgggaagaccagccccgacagcacctcctgagaaagtcagccaagggcctaccctgatgccagagtccttgagctgtcagttcccacagttgctcctttgtttgctcttctcagcctcggccagatttacagtccaggcagcaaaatctcaaggcctggggctcagagtagtaaggggtgggaagtgggtggcagggagaaaagaacatcagggtgggtggggacaggccagtgacgaagagagggacagaggagggatgggaacaggctgtgcatcttagttggagagaggggtgtgggaggaagcttgagtttgatgcagggaggaggaaggctgaggaatgacttggctccagattacttggttattaagaagaacaataaactaaaggaaagcattgcttgaagagatggttttgctgctctccttgaggatacgtgcaagggaagttgggctgttgtaaacagggtgaagggtgtgtttggtcggccatttctgtctcacctctaggccctctgctggtgctgtggaggccaagaccccattaagcctaaaggtgatgggtcctcgcctaggcttagtgctaccatgtgggttttgtttctttccttccttccttccttccttccttccttccttccttccttccttccttccttccttccttctttccttccttccttccttccttccttcctctctctttctttcttttttttggttttttttgggacggagtctcactccattgcccaggctggagtacaatggtgcgatcttggctcactgcacctctgtctcccaagttcaagtgattctcctgcctgagcctcccgagtagctgggattacaggtgcatgccaccatgcctggctaatttttgtatttttagtagagacggggtttcaccatgttggccaggctggtctcgaactcctgaccttgtgatccgcccgcctcagcctctcagagtgctgggatcacaggcgtgagccaccgcacccagccttttaccatgtgggtttctttagtgtcttaaaagcgtccataagccaccattctgtggaaccaaggccccctccacgcaaacaccctccctcctggggacctctggagcctcagccagaagtaccattaggtttaattttaatttgttttgctggagaaacatcaggtttgtaggagactgagttgttagcaggtgtgcttagctcttgatagtgaacgtgtaccttgggaactggctcacccacctgctaatagcaccatcgtcactattaagcagacatttcagttggtagaatccatgtagaagtcatggacttttctgggaaatgacttttctgggaaatgacagtttctttgacatattttctttgcccactttaaataaaaactctggagaaagtt

SEQ ID NO: 9121 - protein, 256 aa, Homo sapiens; identical to SEQ ID NO: 9119

SEQ ID NO: 9122 - DNA, 830 bp, Homo sapiens
tgaaggaaggaagggaaatagatttatgttaatgattcctgttcgactaaaggactgggaattttgcaagtattcaagggcaaaaagacctgtggttacagaggtttatgactgggaaatgtagaatttccatctggatttttgaaaagctgggaatcatgaggctttcccggattctgtctggtttcaggacactgggatggggaccactggcttaagtcaaaggagaggaagtgattatgctgtggtggggtgtacacctcagcccggatttcaggaggctggaaggcctctgagaccatttccagctctatcattctgtgcaaaaacaccctaaagccttgctactcaaactcttgtccctggactggccacattggagtccccctgagatctgattagacatgcaaaatcccaggccccactctagacttcctgtgccagaagctgcgttctaacaagatccccaggaggttgagaaaagccctgccctaaatgattctaacagtttgctgtcaagacacagtgacagtaggagggatatatgacaggggagacagggatggtagggggagattttggcctccctctcatgaatccatgcagagagcatcctcttctatctgctttcctcaagtgtgaaagaaaagtaagaatccaggtcccgcccctgttgcaggcctgatctgaggtttgtgagggcagtcgccgtgcaggtgagaggtatgactcgcagagcattcaggagaaggactctaacacttggagggtcatggggggtgcccataagtgggatggccatggagatcagctcagagacagaggacgat

SEQ ID NO: 9123 - protein, 32 aa, Homo sapiens
MLMIPVRLKDWEFCKYSRAKRPVVTEVYDWEM

SEQ ID NO: 9124 - DNA, 885 bp, Homo sapiens
ggcctggggagggcttgacacggggttcccacagcttgccccacaccaccttcacacccacacacagcaggtccccgcggggccggtgcaggctgtggctgcccgcgctgcgctgttgctctgtcccagctggctagctccgagtgtggagcgctctgggccggggccgctggggcgcgcacagtggggtgacaggcggcctggctgcagaaacgttgcaccggtgcctgaggtgggaggatgtgatgacgcggcccacgcagcgggaacccaggcctttaaaaagcccaggaaacagcctcagctcaagcggtggctccactggaggaaaacacaccccggtctcacattaaagaagccaaactgtcggcttcaaagagaaaaggcaacatcctgtcacaggccatgctctggcaaaaacgttggtgtgaaaggtaccaactgcaagtttcaacttgcaaaaacacttggccgttgggctcctttggaatcgtcttgaagcttcagattctgatatttcatgagcactttgcaaagtcactatgagaagcaccctccttcttacctgctcagctggagtcagttacagaattccttggcagctggctgtggacacgtgccgggcagtcaggagacccgtgggagctgtgggagtcctgcaacgtcaataggaagaggtggggacttagagattgccccacatatggtctgttgtgccagggcacacctgttgacactgagttccaaggaagtccagacattagagggtgatactctctgtccacagcacctccaccaagcgctctttgttcatcgacttagaaacagtaggaggcgggaagccctctcttgacaagatcctggaagtggccagctggtcccttt

SEQ ID NO: 9125 - protein, 46 aa, Homo sapiens
MLWQKRWCERYQLQVSTCKNTWPLGSFGIVLKLQILIFHEHFAKSL

SEQ ID NO: 9126 - DNA, 570 bp, Homo sapiens
agcttggtgcaaagcaggcacaaatgtccacatgcagccagggtgctgactgaggtgaccagtttgcttgagttttcatactctgcactctccagtggaacagcagctgcaggactcttatttttgtgatgtggagcatgtctgggtgtgtggcagggggaactgaaatagtctctgctgactttttgtacctacagattttgtttcattgctcattttggaaaagggaagcccttataggggccaaattaatggtttttctgtaaatgattttttttccccctcaaactccattggcttgacttccagtggtatagaaaggcaatatggtgaacttctcagcccgaaaaaggagatctccaatcagggccgagaggctcatgctaaggtggaaagattttcctccgtgatggactcttggatacctacgggagacttaaaaggccctcagaccacaggattaatggttggtgtgaaaggtaccaactgcaagtttcaacttgcaaaaacacttggccgttgggctcctttggaatcgtcttgaagcttcagattctgatatttcatgag

SEQ ID NO: 9127 - protein, 44 aa, Homo sapiens
MDSWIPTGDLKGPQTTGLMVGVKGTNCKFQLAKTLGRWAPLESS

SEQ ID NO: 9128 - DNA, 1975 bp, Homo sapiens
agtgctgggccggcccttccgagttgtgtcttgctggagagtcccagggccagggaaacaattccaagaaaaaggacattcttcacccagcagctcctgccatattcactgagatgtgtttttgtattttcctatgtatttcttcatcagagatgtcaataagcactattcttagtattgggatacatcaatgaacaagagacactgtctataacctcaggatgtaagaaggaaaacaaatcagcgagaagatactgccccttacccccgcttaaagaggagacacagatgccctgtgaacacctaccagttggctgacacctggggctcagataagtcctctctggccctagtttcatttctttgaatgaaacagctctatgagagctctcttcagagtttatatgttctcgacactgttcctagccagtggcaatgaataaatcaacctatactaattgaaaattagctgtgggcaaaccacagtatgaaacactcctgggcaccatggaggattccagaaaggcttggtccttgcctccctaaagcctggaatagaacttggcacaattacatgatgctggaatgcagtggcacgattacagctcaccttgacctcctgggctccagcaatcctccaacctccaccttcaagtagctgggactacaggcacatgccaccatgcctggctaatttttaaatttttttgtggaaatggggtctcactatgttgtctaggctggtcttgaacttttgggctcaagcgatcctcccaccttggcctcccaaagtgctgggattgcaggtgtaagccaatacactgggccagcaactcgttcttaaagggaatttgtttacaatttccctattatgtataacatcactctagatttttggcatataaactttatcaagttaaggaagtttccttctagtcctaagtttctaagagttatttttcttaaattacaaatagatgttggactttatcaaatgtttagatatttgattgagatactttaataatttttctcctaaagtttatcaatgtggtgaattatattgataggttttctaagaataaaccatccttgcattcctgggataaatcttacatattataatatattattattatatcatgatgtattagtccttaatatactattgaattcagcaagcaaatattttgttcaggatttttgaatcgatgttcacaaattagatggcctataattttcttttcttatattgaccttatttagttttagaatcaagtttacatgattggctctttaaagtaatttaaattaaatgcagaaatctgtcttttaattggtgagtttaatcttcttaaattcattatcattactgagctagttgaacctatcctgccaacttattcctgttttccattcattgtaatttttaaatacatccttcctgtttttcacagaaagattcagtttctctcagaatgctcaaaagttaaatgtttaaaatttaaaagctaaactttgaaacattaaaagttaaacagaatgtttaacacatcatttatgaaaaagttaaacagaatgtttaaaagtttaacttttgttttattttttgttataaaaaaatttttttttgtaataagaacaaaagtggcagttgcctcctacttcagatccacttttatgtttatttgtccttcagatccacttttatgtttatttgtccctattgatttcttaaatttattgatagctatattttctccttagaaaacgaaagcattagtgcattttgatttctctttgatctccttaagggccacattttggaaaattaaatataatataaatggtgttctctggacttgtgtaatcatgttattttaaagatattttgttttgtgttgttatggatgaattttctccttttcccagctttaagaaaattcctataataaactttacccagtatttgatt

SEQ ID NO: 9129 - protein, 56 aa, Homo sapiens
MKHSWAPWRIPERLGPCLPKAWNRTWHNYMMLECSGTITAHLDLLGSSNPPTSTFK

SEQ ID NO: 9130 - DNA, 717 bp, Homo sapiens
acaagccacagactacaagtgagagtggtagacagggcagaagcagaggataaggttgtggtaggggaagttaatgattttatttaagagaaattacactgaattagagatcatggaactcttgcacacagtatttctttaactgtacatttatcttaaaaacagtgatcccaaagcatcacttgaagtgtagtgtctttatggcctgaaaacaccgtaaataagaaagatttcctgaacgttctgctgaaatgtggtgatatttcaattctagtcaataagcactattcttagtattgggatacatcaatgaacaagagacactgtctataacctcaggatgtaagaaggaaaacaaatcagcgagaagatactgccccttacccccgcttaaagaggagacacagatgccctgtgaacacctaccagttggctgacacctggggctcagataagtcctctctggccctagtttcatttctttgaatgaaacagctctatgagagctctcttcagagtttatatgttctcgacactgttcctagccagtggcaatgaataaatcaacctatactaattgaaaattagctgtgggcaaaccacagtatgaaacactcctgggcaccatggaggattccagaaaggcttggtccttgcctgtaagaaactaacaatcgaataatgaaaataaacagaaactcttaactcttaactgtt

SEQ ID NO: 9131 - protein, 50 aa, Homo sapiens
PQDVRRKTNQREDTAPYPRLKRRHRCPVNTYQLADTWGSDKSSLALVSFL

SEQ ID NO: 9132 - DNA, 425 bp, Homo sapiens
ctcctgcatggggcttccacagattgggcaacccacgtggtgacgtgagtaaaggatgtaagaaggaaaacaaatcagcgagaagatactgccccttacccccgcttaaagaggagacacagatgccctgtgaacacctaccagttggctgacacctggggctcagataagtcctctctggccctagtttcatttctttgaatgaaacagctctatgagagctctcttcagagtttatatgttctcgacactgttcctagccagtggcaatgaataaatcaacctatactaattgaaaattagctgtgggcaaaccacagtatgaaacactcctgggcaccatggaggattccagaaaggcttggtccttgcctgtaagaaactaacaatcgaataatgaaaataaacagaaactcttaactctt

SEQ ID NO: 9133 - protein, 50 aa, Homo sapiens
VKDVRRKTNQREDTAPYPRLKRRHRCPVNTYQLADTWGSDKSSLALVSFL

SEQ ID NO: 9134 - DNA, 747 bp, Homo sapiens
ccagtcaggaacagcctatgaaatcattcattatctctctttagtgtcctctgctcttcttggccgcagctggggatcctacaggaagcagagccaaaggtaatgaaagcctccaaggaagtggctacaattgtggcttcaagggcacctcctgcatggggcttccacagattgggcaacccacgtggtgacgtgagtaaagtgatcccaaagcatcacttgaagtgtagtgtctttatggcctgaaaacaccgtaaataagaaagatttcctgaacgttctgctgaaatgtggtgatatttcaattctagtcaataagcactattcttagtattgggatacatcaatgaacaagagacactgtctataacctcaggatgtaagaaggaaaacaaatcagcgagaagatactgccccttacccccgcttaaagaggagacacagatgccctgtgaacacctaccagttggctgacacctggggctcagataagtcctctctggccctagtttcatttctttgaatgaaacagctctatgagagctctcttcagagtttatatgttctcgacactgttcctagccagtggcaatgaataaatcaacctatactaattgaaaattagctgtgggcaaaccacagtatgaaacactcctgggcaccatggaggattccagaaaggcttggtccttgcctgtaagaaactaacaatcgaataatgaaaataaacagaaactcttaactctt

SEQ ID NO: 9135 - protein, 47 aa, Homo sapiens
MKASKEVATIVASRAPPAWGFHRLGNPRGDVSKVIPKHHLKCSVFMA

SEQ ID NO: 9136 - DNA, 520 bp, Homo sapiens
gccttgctctattgctcgttggcactgagggaagctctctggggagaggagcccaccaatgcttggctgacaagacctcagtcatgtctgatgtggcttcacctttgctgccgtcttcgtatcactaggggagccctgtggagtggggtggagttcaagatggattctcaagaagttataggaagctctttatcaattcaattcctgagaagggcccacttcagggatgttacagtgcagacaaagattctggtgcctcacaagatttgacacaagccagcgctttgttgtttttctcacctgttggccagaagattatcttggagcaggaaaagccaagtggaagaagccaagtgaagggctatggggacctagaagatggagtcgtcacacagtggaagaattgcagatctctgagtcaccatttggacaagaacctactagaacaggtgcctgaacaagaacactggactttgtacaggacctggactagcttagacgaatgaggcacttgcctctg

SEQ ID NO: 9137 - protein, 76 aa, Homo sapiens
MLQCRQRFWCLTRFDTSQRFVVFLTCWPEDYLGAGKAKWKKPSEGLWGPRRWSRHTVEELQISESPFGQEPTRTGA

SEQ ID NO: 9138 - DNA, 4214 bp, Homo sapiens
agtttccagttcctttgcaaaggcagggcgtgcatgtttttgtgcacatgcatgtggatagtcatccttaacttcactgttaaacaggacatcgtgtggacaaaaagtcacagctccactccaagctcaagatgccttttggtcaataatggtgacaaaagctgaatttttccctatttagggaaaagaaagaacacagccttttcccccactgtccgttttgcatagatctcctttttccgagtgtttcctctttaattatgacctgtctcccctccctctcccctcgcctcagcttcagtgaaaggagtccttctgtcactcgtcactagctcgctcgctcactgtgggaggagcccgcctgaggaagccgtgtgcctgggatgccaagagccagagaatggatcttctccgagtggggacattgctgacaatcccggcttcccgaggcggctaagaacaggcagtttgtgtcggctggctgcagatacccagaggcacaaagagaccgaagccacccggagggacccacggacggacagatggtaggcgcgaacccgagaggaccggcggaggctgagcaccgagagccgccaaggaagagaaactaaccacagccaagttaccccgccggctttccttcgctgcgctaaggaatgaaacccttccagctcgatctgctcttcgtctgcttcttcctcttcagtcaagagctgggcctccagaagagaggatgctgtctggtgctgggctacatggccaaggacaagtttcggagaatgaatgaaggccaagtctattccttcagccagcagccccaggaccaggtggtggtgtcgggacagccagtgacgctactttgcgccatccccgaatacgatggcttcgttctgtggatcaaggacggcttggctctgggtgtgggcagggacctctcaagttacccacagtacctggtggtagggaaccacctgtcaggggagcaccacctgaagatcctgagggcagagctgcaagacgatgcggtgtacgagtgccaggccatccaggccgccatccgctcccgccccgcacgcctcacagtcctggtgccgcctgatgaccccgtcatcctggggggccctgtgatcagcctgcgtgcgggggaccctctcaacctcacctgccacgcagacaatgccaagcctgcagcctccatcatctggttgcgaaagggagaggtcatcaatggggccacctactccaagaccctgcttcgggacggcaagcgggagagcatcgtcagcaccctcttcatctcccctggtgacgtggagaatggccagagcatcgtgtgtcgtgccaccaacaaagccatccccggaggaaaggagacgtcggtcaccattgacatccagcaccctccactggtcaacctctcggtggagccacagccagtgctggaggacaacgtcgtcactttccactgctctgcaaaggccaacccagctgtcacccagtacaggtgggccaagcggggccagatcatcaaggaggcatctggagaggtgtacaggaccacagtggactacacgtacttctcagagcccgtctcctgtgaggtgaccaacgccctgggcagcaccaacctcagccgcacggttgacgtctactttgggccccggatgaccacagaaccccaatccttgctcgtggatctgggctctgatgccatcttcagctgcgcctggaccggcaacccatccctgaccatcgtctggatgaagcggggctccggagtggtcctgagcaatgagaagaccctgaccctcaaatccgtgcgccaggaggacgcgggcaagtacgtgtgccgggctgtggtgccccgtgtgggagccggggagagagaggtgaccctgaccgtcaatggaccccccatcatctccagcacccagacccagcacgccctccacggcgagaagggccagatcaagtgcttcatccggagcacgccgccgccggaccgcatcgcctggtcctggaaggagaacgttctggagtcgggcacatcggggcgctatacggtggagaccatcagcaccgaggagggcgtcatctccaccctgaccatcagcaacatcgtgcgggccgacttccagaccatctacaactgcacggcctggaacagcttcggctccgacactgagatcatccggctcaaggagcaaggttcggaaatgaagtcgggagccgggctggaagcagagtctgtgccgatggccgtcatcattggggtggccgtaggagctggtgtggccttcctcgtccttatggcaaccatcgtggcgttctgctgtgcccgttcccagagaaatctcaaaggtgttgtgtcagccaaaaatgatatccgagtggaaattgtccacaaggaaccagcctctggtcgggagggtgaggagcactccaccatcaagcagctgatgatggaccggggtgaattccagcaagactcagtcctgaaacagctggaggtcctcaaagaagaggagaaagagtttcagaacctgaaggaccccaccaatggctactacagcgtcaacaccttcaaagagcaccactcaaccccgaccatctccctctccagctgccagcccgacctgcgtcctgcgggcaagcagcgtgtgcccacaggcatgtccttcaccaacatctacagcaccctgagcggccagggccgcctctacgactacgggcagcggtttgtgctgggcatgggcagctcgtccatcgagctttgtgagcgggagttccagagaggctccctcagcgacagcagctccttcctggacacgcagtgtgacagcagcgtcagcagcagcggcaagcaggatggctatgtgcagttcgacaaggccagcaaggcttctgcttcctcctcccaccactcccagtcctcgtcccagaactctgaccccagtcgacccctgcagcggcggatgcagactcacgtctaaggatcacacaccgcgggtggggacgggccagggaagaggtcagggcacgttctggttgtccagggacgaggggtactttgcagaggacaccagaattggccacttccaggacagcctcccagcgcctctgccactgccttccttcgaagctctgatcaagcacaaatctgggtccccaggtgctgtgtgccagaggtgggcgggtggggagacagacagaggctgcggctgagtgcgctgtgcttagtgctggacacccgtgtccccggccctttcctggaggcccctctaccacctgctctgcccacaggcacaagtggcagctataactctgctttcatgaaactgcggtccactctctggtctctctgtgggctctacccctcgctgaccagaagctctacctacccctgtgcctgtgctcccatacagccctggggagaaggggatgacgtcttcccagcactgagctgccccagaaaccccggctccccactgctgctcatagcccataccctggaggctgacaagccagaaatggccttggctaaaggagcctctctctcaccaggctggccgggagcccacccccaatttgtttggtgttttgtgtccatactcttgcagttctgtccttggacttgatgccgctgaactctgcggtgggaccggtccggtcagagcctggtgtactggggggagggagggaggagggagcctgtgctgacggagcacctcgccgggtgtgcccctcctgggctgtgtgaccccagcctccccacccacctcctgctttgtgtactcctcccctccccctcagcacaatcggagttcatataagaagtgcgggagcttctctggtcagggttctctgaacacttatggagagagtgcttcctgggaagtgtggcgtttgaaggggctggagggcaggtctttaagatggcgagactgcccttctcagctgataaacacaagaacggcgatcctgtcttcagtaaggctccacgagaagagaggaagtatatctacacctcaaccctcctagtcaccacctgaaataaatgttagggacactactccaacatgtttgttctgttcttttgttcctacaaagccacaggaagaacccaagagctcatagaatgcgttgggaacccaaggttctctgccctcctttgattcaatcttcctagacaataaaggcagttgatagctctg

SEQ ID NO: 9139 - protein, 778 aa, Homo sapiens; identical to SEQ ID NO: 1331

SEQ ID NO: 9140 - DNA, 4042 bp, Homo sapiens
agtttccagttcctttgcaaaggcagggcgtgcatgtttttgtgcacatgcatgtggatagtcatccttaacttcactgttaaacaggacatcgtgtggacaaaaagtcacagctccactccaagctcaagatgccttttggtcaataatggtgacaaaagctgaatttttccctatttagggaaaagaaagaacacagccttttcccccactgtccgttttgcatagatctcctttttccgagtgtttcctctttaattatgacctgtctcccctccctctcccctcgcctcagcttcagtgaaaggagtccttctgtcactcgtcactagctcgctcgctcactgtgggaggagcccgcctgaggaagccgtgtgcctgggatgccaagagccagagaatggatcttctccgagtggggacattgctgacaatcccggcttcccgaggcggctaagaacaggcagtttgtgtcggctggctgcagatacccagaggcacaaagagaccgaagccacccggagggacccacggacggacagatggtaggcgcgaacccgagaggaccggcggaggctgagcaccgagagccgccaaggaagagaaactaaccacagccaagttaccccgccggctttccttcgctgcgctaaggaatgaaacccttccagctcgatctgctcttcgtctgcttcttcctcttcagtcaagagctgggcctccagaagagaggatgctgtctggtgctgggctacatggccaaggacaagtttcggagaatgaatgaaggccaagtctattccttcagccagcagccccaggaccaggtggtggtgtcgggacagccagtgacgctactttgcgccatccccgaatacgatggcttcgttctgtggatcaaggacggcttggctctgggtgtgggcagggacctctcaagttacccacagtacctggtggtagggaaccacctgtcaggggagcaccacctgaagatcctgagggcagagctgcaagacgatgcggtgtacgagtgccaggccatccaggccgccatccgctcccgccccgcacgcctcacagtcctggtgccgcctgatgaccccgtcatcctggggggccctgtgatcagcctgcgtgcgggggaccctctcaacctcacctgccacgcagacaatgccaagcctgcagcctccatcatctggttgcgaaagggagaggtcatcaatggggccacctactccaagaccctgcttcgggacggcaagcgggagagcatcgtcagcaccctcttcatctcccctggtgacgtggagaatggccagagcatcgtgtgtcgtgccaccaacaaagccatccccggaggaaaggagacgtcggtcaccattgacatccagcaccctccactggtcaacctctcggtggagccacagccagtgctggaggacaacgtcgtcactttccactgctctgcaaaggccaacccagctgtcacccagtacaggtgggccaagcggggccagatcatcaaggaggcatctggagaggtgtacaggaccacagtggactacacgtacttctcagagcccgtctcctgtgaggtgaccaacgccctgggcagcaccaacctcagccgcacggttgacgtctactttgggccccggatgaccacagaaccccaatccttgctcgtggatctgggctctgatgccatcttcagctgcgcctggaccggcaacccatccctgaccatcgtctggatgaagcggggctccggagtggtcctgagcaatgagaagaccctgaccctcaaatccgtgcgccaggaggacgcgggcaagtacgtgtgccgggctgtggtgccccgtgtgggagccggggagagagaggtgaccctgaccgtcaatggaccccccatcatctccagcacccagacccagcacgccctccacggcgagaagggccagatcaagtgcttcatccggagcacgccgccgccggaccgcatcgcctggtcctggaaggagaacgttctggagtcgggcacatcggggcgctatacggtggagaccatcagcaccgaggagggcgtcatctccaccctgaccatcagcaacatcgtgcgggccgacttccagaccatctacaactgcacggcctggaacagcttcggctccgacactgagatcatccggctcaaggagcaagagtctgtgccgatggccgtcatcattggggtggccgtaggagctggtgtggccttcctcgtccttatggcaaccatcgtggcgttctgctgtgcccgttcccagagaaatctcaaaggtgttgtgtcagccaaaaatgatatccgagtggaaattgtccacaaggaaccagcctctggtcgggagggtgaggagcactccaccatcaagcagctgatgatggaccggggtgaattccagcaagactcagtcctgaaacagctggaggtcctcaaagaagaggagaaagagtttcagaacctgaaggaccccaccaatggctactacagcgtcaacaccttcaaagagcaccactcaaccccgaccatctccctctccagctgccagcccgacctgcgtcctgcgggcaagcagcgtgtgcccacaggcatgtccttcaccaacatctacagcaccctgagcggccagggccgcctctacgactacgggcagcggtttgtgctgggcatgggcagctcgtccatcgagctttgtgagcgggagttccagagaggctccctcagcgacagcagctccttcctggacacgcagtgtgacagcagcgtcagcagcagcggcaagcaggatggctatgtgcagttcgacaaggccagcaaggcttctgcttcctcctcccaccactcccagtcctcgtcccagaactctgaccccagtcgacccctgcagcggcggatgcagactcacgtctaaggatcacacaccgcgggtggggacgggccagggaagaggtcagggcacgttctggttgtccagggacgaggggtactttgcagaggacaccagaattggccacttccaggacagcctcccagcgcctctgccactgccttccttcgaagctctgatcaagcacaaatctgggtccccaggtgctgtgtgccagaggtgggcgggtggggagacagacagaggctgcggctgagtgcgctgtgcttagtgctggacacccgtgtccccggccctttcctggaggcccctctaccacctgctctgcccacaggcacaagtggcagctataactctgctttcatgaaactgcggtccactctctggtctctctgtgggctctacccctcgctgaccagaagctctacctacccctgtgcctgtgctcccatacagccctggggagaaggggatgacgtcttcccagcactgagctgccccagaaaccccggctccccactgctgctcatagcccataccctggaggctgacaagccagaaatggccttggctaaaggagcctctctctcaccaggctggccgggagcccacccccaatttgtttggtgttttgtgtccatactcttgcagttctgtccttggacttgatgccgctgaactctgcggtgggaccggtccggtcagagcctggtgtactggggggagggagggaggagggagcctgtgctgacggagcacctcgccgggtgtgcccctcctgggctgtgtgaccccagcctccccacccacctcctgctttgtgtactcctcccctccccctcagcacaatcggagttcatataagaagtgcgggagcttctctggtcagggttctctgaacacttatggagagagtgcttcctgggaagtgtggcgtttgaaggggctggagggcaggtctttaagatggcgagactgcccttctcagctgataaacacaagaacggcgatcctgtcttcagtaaggctccacgagaagagaggaagtatatctacacctcaaccctcctagtcaccacctgaaataaatgttagggacactactccaa

SEQ ID NO: 9141 - protein, 766 aa, Homo sapiens
MKPFQLDLLFVCFFLFSQELGLQKRGCCLVLGYMAKDKFRRMNEGQVYSFSQQPQDQVVVSGQPVTLLCAIPEYDGFVLWIKDGLALGVGRDLSSYPQYLVVGNHLSGEHHLKILRAELQDDAVYECQAIQAAIRSRPARLTVLVPPDDPVILGGPVISLRAGDPLNLTCHADNAKPAASIIWLRKGEVINGATYSKTLLRDGKRESIVSTLFISPGDVENGQSIVCRATNKAIPGGKETSVTIDIQHPPLVNLSVEPQPVLEDNVVTFHCSAKANPAVTQYRWAKRGQIIKEASGEVYRTTVDYTYFSEPVSCEVTNALGSTNLSRTVDVYFGPRMTTEPQSLLVDLGSDAIFSCAWTGNPSLTIVWMKRGSGVVLSNEKTLTLKSVRQEDAGKYVCRAVVPRVGAGEREVTLTVNGPPIISSTQTQHALHGEKGQIKCFIRSTPPPDRIAWSWKENVLESGTSGRYTVETISTEEGVISTLTISNIVRADFQTIYNCTAWNSFGSDTEIIRLKEQESVPMAVIIGVAVGAGVAFLVLMATIVAFCCARSQRNLKGVVSAKNDIRVEIVHKEPASGREGEEHSTIKQLMMDRGEFQQDSVLKQLEVLKEEEKEFQNLKDPTNGYYSVNTFKEHHSTPTISLSSCQPDLRPAGKQRVPTGMSFTNIYSTLSGQGRLYDYGQRFVLGMGSSSIELCEREFQRGSLSDSSSFLDTQCDSSVSSSGKQDGYVQFDKASKASASSSHHSQSSSQNSDPSRPLQRRMQTHV

SEQ ID NO: 9142 - DNA, 4071 bp, Homo sapiens
agtttccagttcctttgcaaaggcagggcgtgcatgtttttgtgcacatgcatgtggatagtcatccttaacttcactgttaaacaggacatcgtgtggacaaaaagtcacagctccactccaagctcaagatgccttttggtcaataatggtgacaaaagctgaatttttccctatttagggaaaagaaagaacacagccttttcccccactgtccgttttgcatagatctcctttttccgagtgtttcctctttaattatgacctgtctcccctccctctcccctcgcctcagcttcagtgaaaggagtccttctgtcactcgtcactagctcgctcgctcactgtgggaggagcccgcctgaggaagccgtgtgcctgggatgccaagagccagagaatggatcttctccgagtggggacattgctgacaatcccggcttcccgaggcggctaagaacaggcagtttgtgtcggctggctgcagatacccagaggcacaaagagaccgaagccacccggagggacccacggacggacagatggtaggcgcgaacccgagaggaccggcggaggctgagcaccgagagccgccaaggaagagaaactaaccacagccaagttaccccgccggctttccttcgctgcgctaaggaatgaaacccttccagctcgatctgctcttcgtctgcttcttcctcttcagtcaagagctgggcctccagaagagaggatgctgtctggtgctgggctacatggccaaggacaagtttcggagaatgaatgaaggccaagtctattccttcagccagcagccccaggaccaggtggtggtgtcgggacagccagtgacgctactttgcgccatccccgaatacgatggcttcgttctgtggatcaaggacggcttggctctgggtgtgggcagggacctctcaagttacccacagtacctggtggtagggaaccacctgtcaggggagcaccacctgaagatcctgagggcagagctgcaagacgatgcggtgtacgagtgccaggccatccaggccgccatccgctcccgccccgcacgcctcacagtcctggtgccgcctgatgaccccgtcatcctggggggccctgtgatcagcctgcgtgcgggggaccctctcaacctcacctgccacgcagacaatgccaagcctgcagcctccatcatctggttgcgaaagggagaggtcatcaatggggccacctactccaagaccctgcttcgggacggcaagcgggagagcatcgtcagcaccctcttcatctcccctggtgacgtggagaatggccagagcatcgtgtgtcgtgccaccaacaaagccatccccggaggaaaggagacgtcggtcaccattgacatccagcaccctccactggtcaacctctcggtggagccacagccagtgctggaggacaacgtcgtcactttccactgctctgcaaaggccaacccagctgtcacccagtacaggtgggccaagcggggccagatcatcaaggaggcatctggagaggtgtacaggaccacagtggactacacgtacttctcagagcccgtctcctgtgaggtgaccaacgccctgggcagcaccaacctcagccgcacggttgacgtctactttgggccccggatgaccacagaaccccaatccttgctcgtggatctgggctctgatgccatcttcagctgcgcctggaccggcaacccatccctgaccatcgtctggatgaagcggggctccggagtggtcctgagcaatgagaagaccctgaccctcaaatccgtgcgccaggaggacgcgggcaagtacgtgtgccgggctgtggtgccccgtgtgggagccggggagagagaggtgaccctgaccgtcaatggaccccccatcatctccagcacccagacccagcacgccctccacggcgagaagggccagatcaagtgcttcatccggagcacgccgccgccggaccgcatcgcctggtcctggaaggagaacgttctggagtcgggcacatcggggcgctatacggtggagaccatcagcaccgaggagggcgtcatctccaccctgaccatcagcaacatcgtgcgggccgacttccagaccatctacaactgcacggcctggaacagcttcggctccgacactgagatcatccggctcaaggagcaaggttcggaaatgaagtcgggagccgggctggaagcagagtctgtgccgatggccgtcatcattggggtggccgtaggagctggtgtggccttcctcgtccttatggcaaccatcgtggcgttctgctgtgcccgttcccagagaaatctcaaaggtgttgtgtcagccaaaaatgatatccgagtggaaattgtccacaaggaaccagcctctggtcgggagggtgaggagcactccaccatcaagcagctgatgatggaccggggtgaattccagcaagactcagtcctgaaacagctggaggtcctcaaagaagaggagaaagagtttcagaacctgaaggaccccaccaatggctactacagcgtcaacaccttcaaagagcaccactcaaccccgaccatctccctctccagctgccagcccgacctgcgtcctgcgggcaagcagcgtgtgcccacaggcatgtccttcaccaacatctacagcaccctgagcggccagggccgcctctacgactacgggcagcggtttgtgctgggcatgggcagctcgtccatcgagctttgtgagcgggagttccagagaggctccctcagcgacagcagctccttcctggacacgcagtgtgacagcagcgtcagcagcagcggcaagcaggatggctatgtgcagttcgacaaggccagcaaggcttctgcttcctcctcccaccactcccagtcctcgtcccagaactctgaccccagtcgacccctgcagcggcggatgcagactcacgtctaaggatcacacaccgcgggtggggacgggccagggaagaggtcagggcacgttctggttgtccagggacgaggggtactttgcagaggacaccagaattggccacttccaggacagcctcccagcgcctctgccactgccttccttcgaagctctgatcaagcacaaatctgggtccccaggtgctgtgtgccagaggtgggcgggtggggagacagacagaggctgcggctgagtgcgctgtgcttagtgctggacacccgtgtccccggccctttcctggaggcccctctaccacctgctctgcccacaggcacaagtggcagctataactctgctttcatgaaactgcggtccactctctggtctctctgtgggctctacccctcgctgaccagaagctctacctacccctgtgcctgtgctcccatacagccctggggagaaggggatgacgtcttcccagcactgagctgccccagaaaccccggctccccactgctgctcatagcccataccctggaggctgacaagccagaaatggccttggctaaaggagcctctctctcaccaggctggccgggagcccacccccaatttgtttggtgttttgtgtccatactcttgcagttctgtccttggacttgatgccgctgaactctgcggtgggaccggtccggtcagagcctggtgtactggggggagggagggaggagggagcctgtgctgacggagcacctcgccgggtgtgcccctcctgggctgtgtgaccccagcctccccacccacctcctgctttgtgtactcctcccctccccctcagcacaatcggagttcatataagaagtgcgggagcttctctggtcagggttctctgaacacttatggagagagtgcttcctgggaagtgtggcgtttgaaggggctggagggcaggtctttaagatggcgagactgcccttctcagctgataaacacaagaacggcgatcctgtcttcagtaaggctccacgagaagagaggaagtatatctacacctcaaccctcctagtcaccacctgaaataaatgttagggacact

SEQ ID NO: 9143 - protein, 778 aa, Homo sapiens; identical to SEQ ID NO: 1331

SEQ ID NO: 9144 - DNA, 2829 bp, Homo sapiens
agtttccagttcctttgcaaaggcagggcgtgcatgtttttgtgcacatgcatgtggatagtcatccttaacttcactgttaaacaggacatcgtgtggacaaaaagtcacagctccactccaagctcaagatgccttttggtcaataatggtgacaaaagctgaatttttccctatttagggaaaagaaagaacacagccttttcccccactgtccgttttgcatagatctcctttttccgagtgtttcctctttaattatgacctgtctcccctccctctcccctcgcctcagcttcagtgaaaggagtccttctgtcactcgtcactagctcgctcgctcactgtgggaggagcccgcctgaggaagccgtgtgcctgggatgccaagagccagagaatggatcttctccgagtggggacattgctgacaatcccggcttcccgaggcggctaagaacaggcagtttgtgtcggctggctgcagatacccagaggcacaaagagaccgaagccacccggagggacccacggacggacagatggtaggcgcgaacccgagaggaccggcggaggctgagcaccgagagccgccaaggaagagaaactaaccacagccaagttaccccgccggctttccttcgctgcgctaaggaatgaaacccttccagctcgatctgctcttcgtctgcttcttcctcttcagtcaagagctgggcctccagaagagaggatgctgtctggtgctgggctacatggccaaggacaagtttcggagaatgaatgaaggccaagtctattccttcagccagcagccccaggaccaggtggtggtgtcgggacagccagtgacgctactttgcgccatccccgaatacgatggcttcgttctgtggatcaaggacggcttggctctgggtgtgggcagggacctctcaagttacccacagtacctggtggtagggaaccacctgtcaggggagcaccacctgaagatcctgagggcagagctgcaagacgatgcggtgtacgagtgccaggccatccaggccgccatccgctcccgccccgcacgcctcacagtcctggtgccgcctgatgaccccgtcatcctggggggccctgtgatcagcctgcgtgcgggggaccctctcaacctcacctgccacgcagacaatgccaagcctgcagcctccatcatctggttgcgaaagggagaggtcatcaatggggccacctactccaagaccctgcttcgggacggcaagcgggagagcatcgtcagcaccctcttcatctcccctggtgacgtggagaatggccagagcatcgtgtgtcgtgccaccaacaaagccatccccggaggaaaggagacgtcggtcaccattgacatccagcaccctccactggtcaacctctcggtggagccacagccagtgctggaggacaacgtcgtcactttccactgctctgcaaaggccaacccagctgtcacccagtacaggtgggccaagcggggccagatcatcaaggaggcatctggagaggtgtacaggaccacagtggactacacgtacttctcagagcccgtctcctgtgaggtgaccaacgccctgggcagcaccaacctcagccgcacggttgacgtctactttgggccccggatgaccacagaaccccaatccttgctcgtggatctgggctctgatgccatcttcagctgcgcctggaccggcaacccatccctgaccatcgtctggatgaagcggggctccggagtggtcctgagcaatgagaagaccctgaccctcaaatccgtgcgccaggaggacgcgggcaagtacgtgtgccgggctgtggtgccccgtgtgggagccggggagagagaggtgaccctgaccgtcaatggaccccccatcatctccagcacccagacccagcacgccctccacggcgagaagggccagatcaagtgcttcatccggagcacgccgccgccggaccgcatcgcctggtcctggaaggagaacgttctggagtcgggcacatcggggcgctatacggtggagaccatcagcaccgaggagggcgtcatctccaccctgaccatcagcaacatcgtgcgggccgacttccagaccatctacaactgcacggcctggaacagcttcggctccgacactgagatcatccggctcaaggagcaaggttcggaaatgaagtcgggagccgggctggaagcagagtctgtgccgatggccgtcatcattggggtggccgtaggagctggtgtggccttcctcgtccttatggcaaccatcgtggcgttctgctgtgcccgttcccagagaagtacgggagggagatccgggatctcagggagggggacagagaaaaaggccaggcttaggctgccccggagagcaagtaagcaggagtgcaatgaacaggggtcctaacagtgctgtgagctcctggggcagggagtgggtctgatgcatcggtgtatgtgagcctgggcaacatggcgcctggcagagtgggcgctaggctgaggttgacctggactagactgaacttcatctgcagggcagccagcattttggattgaacacatagctctttcagtcaggaactgtacagaaagatagggggaaaagcggtttgtggtttgatccttgctctacaagagctgttagtctagagagaccccatctctacaacaaaataaaaataaagagctgctagtctcaccagaaaagcaggtcactcacacagctgtgggggagtgggtggggaagcaataaaggaattgctttgagaaaactt

SEQ ID NO: 9145 - protein, 600 aa, Homo sapiens
MKPFQLDLLFVCFFLFSQELGLQKRGCCLVLGYMAKDKFRRMNEGQVYSFSQQPQDQVVVSGQPVTLLCAIPEYDGFVLWIKDGLALGVGRDLSSYPQYLVVGNHLSGEHHLKILRAELQDDAVYECQAIQAAIRSRPARLTVLVPPDDPVILGGPVISLRAGDPLNLTCHADNAKPAASIIWLRKGEVINGATYSKTLLRDGKRESIVSTLFISPGDVENGQSIVCRATNKAIPGGKETSVTIDIQHPPLVNLSVEPQPVLEDNVVTFHCSAKANPAVTQYRWAKRGQIIKEASGEVYRTTVDYTYFSEPVSCEVTNALGSTNLSRTVDVYFGPRMTTEPQSLLVDLGSDAIFSCAWTGNPSLTIVWMKRGSGVVLSNEKTLTLKSVRQEDAGKYVCRAVVPRVGAGEREVTLTVNGPPIISSTQTQHALHGEKGQIKCFIRSTPPPDRIAWSWKENVLESGTSGRYTVETISTEEGVISTLTISNIVRADFQTIYNCTAWNSFGSDTEIIRLKEQGSEMKSGAGLEAESVPMAVIIGVAVGAGVAFLVLMATIVAFCCARSQRSTGGRSGISGRGTEKKARLRLPRRASKQECNEQGS

SEQ ID NO: 9146 - DNA, 2065 bp, Homo sapiens
cgcgcttctccatcaggtggagccgtcggctcctcgccgcctccctcctcctccctcccccggagcgaaccgcgcgcaggcagccttgcagcgccaggaggctaaccgagcccccggaggaggtgaggccgcgggcagccgggcggagatggcggggccgccgtcgaggctggcgccagagcccgaccggctgtgggtcctgcagcttcagtgaaaggagtccttctgtcactcgtcactagctcgctcgctcactgtgggaggagcccgcctgaggaagccgtgtgcctgggatgccaagagccagagaatggatcttctccgagtggggacattgctgacaatcccggcttcccgaggcggctaagaacaggcagtttgtgtcggctggctgcagatacccagaggcacaaagagaccgaagccacccggagggacccacggacggacagatggtaggcgcgaacccgagaggaccggcggaggctgagcaccgagagccgccaaggaagagaaactaaccacagccaagttaccccgccggctttccttcgctgcgctaaggaatgaaacccttccagctcgatctgctcttcgtctgcttcttcctcttcagtcaagagctgggcctccagaagagaggatgctgtctggtgctgggctacatggccaaggacaagtttcggagaatgaatgaagacagagacggagtttcgctcttgttgcccaggctggaatgcaatggcatgatctcagctcactgcaagctccgcctcccgcgttcaagcgattctcctgcctcagcctcctgagtagctgggattacaggcacccaccacctcacttggctgattttttgtatgtttagtagaaacagggtttcgccatgttgggcaggctggtctcaaactcctgacctcgggtgatccacccgcctcagcctcccaaagtgctgggattacaggcgtgcgactaatattcttaacgtaaccctgtggcttaggagtaggagaaatctagattcaaatcccgggtgtagtcagggcaggcttagacccctatcattacagattctccaggccagaagggaccaaaggtcatctggttccatatccctgccaagtaccagtgtgtgtaaagactgtgaacacggcggaatgctcatttattcaccaaccatgtgtccagtacccgctctgtgcctggcgctgtgcatgtaaaaacacagtccctgcccccaaggataccactgtcttgcggggagagacaaacacgtcagcaactacaatacaatgtcgcagttgcggtaaccgggtatgaataagtagctattggaaacagagaaggagaatccaatcacactgtaggccaggagaggagtgtccagcatggcttctggagaaataagccctgtgagatgttttattctaagaggctgttgcaacctatgcttgaatccctccaaagacaagaaacttgcagcctgccgaggcggtgggcagctcctcagccaggctctccaaacgccacaccgcttccaccccaggaggctgcagttttcgcattctagctttactgatgacgaggggacccagtgacttggacagcagccactggcaagatcctggggtctccactatgtcaactgcaccggggaggcctcctttcttctctctgcttcttccttccatccccagccagcctcaaaggcttcatcacagaattctttgagtgctgagaccctcccccagccctctccccagggtctgaagaaagccccagagaagttggaataaacgaaggcgcttaatggcttgcggtgccataaagtttttagagccgtgcgctggaatgagcaggttcaggctgagatgaattatccagggcttttatcaaagggagtcaataaaaacctgaaggagcttgccccacctccacagagtgctcatgtcacagtgccgggccctgtgctctggaagtaggaaccagggggccgcgttttccccctaactccatctgctttcttccctgtgccttcctttctgaaatgtattcgtttctatgg

SEQ ID NO: 9147 - protein, 81 aa, Homo sapiens
MKPFQLDLLFVCFFLFSQELGLQKRGCCLVLGYMAKDKFRRMNEDRDGVSLLLPRLECNGMISAHCKLRLPRSSDSPASAS

SEQ ID NO: 9148 - DNA, 2023 bp, Homo sapiens
agtttccagttcctttgcaaaggcagggcgtgcatgtttttgtgcacatgcatgtggatagtcatccttaacttcactgttaaacaggacatcgtgtggacaaaaagtcacagctccactccaagctcaagatgccttttggtcaataatggtgacaaaagctgaatttttccctatttagggaaaagaaagaacacagccttttcccccactgtccgttttgcatagatctcctttttccgagtgtttcctctttaattatgacctgtctcccctccctctcccctcgcctcagcttcagtgaaaggagtccttctgtcactcgtcactagctcgctcgctcactgtgggaggagcccgcctgaggaagccgtgtgcctgggatgccaagagccagagaatggatcttctccgagtggggacattgctgacaatcccggcttcccgaggcggctaagaacaggcagtttgtgtcggctggctgcagatacccagaggcacaaagagaccgaagccacccggagggacccacggacggacagatggtaggcgcgaacccgagaggaccggcggaggctgagcaccgagagccgccaaggaagagaaactaaccacagccaagttaccccgccggctttccttcgctgcgctaaggaatgaaacccttccagctcgatctgctcttcgtctgcttcttcctcttcagtcaagagctgggcctccagaagagaggatgctgtctggtgctgggctacatggccaaggacaagtttcggagaatgaatgaagacagagacggagtttcgctcttgttgcccaggctggaatgcaatggcatgatctcagctcactgcaagctccgcctcccgcgttcaagcgattctcctgcctcagcctcctgagtagctgggattacaggcacccaccacctcacttggctgattttttgtatgtttagtagaaacagggtttcgccatgttgggcaggctggtctcaaactcctgacctcgggtgatccacccgcctcagcctcccaaagtgctgggattacaggcgtgcgactaatattcttaacgtaaccctgtggcttaggagtaggagaaatctagattcaaatcccgggtgtagtcagggcaggcttagacccctatcattacagattctccaggccagaagggaccaaaggtcatctggttccatatccctgccaagtaccagtgtgtgtaaagactgtgaacacggcggaatgctcatttattcaccaaccatgtgtccagtacccgctctgtgcctggcgctgtgcatgtaaaaacacagtccctgcccccaaggataccactgtcttgcggggagagacaaacacgtcagcaactacaatacaatgtcgcagttgcggtaaccgggtatgaataagtagctattggaaacagagaaggagaatccaatcacactgtaggccaggagaggagtgtccagcatggcttctggagaaataagccctgtgagatgttttattctaagaggctgttgcaacctatgcttgaatccctccaaagacaagaaacttgcagcctgccgaggcggtgggcagctcctcagccaggctctccaaacgccacaccgcttccaccccaggaggctgcagttttcgcattctagctttactgatgacgaggggacccagtgacttggacagcagccactggcaagatcctggggtctccactatgtcaactgcaccggggaggcctcctttcttctctctgcttcttccttccatccccagccagcctcaaaggcttcatcacagaattctttgagtgctgagaccctcccccagccctctccccagggtctgaagaaagccccagagaagttggaataaacgaaggcgcttaatggcttgcggtgccataaagtttttagagccgtgcgctggaatgagcaggttcaggctgagatgaattatccagggcttttatcaaagggagtcaataaaaacctgaaggagcttgccccacc

SEQ ID NO: 9149 - protein, 81 aa, Homo sapiens; identical to SEQ ID NO: 9147

SEQ ID NO: 9150 - DNA, 1507 bp, Homo sapiens
agagaatggatcttctccgagtggggacattgctgacaatcccggcttcccgaggcggctaagaacaggcagtttgtgtcggctggctgcagatacccagaggcacaaagagaccgaagccacccggagggacccacggacggacagatggtaggcgcgaacccgagaggaccggcggaggctgagcaccgagagccgccaaggaagagaaactaaccacagccaagttaccccgccggctttccttcgctgcgctaaggaatgaaacccttccagctcgatctgctcttcgtctgcttcttcctcttcagtcaagagctgggcctccagaagagaggatgctgtctggtgctgggctacatggccaaggacaagtttcggagaatgaatgaagacagagacggagtttcgctcttgttgcccaggctggaatgcaatggcatgatctcagctcactgcaagctccgcctcccgcgttcaagcgattctcctgcctcagcctcctgagtagctgggattacaggcacccaccacctcacttggctgattttttgtatgtttagtagaaacagggtttcgccatgttgggcaggctggtctcaaactcctgacctcgggtgatccacccgcctcagcctcccaaagtgctgggattacaggcgtgcgactaatattcttaacgtaaccctgtggcttaggagtaggagaaatctagattcaaatcccgggtgtagtcagggcaggcttagacccctatcattacagattctccaggccagaagggaccaaaggtcatctggttccatatccctgccaagtaccagtgtgtgtaaagactgtgaacacggcggaatgctcatttattcaccaaccatgtgtccagtacccgctctgtgcctggcgctgtgcatgtaaaaacacagtccctgcccccaaggataccactgtcttgcggggagagacaaacacgtcagcaactacaatacaatgtcgcagttgcggtaaccgggtatgaataagtagctattggaaacagagaaggagaatccaatcacactgtaggccaggagaggagtgtccagcatggcttctggagaaataagccctgtgagatgttttattctaagaggctgttgcaacctatgcttgaatccctccaaagacaagaaacttgcagcctgccgaggcggtgggcagctcctcagccaggctctccaaacgccacaccgcttccaccccaggaggctgcagttttcgcattctagctttactgatgacgaggggacccagtgacttggacagcagccactggcaagatcctggggtctccactatgtcaactgcaccggggaggcctcctttcttctctctgcttcttccttccatccccagccagcctcaaaggcttcatcacagaattctttgagtgctgagaccctcccccagccctctccccagggtctgaagaaagccccagagaagttggaataaacgaaggcgcttaatg

SEQ ID NO: 9151 - protein, 81 aa, Homo sapiens; identical to SEQ ID NO: 9147

SEQ ID NO: 9152 - DNA, 391 bp, Homo sapiens
acacacacacacaccgtggaaatgaggaaaagttacttctctctgttgtaaatttaaatgcagtccagagtagtgaaggccgtttgtaaggtctgctgagctaatggattcataatgacttttaaagcttcactcggctgcactgggggagagcctgctgaagctgcttgaatctcaacactgtcatacccgccatctcattatctacagccacatctaaaacccacatgaaataccaagtcacacgcggctctgggaaagacattttacagagaccatcttatgagtttttaatctgcctcctgagaacttacaatctaagaaatagaaaactgattccagtaagcatgcccagaatatgctagcagcaagattaaaacatgaaactatg

SEQ ID NO: 9153 - protein, 45 aa, Homo sapiens
MKYQVTRGSGKDILQRPSYEFLICLLRTYNLRNRKLIPVSMPRIC

SEQ ID NO: 9154 - DNA, 513 bp, Homo sapiens
tgaaaatgcatgcacccacagacacacacacacaccgtggaaatgaggaaaagttacttctctctgttgtaaatttaaatgcagtccagagtagtgaaggccgtttgtaaggtctgctgagctaatggattcataatgacttttaaagcttcactcgggcaaacagagcactgacaccacctggcaagaaacagtgagcagcagtagtatctcttcacatgaagatttctttaactggaatcccaaatccagatcaaatggactaaattccacagtgcagtggggatcttcacattgagggagatttaactccacctttcgttcatcggttcaatgatttgatagcatgattatggtgctgagcatttatctttgtctaatcgatagatttcttgggatctaaagatgcatcttatggtgatatagacaaaagaggcatttatggagtcagccatgggagagcatatcagattgtgcaagagcaataatatatggaagtgagcagcatgagtt

SEQ ID NO: 9155 - protein, 34 aa, Homo sapiens [sequence omitted]

SEQ ID NO: 9156 - DNA, 295 bp, Homo sapiens
ccacttccaggtatggctgagaagggtgaaaatgcatgcacccacagacacacacacacaccgtggaaatgaggaaaagttacttctctctgttgtaaatttaaatgcagtccagagtagtgaaggccgtttgtaaggtctgctgagctaatggattcataatgacttttaaagcttcactcggtacatcctatgtgccagacactgcgataggttctggagataacaacagtgtccaagaaacaacagtgtccaagaaacaggactttccctcaaagagcttactggggaagcc

SEQ ID NO: 9157 - protein, 43 aa, Homo sapiens
MTFKASLGTSYVPDTAIGSGDNNSVQETTVSKKQDFPSKSLLG

SEQ ID NO: 9158 - DNA, 494 bp, Homo sapiens
tacttagccttgtccctacctctttactcctctgtaggcagtaattcttttttcttttctttcttttttttttcttttggtgtaacagtatcgcatgagccaagactgtcatgaaactatttggatactgtactctggttccttcatctcctccatctgcatcagcctaaattgtcctatctgtcttttgttacaggagcctctgccatgaacccggggataagtgaggaaagaaatttttcctccttcacagtatcaagtgccaggccagggcactttgtccaggcctcactgtgaagaaagagtaatgttcaaggatggcagcaggaaggaccctaatgaagaggtttatctgattggtttactggagtcctatgtgggatgaatagcttcagcctttgcgcttgcacctctttgctgtccactccaatcaagaacgggggccctcgcaactctctcagttctgaaacaaattaaatctcagtgacagactc

SEQ ID NO: 9159 - protein, 38 aa, Homo sapiens
MSQDCHETIWILYSGSFISSICISLNCPICLLLQEPLP

SEQ ID NO: 9160 - DNA, 470 bp, Homo sapiens
cggggttttgcttcatcattgagcttgtcctgccagcctccaccagttcctgaagagaacaggccaaagtgtggaacatacaggatgaagcgattacaacctgggcgcagtatactggctggctttgctgctcactcccttacgaatagctgtgatgggatatgaaatccaagggaactgttagccccccagagcagctgctcccaccgaccctgctccaagagtgctgggatgtccgctggcctcgaggcaagacaagagctccaatcactctgctgcaagcgccaccattaaagtcaagatcactgtggtggggggagttgaagtgtgcattccagcatgctcatgatcttactgaccttctccactgatgaattagaacacccctcttcccaggcacaggacgagttcagtgcctctctgtttcttgatggaccccaataaaaaaacgcctgcactgtttttcacct

SEQ ID NO: 9161 - protein, 69 aa, Homo sapiens
MKSKGTVSPPEQLLPPTLLQECWDVRWPRGKTRAPITLLQAPPLKSRSLWWGELKCAFQHAHDLTDLLH

SEQ ID NO: 9162 - DNA, 2369 bp, Homo sapiens
atttagcgcggagagtttcccgggtggacgcggctcctctctcggccactccgcacccccatcttcggtgacagaaggcgcctggtgggggtggctgctcttttctctccctgttccccctcacccagtcctctaggtctcctctcctcttgcctcagagaagcagcggagctcgggccccgcggtgagcggccctcccctccccgccgttccctcctccgtcagcccccggcaccggcccgggaggagacgggtttgccaggcctggggcgggcggggaggcctcggggaagggggggcccgctcctcaggcgccgaggctccgaggctccggcccttcgcctctgggcgatgggcgacctgtgaggccggtccccatcgctgggggcgcgtgtgggaggaggcggccgcccgagtgaccgggagccgggccgcggccttccctcgcccgcctcggcccctcccactcctctgccccggggccgccaccgcccgggcgtcggacctggtcccgtgctcgcggtgccgccgccctctgggcctagcccgcccagctcggcgagcggcggcagtgggagccgcgtccgccgcatccgcctcgactcggtgccggcccctggccctcccctcatgactgcggcgcctctgctgccaccgcccgcccggccgccgctcgccgcaggatggatgcggaccgtgcggcgctaacccccgtggctcagctcccgaatcgcccgccttcgagccctcctcgtgagccgcagcagcctcggtgccagcccccgccgcagctgggcccagcggtccgcctgtccctcgttgcggcttgtcggtgctgagtgaggcgtcgtccgggtcggcgcgaacccgcccggccgcggttccctgcagacctctgcgcgggcggctcggcccttcacgcccttttcgttcacgaatccgagcccgctcgcctctctccagcgaaccgaccatgtctggcggcgccgcagagaagcagagcagcactcccggttccctgttcctctcgccgccggctcctgcccccaagaatggctccagctccgattcctccgtgggggagaaactgggagccgcggccgccgacgctgtgaccggcaggaccgaggagtacaggcgccgccgccacactatggacaaggacagccgtggggcggccgcgaccactaccaccactgagcaccgcttcttccgccggagcgtcatctgtgactccaatgccactgcactggagcttcccggccttcctctttccctgccccagcccagcatccccgcggctgtcccgcagagtgctccaccggagccccaccgggaagagaccgtgaccgccaccgccacttcccaggtagcccagcagcctccagccgctgccgcccctggggaacaggccgtcgcgggccctgccccctcgactgtccccagcagtaccagcaaagaccgcccagtgtcccagcctagccttgtggggagcaaagaggagccgccgccggcgagaagtggcagcggcggcggcagcgccaaggagccacaggaggaacggagccagcagcaggatgatatcgaagagctggagaccaaggccgtgggaatgtctaacgatggccgctttctcaagtttgacatcgaaatcggcagaggctcctttaagacggtctacaaaggtctggacactgaaaccaccgtggaagtcgcctggtgtgaactgcaggatcgaaaattaacaaagtctgagaggcagagatttaaagaagaagctgaaatgttaaaaggtcttcagcatcccaatattgttagattttatgattcctgggaatccacagtaaaaggaaagaagtgcattgttttggtgactgaacttatgacgtctggaacacttaaaacgtatctgaaaaggtttaaagtgatgaagatcaaagttctaagaagctggtgccgtcagatccttaaaggtcttcagtttcttcatactcgaactccacctatcattcaccgcgatcttaaatgtgacaacatctttatcaccggccctactggctcagtcaagattggagacctcggtctggcaaccctgaagcgggcttcttttgccaagagtgtgataggtatgtttcaggtgtaccttggagcctgactggctttctcacattccttttatttagaatcctggctctgtcagagttttaagtgatataaaccttaagaaattcatagcttgaactcaggaggtgatccattgtacttatgagatataggattctctatatttgtgcttcttggaatcatcttagagactattggtaacattacgttacaagaaataaagtgaactttgttgataaaaccta

SEQ ID NO: 9163 - protein, 393 aa, Homo sapiens
MSGGAAEKQSSTPGSLFLSPPAPAPKNGSSSDSSVGEKLGAAAADAVTGRTEEYRRRRHTMDKDSRGAAATTTTTEHRFFRRSVICDSNATALELPGLPLSLPQPSIPAAVPQSAPPEPHREETVTATATSQVAQQPPAAAAPGEQAVAGPAPSTVPSSTSKDRPVSQPSLVGSKEEPPPARSGSGGGSAKEPQEERSQQQDDIEELETKAVGMSNDGRFLKFDIEIGRGSFKTVYKGLDTETTVEVAWCELQDRKLTKSERQRFKEEAEMLKGLQHPNIVRFYDSWESTVKGKKCIVLVTELMTSGTLKTYLKRFKVMKIKVLRSWCRQILKGLQFLHTRTPPIIHRDLKCDNIFITGPTGSVKIGDLGLATLKRASFAKSVIGMFQVYLGA

SEQ ID NO: 9164 - DNA, 1236 bp, Homo sapiens
ttagcgcggagagtttcccgggtggacgcggctcctctctcggccactccgcacccccatcttcggtgacagaaggcgcctggtgggggtggctgctcttttctctccctgttccccccctggccctcccctcatgactgcggcgcctctgctgccaccgcccgcccggccgccgctcgccgcaggatggatgcggaccgtgcggcgctaacccccgtggctcagctcccgaatcgcccgccttcgagccctcctcgtgagccgcagcagcctcggtgccagcccccgccgcagctgggcccagcggtccgcctgtccctcgttgcggcttgtcggtgctgagtgaggcgtcgtccgggtcggcgcgaacccgcccggccgcggttccctgcagacctctgcgcgggcggctcggcccttcacgcccttttcgttcacgaatccgagcccgctcgcctctctccagcgaaccgaccatgtctggcggcgccgcagagaagcagagcagcactcccggttccctgttcctctcgccgccggctcctgcccccaagaatggctccagctccgattcctccgtgggggagaaactgggagccgcggccgccgacgctgtgaccggcaggaccgaggagtacaggcgccgccgccacactatggacaaggacagccgtggggcggccgcgaccactaccaccactgagcaccgcttcttccgccggagcgtcatctgtgactccaatgccactgcactggagcttcccggccttcctctttccctgccccagcccagcatccccgcggctgtcccgcagagtgctccaccggagccccaccgggaagagaccgtgaccgccaccgccacttcccaggtagcccagcagcctccagccgctgccgcccctggggaacaggccgtcgcgggccctgccccctcgactgtccccagcagtaccagcaaagaccgcccagtgtcccagcctagccttgtggggagcaaagaggagccgccgccggcgagaagtggcagcggcggcggcagcgccaaggagccacaggaggaacggagccagcagcaggatgatatcgaagagctggagaccaaggccgtgggaatgtctaacgatggccgctttctcaagtttgacatcgaaatcggcagaggctcctttaagacggtctacaaaggtctggacactgaaaccaccgtggaagtcgcctggtgtgaactgcagg

SEQ ID NO: 9165 - protein, 252 aa, Homo sapiens
MSGGAAEKQSSTPGSLFLSPPAPAPKNGSSSDSSVGEKLGAAAADAVTGRTEEYRRRRHTMDKDSRGAAATTTTTEHRFFRRSVICDSNATALELPGLPLSLPQPSIPAAVPQSAPPEPHREETVTATATSQVAQQPPAAAAPGEQAVAGPAPSTVPSSTSKDRPVSQPSLVGSKEEPPPARSGSGGGSAKEPQEERSQQQDDIEELETKAVGMSNDGRFLKFDIEIGRGSFKTVYKGLDTETTVEVAWCEL

SEQ ID NO: 9166 - DNA, 336 bp, Homo sapiens
agcgcggagagtttcccgggtggacgcggctcctctctcggccactccgcacccccatcttcggtgacagaaggcgcctggtgggggtggctgctcttttctctccctgttccccctcacccagtcctctaggtctcctctcctcttgcctcagagaagcagcggagctcgggcccgctcctcaggcgccgaggctccgaggctccggcccttcgcctctgggcgatgggcgacctgtgaggccggtccccatcgctgggggcgcgtgtgggaggaggcggccgcccgagtgaccgggagccgggccgcggccttccctcgcccgcctcggcccct

SEQ ID NO: 9167 - protein, 96 aa, Homo sapiens
RGEFPGWTRLLSRPLRTPIFGDRRRLVGVAALFSPCSPSPSPLGLLSSCLREAAELGPAPQAPRLRGSGPSPLGDGRPVRPVPIAGGACGRRRPPE

SEQ ID NO: 9168 - DNA, 7784 bp, Homo sapiens
ctcctctgccccggggccgccaccgcccgggcgtcggacctggtcccgtgctcgcggtgccgccgccctctgggcctagcccgcccagctcggcgagcggcggcagtgggagccgcgtccgccgcatccgcctcgactcggtgccggcccctggccctcccctcatgactgcggcgcctctgctgccaccgcccgcccggccgccgctcgccgcaggatggatgcggaccgtgcggcgctaacccccgtggctcagctcccgaatcgcccgccttcgagccctcctcgtgagccgcagcagcctcggtgccagcccccgccgcagctgggcccagcggtccgcctgtccctcgttgcggcttgtcggtgctgagtgaggcgtcgtccgggtcggcgcgaacccgcccggccgcggttccctgcagacctctgcgcgggcggctcggcccttcacgcccttttcgttcacgaatccgagcccgctcgcctctctccagcgaaccgaccatgtctggcggcgccgcagagaagcagagcagcactcccggttccctgttcctctcgccgccggctcctgcccccaagaatggctccagctccgattcctccgtgggggagaaactgggagccgcggccgccgacgctgtgaccggcaggaccgaggagtacaggcgccgccgccacactatggacaaggacagccgtggggcggccgcgaccactaccaccactgagcaccgcttcttccgccggagcgtcatctgtgactccaatgccactgcactggagcttcccggccttcctctttccctgccccagcccagcatccccgcggctgtcccgcagagtgctccaccggagccccaccgggaagagaccgtgaccgccaccgccacttcccaggtagcccagcagcctccagccgctgccgcccctggggaacaggccgtcgcgggccctgccccctcgactgtccccagcagtaccagcaaagaccgcccagtgtcccagcctagccttgtggggagcaaagaggagccgccgccggcgagaagtggcagcggcggcggcagcgccaaggagccacaggaggaacggagccagcagcaggatgatatcgaagagctggagaccaaggccgtgggaatgtctaacgatggccgctttctcaagtttgacatcgaaatcggcagaggctcctttaagacggtctacaaaggtctggacactgaaaccaccgtggaagtcgcctggtgtgaactgcaggatcgaaaattaacaaagtctgagaggcagagatttaaagaagaagctgaaatgttaaaaggtcttcagcatcccaatattgttagattttatgattcctgggaatccacagtaaaaggaaagaagtgcattgttttggtgactgaacttatgacgtctggaacacttaaaacgtatctgaaaaggtttaaagtgatgaagatcaaagttctaagaagctggtgccgtcagatccttaaaggtcttcagtttcttcatactcgaactccacctatcattcaccgcgatcttaaatgtgacaacatctttatcaccggccctactggctcagtcaagattggagacctcggtctggcaaccctgaagcgggcttcttttgccaagagtgtgataggtaccccagagttcatggcccctgagatgtatgaggagaaatatgatgaatccgttgacgtttatgcttttgggatgtgcatgcttgagatggctacatctgaatatccttactcggagtgccaaaatgctgcacagatctaccgtcgcgtgaccagtggggtgaagccagccagttttgacaaagtagcaattcctgaagtgaaggaaattattgaaggatgcatacgacaaaacaaagatgaaagatattccatcaaagaccttttgaaccatgccttcttccaagaggaaacaggagtacgggtagaattagcagaagaagatgatggagaaaaaatagccataaaattatggctacgtattgaagatattaagaaattaaagggaaaatacaaagataatgaagctattgagttttcttttgatttagagagagatgtcccagaagatgttgcacaagaaatggtagagtctgggtatgtctgtgaaggtgatcacaagaccatggctaaagctatcaaagacagagtatcattaattaagaggaaacgagagcagcggcagttggtacgggaggagcaagaaaaaaaaaagcaggaagagagcagtctcaaacagcaggtagaacaatccagtgcttcccagacaggaatcaagcagctcccttctgctagcaccggcatacctactgcttctaccacttcagcttcagtttctacacaagtagaacctgaagaacctgaggcagatcaacatcaacaactacagtaccagcaacccagtatatctgtgttatctgatgggacggttgacagtggtcagggatcctctgtcttcacagaatctcgagtgagcagccaacagacagtttcatatggttcccaacatgaacaggcacattctacaggcacagtcccagggcatataccttctactgtccaagcacagtctcagccccatggggtatatccaccctcaagtgtggcacaggggcagagccagggtcagccatcctcaagtagcttaacaggggtttcatcttcccaacccatacaacatcctcagcagcagcagggaatacagcagacagcccctcctcaacagacagtgcagtattcactttcacagacatcaacctccagtgaggccactactgcacagccagtgagtcagcctcaagctccacaagtcttgcctcaagtatcagctggaaaacagagtactcagggagtctctcaggttgctcctgcagagccagttgcagtagcacagacccaagctacccagccgaccactttggcttcctctgtagacagtgcacattcagatgttgcttcaggtatgagtgatggcaatgagaacgtcccatcttccagtggaaggcatgaaggaagaactacaaaacggcattaccgaaaatctgtaaggagtcgctctcgacatgaaaaaacttcacgcccaaaattaagaattttgaatgtttcaaataaaggagaccgagtagtagaatgtcaattagagactcataataggaaaatggttacattcaaatttgacctagatggtgacaaccccgaggagatagcaacaattatggtgaacaatgactttattctagcaatagagagagagtcgtttgtggatcaagtgcgagaaattattgaaaaagctgatgaaatgctcagtgaggatgtcagtgtggaaccagagggtgatcagggattggagagtctacaaggaaaggatgactatggcttttcaggttctcagaaattggaaggagagttcaaacaaccaattcctgcgtcttccatgccacagcaaataggcattcctaccagttctttaactcaagttgttcattctgcgggaaggcggtttatagtgagtcctgtgccagaaagccgattacgagaatcaaaagttttccccagtgaaataacagatacagttgctgcctctacagctcagagccctggaatgaacttgtctcactctgcatcatcccttagtctacaacaggccttttctgaacttagacgtgcccaaatgacagaaggacccaacacagcacctccaaactttagtcatacaggaccaacatttccagtagtacctcctttcttaagtagcattgctggagtcccaaccacagcagcagccacagcaccagtccctgcaacaagcagccctcctaatgacatttccacatcagtaattcagtctgaggttacagtgcccactgaagaggggattgctggagttgccaccagcacaggtgtggtaacttcaggtggtctccccataccacctgtgtctgaatcaccagtactttccagcgtagtttcaagtatcacaatacctgcagttgtctcaatatctactacatccccgtcacttcaagtccccacatccacatctgagatcgttgtttctagtacagcactgtatccttcagtaacagtttcagcaacttcagcctctgcagggggcagtactgctaccccaggtcctaagcctccagctgtagtatctcagcaggcagcaggcagcactactgtgggagccacattaacatcagtttctaccaccacttcattcccaagcacagcttcacagctgtgcattcagcttagcagcagtacttctactcctactttagctgaaaccgtggtagttagcgcacactcactagataagacatctcatagcagtacaactggattggctttctccctctctgcaccatcttcctcttcctctcctggagcaggagtgtctagttatatttctcagcctggtgggctgcatcctttggtcattccatcagtgatagcttctactcctattcttccccaagcagcaggacctacttctacacctttattaccccaagtacctagtatcccacccttggtacagcctgttgccaatgtgcctgctgtacagcagacactaattcatagtcagcctcaaccagctttgcttcccaaccagccccatactcattgtcctgaagtagattctgatacacaacccaaagctcctggaattgatgacataaagactctagaagaaaagctgcggtctctgttcagtgaacacagctcatctggagctcagcatgcctctgtctcactggagacctcactagtcatagagagcactgtcacaccaggcatcccaactactgctgttgcaccaagcaaactcctgacttctaccacaagtacttgcttaccaccaaccaatttaccactaggaacagttgctttgccagttacaccagtggtcacacctgggcaagtttctaccccagtcagcactactacatcaggagtgaaacctggaactgctccctccaagccacctctaactaaggctccggtgctgccagtgggtactgaacttccagcaggtactctacccagcgagcagctgccaccttttccaggaccttctctaacccagtcccagcaacctctagaggatcttgatgctcaattgagaagaacacttagtccagagatgatcacagtgacttctgcggttggtcctgtgtccatggcggctccaacagcaatcacagaagcaggaacacagcctcagaagggtgtttctcaagtcaaagaaggccctgtcctagcaactagttcaggagctggtgtttttaagatgggacgatttcaggtttctgttgcagcagacggtgcccagaaagagggtaaaaataagtcagaagatgcaaagtctgttcattttgaatccagcacctcagagtcctcagtgctatcaagtagtagtccagagagtaccttggtgaaaccagagccgaatggcataaccatccctggtatctcttcagatgtgccagagagtgcccacaaaactactgcctcagaggcaaagtcagacactgggcagcctaccaaggttggacgttttcaggtgacaactacagcaaacaaagtgggtcgtttctctgtatcaaaaactgaggacaagatcactgacacaaagaaagaaggaccagtggcatctcctccttttatggatttggaacaagctgttcttcctgctgtgataccaaagaaagagaagcctgaactgtcagagccttcacatctaaatgggccgtcttctgacccggaggccgcttttttaagtagggatgtggatgatggttccggtagtccacactcgccccatcagctgagctcaaagagccttcctagccagaatctaagtcaaagccttagtaattcatttaactcctcttacatgagtagcgacaatgagtcagatatcgaagatgaagacttaaagttagagctgcgacgactacgagataaacatctcaaagagattcaggacctgcagagtcgccagaagcatgaaattgaatctttgtataccaaactgggcaaggtgccccctgctgttattattcccccagctgctcccctttcagggagaagacgacgacccactaaaagcaaaggcagcaaatctagtcgaagcagttccttggggaataaaagcccccagctttcaggtaacctgtctggtcagagtgcagcttcagtcttgcacccccagcagaccctccaccctcctggcaacatcccagagtccgggcagaatcagctgttacagccccttaagccatctccctccagtgacaacctctattcagccttcaccagtgatggtgccatttcagtaccaagcctttctgctccaggtcaaggaaccagcagcacaaacactgttggggcaacagtgaacagccaagccgcccaagctcagcctcctgccatgacgtccagcaggaagggcacattcacagatgacttgcacaagttggtagacaattgggcccgagatgccatgaatctctcaggcaggagaggaagcaaagggcacatgaattacgagggccctggaatggcaaggaagttctctgcacctgggcaactgtgcatctccatgacctcgaacctgggtggctctgcccccatctctgcagcatcagctacctctctaggtcacttcaccaagtctatgtgccccccacagcagtatggctttccagctaccccatttggcgctcaatggagtgggacgggtggcccagcaccacagccacttggccagttccaacctgtgggaactgcctccttgcagaatttcaacatcagcaatttgcagaaatccatcagcaaccccccaggctccaacctgcggaccacttagacctagagacattaactgaatagatctgggggcaggagatggaatgctgagggggtgggtgggggtgggaagtagcctatatactaactactagtgctgcatttaactggttatttcttgccagaggggaatgtttttaatactgcattgagccctcagaatggagagtctcccccgctccagttattggaatgggagaggaaggaaagaacagcttttttgtcaaggggcagcttcagaccatgctttcctgtttatctatactcagtaatgaggatgagggctaggaaagtcttgttcataaggaagctggagaactcaatgtaaaatcaaacccatctgtaatttcgagtgggtggagctcttgcttttggtacatgccctgaatccctcactccctcaagaatccgaaccacaggacaaaaaccacctactgggctctctcctaccctgccctcctcccttttttttacccctctcttttttattttttctttgctctttagaacccagtgaaaaataccagggtactggggtgcaactctttcttatgataggtcattagtgctttaagcaaaagatattagcagctttgactgcagcattagcaattaggaaaaaaaaaaaattaagttccctgcggacatgtaactttgccatcagttttgatgtggaaacactgtgatatataaaatgttgttggacaacagtagttttaagagtaaaatatgaaacgtttaaaaagttccaaaaaaagctagctctgtcctttacttattgagacactttaactttttcctttgtatttccattgtattagataaataaatgtgaatgtaaaattgtataaattactgtacttgaat

SEQ ID NO: 9169 - protein, 2136 aa, Homo sapiens
MSGGAAEKQSSTPGSLFLSPPAPAPKNGSSSDSSVGEKLGAAAADAVTGRTEEYRRRRHTMDKDSRGAAATTTTTEHRFFRRSVICDSNATALELPGLPLSLPQPSIPAAVPQSAPPEPHREETVTATATSQVAQQPPAAAAPGEQAVAGPAPSTVPSSTSKDRPVSQPSLVGSKEEPPPARSGSGGGSAKEPQEERSQQQDDIEELETKAVGMSNDGRFLKFDIEIGRGSFKTVYKGLDTETTVEVAWCELQDRKLTKSERQRFKEEAEMLKGLQHPNIVRFYDSWESTVKGKKCIVLVTELMTSGTLKTYLKRFKVMKIKVLRSWCRQILKGLQFLHTRTPPIIHRDLKCDNIFITGPTGSVKIGDLGLATLKRASFAKSVIGTPEFMAPEMYEEKYDESVDVYAFGMCMLEMATSEYPYSECQNAAQIYRRVTSGVKPASFDKVAIPEVKEIIEGCIRQNKDERYSIKDLLNHAFFQEETGVRVELAEEDDGEKIAIKLWLRIEDIKKLKGKYKDNEAIEFSFDLERDVPEDVAQEMVESGYVCEGDHKTMAKAIKDRVSLIKRKREQRQLVREEQEKKKQEESSLKQQVEQSSASQTGIKQLPSASTGIPTASTTSASVSTQVEPEEPEADQHQQLQYQQPSISVLSDGTVDSGQGSSVFTESRVSSQQTVSYGSQHEQAHSTGTVPGHIPSTVQAQSQPHGVYPPSSVAQGQSQGQPSSSSLTGVSSSQPIQHPQQQQGIQQTAPPQQTVQYSLSQTSTSSEATTAQPVSQPQAPQVLPQVSAGKQSTQGVSQVAPAEPVAVAQTQATQPTTLASSVDSAHSDVASGMSDGNENVPSSSGRHEGRTTKRHYRKSVRSRSRHEKTSRPKLRILNVSNKGDRVVECQLETHNRKMVTFKFDLDGDNPEEIATIMVNNDFILAIERESFVDQVREIIEKADEMLSEDVSVEPEGDQGLESLQGKDDYGFSGSQKLEGEFKQPIPASSMPQQIGIPTSSLTQVVHSAGRRFIVSPVPESRLRESKVFPSEITDTVAASTAQSPGMNLSHSASSLSLQQAFSELRRAQMTEGPNTAPPNFSHTGPTFPVVPPFLSSIAGVPTTAAATAPVPATSSPPNDISTSVIQSEVTVPTEEGIAGVATSTGVVTSGGLPIPPVSESPVLSSVVSSITIPAVVSISTTSPSLQVPTSTSEIVVSSTALYPSVTVSATSASAGGSTATPGPKPPAVVSQQAAGSTTVGATLTSVSTTTSFPSTASQLCIQLSSSTSTPTLAETVVVSAHSLDKTSHSSTTGLAFSLSAPSSSSSPGAGVSSYISQPGGLHPLVIPSVIASTPILPQAAGPTSTPLLPQVPSIPPLVQPVANVPAVQQTLIHSQPQPALLPNQPHTHCPEVDSDTQPKAPGIDDIKTLEEKLRSLFSEHSSSGAQHASVSLETSLVIESTVTPGIPTTAVAPSKLLTSTTSTCLPPTNLPLGTVALPVTPVVTPGQVSTPVSTTTSGVKPGTAPSKPPLTKAPVLPVGTELPAGTLPSEQLPPFPGPSLTQSQQPLEDLDAQLRRTLSPEMITVTSAVGPVSMAAPTAITEAGTQPQKGVSQVKEGPVLATSSGAGVFKMGRFQVSVAADGAQKEGKNKSEDAKSVHFESSTSESSVLSSSSPESTLVKPEPNGITIPGISSDVPESAHKTTASEAKSDTGQPTKVGRFQVTTTANKVGRFSVSKTEDKITDTKKEGPVASPPFMDLEQAVLPAVIPKKEKPELSEPSHLNGPSSDPEAAFLSRDVDDGSGSPHSPHQLSSKSLPSQNLSQSLSNSFNSSYMSSDNESDIEDEDLKLELRRLRDKHLKEIQDLQSRQKHEIESLYTKLGKVPPAVIIPPAAPLSGRRRRPTKSKGSKSSRSSSLGNKSPQLSGNLSGQSAASVLHPQQTLHPPGNIPESGQNQLLQPLKPSPSSDNLYSAFTSDGAISVPSLSAPGQGTSSTNTVGATVNSQAAQAQPPAMTSSRKGTFTDDLHKLVDNWARDAMNLSGRRGSKGHMNYEGPGMARKFSAPGQLCISMTSNLGGSAPISAASATSLGHFTKSMCPPQQYGFPATPFGAQWSGTGGPAPQPLGQFQPVGTASLQNFNISNLQKSISNPPGSNLRTT

SEQ ID NO: 9170 - DNA, 8522 bp, Homo sapiens
ctcctctgccccggggccgccaccgcccgggcgtcggacctggtcccgtgctcgcggtgccgccgccctctgggcctagcccgcccagctcggcgagcggcggcagtgggagccgcgtccgccgcatccgcctcgactcggtgccggcccctggccctcccctcatgactgcggcgcctctgctgccaccgcccgcccggccgccgctcgccgcaggatggatgcggaccgtgcggcgctaacccccgtggctcagctcccgaatcgcccgccttcgagccctcctcgtgagccgcagcagcctcggtgccagcccccgccgcagctgggcccagcggtccgcctgtccctcgttgcggcttgtcggtgctgagtgaggcgtcgtccgggtcggcgcgaacccgcccggccgcggttccctgcagacctctgcgcgggcggctcggcccttcacgcccttttcgttcacgaatccgagcccgctcgcctctctccagcgaaccgaccatgtctggcggcgccgcagagaagcagagcagcactcccggttccctgttcctctcgccgccggctcctgcccccaagaatggctccagctccgattcctccgtgggggagaaactgggagccgcggccgccgacgctgtgaccggcaggaccgaggagtacaggcgccgccgccacactatggacaaggacagccgtggggcggccgcgaccactaccaccactgagcaccgcttcttccgccggagcgtcatctgtgactccaatgccactgcactggagcttcccggccttcctctttccctgccccagcccagcatccccgcggctgtcccgcagagtgctccaccggagccccaccgggaagagaccgtgaccgccaccgccacttcccaggtagcccagcagcctccagccgctgccgcccctggggaacaggccgtcgcgggccctgccccctcgactgtccccagcagtaccagcaaagaccgcccagtgtcccagcctagccttgtggggagcaaagaggagccgccgccggcgagaagtggcagcggcggcggcagcgccaaggagccacaggaggaacggagccagcagcaggatgatatcgaagagctggagaccaaggccgtgggaatgtctaacgatggccgctttctcaagtttgacatcgaaatcggcagaggctcctttaagacggtctacaaaggtctggacactgaaaccaccgtggaagtcgcctggtgtgaactgcaggatcgaaaattaacaaagtctgagaggcagagatttaaagaagaagctgaaatgttaaaaggtcttcagcatcccaatattgttagattttatgattcctgggaatccacagtaaaaggaaagaagtgcattgttttggtgactgaacttatgacgtctggaacacttaaaacgtatctgaaaaggtttaaagtgatgaagatcaaagttctaagaagctggtgccgtcagatccttaaaggtcttcagtttcttcatactcgaactccacctatcattcaccgcgatcttaaatgtgacaacatctttatcaccggccctactggctcagtcaagattggagacctcggtctggcaaccctgaagcgggcttcttttgccaagagtgtgataggtaccccagagttcatggcccctgagatgtatgaggagaaatatgatgaatccgttgacgtttatgcttttgggatgtgcatgcttgagatggctacatctgaatatccttactcggagtgccaaaatgctgcacagatctaccgtcgcgtgaccagtggggtgaagccagccagttttgacaaagtagcaattcctgaagtgaaggaaattattgaaggatgcatacgacaaaacaaagatgaaagatattccatcaaagaccttttgaaccatgccttcttccaagaggaaacaggagtacgggtagaattagcagaagaagatgatggagaaaaaatagccataaaattatggctacgtattgaagatattaagaaattaaagggaaaatacaaagataatgaagctattgagttttcttttgatttagagagagatgtcccagaagatgttgcacaagaaatggtagagtctgggtatgtctgtgaaggtgatcacaagaccatggctaaagctatcaaagacagagtatcattaattaagaggaaacgagagcagcggcagttggtacgggaggagcaagaaaaaaaaaagcaggaagagagcagtctcaaacagcaggtagaacaatccagtgcttcccagacaggaatcaagcagctcccttctgctagcaccggcatacctactgcttctaccacttcagcttcagtttctacacaagtagaacctgaagaacctgaggcagatcaacatcaacaactacagtaccagcaacccagtatatctgtgttatctgatgggacggttgacagtggtcagggatcctctgtcttcacagaatctcgagtgagcagccaacagacagtttcatatggttcccaacatgaacaggcacattctacaggcacagtcccagggcatataccttctactgtccaagcacagtctcagccccatggggtatatccaccctcaagtgtggcacaggggcagagccagggtcagccatcctcaagtagcttaacaggggtttcatcttcccaacccatacaacatcctcagcagcagcagggaatacagcagacagcccctcctcaacagacagtgcagtattcactttcacagacatcaacctccagtgaggccactactgcacagccagtgagtcagcctcaagctccacaagtcttgcctcaagtatcagctggaaaacagcttccagtttcccagccagtaccaactatccaaggcgaacctcagatcccagttgcgacacaaccctcggttgttccagtccactctggtgctcatttccttccagtgggacagccgctccctactcccttgctccctcagtaccctgtctctcagattcccatatcaactcctcatgtgtctacggctcagacaggtttctcatcccttcccatcacaatggcagctggcattactcagcctctgctcacgttggcttcatctgctacaacagctgcgatcccgggggtatcaactgtggttcctagtcagcttccaacccttctgcagcctgtgactcagctgccaagtcaggttcacccacagctcctacaaccagcagttcagtccatgggaataccagctaaccttggacaagctgctgaggttccactttcctctggagatgttctgtaccagggcttcccacctcgactgccaccacagtacccaggagattcaaatattgctccctcttccaacgtggcttctgtttgcatccattctacagtcctatcccctcccatgccgacagaagtactggctacacctgggtactttcccacagtggtgcagccttatgtggaatcaaatcttttagttcctatgggtggtgtaggaggacaggttcaagtgtcccagccaggagggagtttagcacaagcccccactacatcctcccagcaagcagttttggagagtactcagggagtctctcaggttgctcctgcagagccagttgcagtagcacagacccaagctacccagccgaccactttggcttcctctgtagacagtgcacattcagatgttgcttcaggtatgagtgatggcaatgagaacgtcccatcttccagtggaaggcatgaaggaagaactacaaaacggcattaccgaaaatctgtaaggagtcgctctcgacatgaaaaaacttcacgcccaaaattaagaattttgaatgtttcaaataaaggagaccgagtagtagaatgtcaattagagactcataataggaaaatggttacattcaaatttgacctagatggtgacaaccccgaggagatagcaacaattatggtgaacaatgactttattctagcaatagagagagagtcgtttgtggatcaagtgcgagaaattattgaaaaagctgatgaaatgctcagtgaggatgtcagtgtggaaccagagggtgatcagggattggagagtctacaaggaaaggatgactatggcttttcaggttctcagaaattggaaggagagttcaaacaaccaattcctgcgtcttccatgccacagcaaataggcattcctaccagttctttaactcaagttgttcattctgcgggaaggcggtttatagtgagtcctgtgccagaaagccgattacgagaatcaaaagttttccccagtgaaataacagatacagttgctgcctctacagctcagagccctggaatgaacttgtctcactctgcatcatcccttagtctacaacaggccttttctgaacttagacgtgcccaaatgacagaaggacccaacacagcacctccaaactttagtcatacaggaccaacatttccagtagtacctcctttcttaagtagcattgctggagtcccaaccacagcagcagccacagcaccagtccctgcaacaagcagccctcctaatgacatttccacatcagtaattcagtctgaggttacagtgcccactgaagaggggattgctggagttgccaccagcacaggtgtggtaacttcaggtggtctccccataccacctgtgtctgaatcaccagtactttccagcgtagtttcaagtatcacaatacctgcagttgtctcaatatctactacatccccgtcacttcaagtccccacatccacatctgagatcgttgtttctagtacagcactgtatccttcagtaacagtttcagcaacttcagcctctgcagggggcagtactgctaccccaggtcctaagcctccagctgtagtatctcagcaggcagcaggcagcactactgtgggagccacattaacatcagtttctaccaccacttcattcccaagcacagcttcacagctgtgcattcagcttagcagcagtacttctactcctactttagctgaaaccgtggtagttagcgcacactcactagataagacatctcatagcagtacaactggattggctttctccctctctgcaccatcttcctcttcctctcctggagcaggagtgtctagttatatttctcagcctggtgggctgcatcctttggtcattccatcagtgatagcttctactcctattcttccccaagcagcaggacctacttctacacctttattaccccaagtacctagtatcccacccttggtacagcctgttgccaatgtgcctgctgtacagcagacactaattcatagtcagcctcaaccagctttgcttcccaaccagccccatactcattgtcctgaagtagattctgatacacaacccaaagctcctggaattgatgacataaagactctagaagaaaagctgcggtctctgttcagtgaacacagctcatctggagctcagcatgcctctgtctcactggagacctcactagtcatagagagcactgtcacaccaggcatcccaactactgctgttgcaccaagcaaactcctgacttctaccacaagtacttgcttaccaccaaccaatttaccactaggaacagttgctttgccagttacaccagtggtcacacctgggcaagtttctaccccagtcagcactactacatcaggagtgaaacctggaactgctccctccaagccacctctaactaaggctccggtgctgccagtgggtactgaacttccagcaggtactctacccagcgagcagctgccaccttttccaggaccttctctaacccagtcccagcaacctctagaggatcttgatgctcaattgagaagaacacttagtccagagatgatcacagtgacttctgcggttggtcctgtgtccatggcggctccaacagcaatcacagaagcaggaacacagcctcagaagggtgtttctcaagtcaaagaaggccctgtcctagcaactagttcaggagctggtgtttttaagatgggacgatttcaggtttctgttgcagcagacggtgcccagaaagagggtaaaaataagtcagaagatgcaaagtctgttcattttgaatccagcacctcagagtcctcagtgctatcaagtagtagtccagagagtaccttggtgaaaccagagccgaatggcataaccatccctggtatctcttcagatgtgccagagagtgcccacaaaactactgcctcagaggcaaagtcagacactgggcagcctaccaaggttggacgttttcaggtgacaactacagcaaacaaagtgggtcgtttctctgtatcaaaaactgaggacaagatcactgacacaaagaaagaaggaccagtggcatctcctccttttatggatttggaacaagctgttcttcctgctgtgataccaaagaaagagaagcctgaactgtcagagccttcacatctaaatgggccgtcttctgacccggaggccgcttttttaagtagggatgtggatgatggttccggtagtccacactcgccccatcagctgagctcaaagagccttcctagccagaatctaagtcaaagccttagtaattcatttaactcctcttacatgagtagcgacaatgagtcagatatcgaagatgaagacttaaagttagagctgcgacgactacgagataaacatctcaaagagattcaggacctgcagagtcgccagaagcatgaaattgaatctttgtataccaaactgggcaaggtgccccctgctgttattattcccccagctgctcccctttcagggagaagacgacgacccactaaaagcaaaggcagcaaatctagtcgaagcagttccttggggaataaaagcccccagctttcaggtaacctgtctggtcagagtgcagcttcagtcttgcacccccagcagaccctccaccctcctggcaacatcccagagtccgggcagaatcagctgttacagccccttaagccatctccctccagtgacaacctctattcagccttcaccagtgatggtgccatttcagtaccaagcctttctgctccaggtcaaggaaccagcagcacaaacactgttggggcaacagtgaacagccaagccgcccaagctcagcctcctgccatgacgtccagcaggaagggcacattcacagatgacttgcacaagttggtagacaattgggcccgagatgccatgaatctctcaggcaggagaggaagcaaagggcacatgaattacgagggccctggaatggcaaggaagttctctgcacctgggcaactgtgcatctccatgacctcgaacctgggtggctctgcccccatctctgcagcatcagctacctctctaggtcacttcaccaagtctatgtgccccccacagcagtatggctttccagctaccccatttggcgctcaatggagtgggacgggtggcccagcaccacagccacttggccagttccaacctgtgggaactgcctccttgcagaatttcaacatcagcaatttgcagaaatccatcagcaaccccccaggctccaacctgcggaccacttagacctagagacattaactgaatagatctgggggcaggagatggaatgctgagggggtgggtgggggtgggaagtagcctatatactaactactagtgctgcatttaactggttatttcttgccagaggggaatgtttttaatactgcattgagccctcagaatggagagtctcccccgctccagttattggaatgggagaggaaggaaagaacagcttttttgtcaaggggcagcttcagaccatgctttcctgtttatctatactcagtaatgaggatgagggctaggaaagtcttgttcataaggaagctggagaactcaatgtaaaatcaaacccatctgtaatttcgagtgggtggagctcttgcttttggtacatgccctgaatccctcactccctcaagaatccgaaccacaggacaaaaaccacctactgggctctctcctaccctgccctcctcccttttttttacccctctcttttttattttttctttgctctttagaacccagtgaaaaataccagggtactggggtgcaactctttcttatgataggtcattagtgctttaagcaaaagatattagcagctttgactgcagcattagcaattaggaaaaaaaaaaaattaagttccctgcggacatgtaactttgccatcagttttgatgtggaaacactgtgatatataaaatgttgttggacaacagtagttttaagagtaaaatatgaaacgtttaaaaagttccaaaaaaagctagctctgtcctttacttattgagacactttaactttttcctttgtatttccattgtattagataaataaatgtgaatgtaaaattgtataaattactgtacttgaat

SEQ ID NO: 9171 - protein, 2382 aa, Homo sapiens
MSGGAAEKQSSTPGSLFLSPPAPAPKNGSSSDSSVGEKLGAAAADAVTGRTEEYRRRRHTMDKDSRGAAATTTTTEHRFFRRSVICDSNATALELPGLPLSLPQPSIPAAVPQSAPPEPHREETVTATATSQVAQQPPAAAAPGEQAVAGPAPSTVPSSTSKDRPVSQPSLVGSKEEPPPARSGSGGGSAKEPQEERSQQQDDIEELETKAVGMSNDGRFLKFDIEIGRGSFKTVYKGLDTETTVEVAWCELQDRKLTKSERQRFKEEAEMLKGLQHPNIVRFYDSWESTVKGKKCIVLVTELMTSGTLKTYLKRFKVMKIKVLRSWCRQILKGLQFLHTRTPPIIHRDLKCDNIFITGPTGSVKIGDLGLATLKRASFAKSVIGTPEFMAPEMYEEKYDESVDVYAFGMCMLEMATSEYPYSECQNAAQIYRRVTSGVKPASFDKVAIPEVKEIIEGCIRQNKDERYSIKDLLNHAFFQEETGVRVELAEEDDGEKIAIKLWLRIEDIKKLKGKYKDNEAIEFSFDLERDVPEDVAQEMVESGYVCEGDHKTMAKAIKDRVSLIKRKREQRQLVREEQEKKKQEESSLKQQVEQSSASQTGIKQLPSASTGIPTASTTSASVSTQVEPEEPEADQHQQLQYQQPSISVLSDGTVDSGQGSSVFTESRVSSQQTVSYGSQHEQAHSTGTVPGHIPSTVQAQSQPHGVYPPSSVAQGQSQGQPSSSSLTGVSSSQPIQHPQQQQGIQQTAPPQQTVQYSLSQTSTSSEATTAQPVSQPQAPQVLPQVSAGKQLPVSQPVPTIQGEPQIPVATQPSVVPVHSGAHFLPVGQPLPTPLLPQYPVSQIPISTPHVSTAQTGFSSLPITMAAGITQPLLTLASSATTAAIPGVSTVVPSQLPTLLQPVTQLPSQVHPQLLQPAVQSMGIPANLGQAAEVPLSSGDVLYQGFPPRLPPQYPGDSNIAPSSNVASVCIHSTVLSPPMPTEVLATPGYFPTVVQPYVESNLLVPMGGVGGQVQVSQPGGSLAQAPTTSSQQAVLESTQGVSQVAPAEPVAVAQTQATQPTTLASSVDSAHSDVASGMSDGNENVPSSSGRHEGRTTKRHYRKSVRSRSRHEKTSRPKLRILNVSNKGDRVVECQLETHNRKMVTFKFDLDGDNPEEIATIMVNNDFILAIERESFVDQVREIIEKADEMLSEDVSVEPEGDQGLESLQGKDDYGFSGSQKLEGEFKQPIPASSMPQQIGIPTSSLTQVVHSAGRRFIVSPVPESRLRESKVFPSEITDTVAASTAQSPGMNLSHSASSLSLQQAFSELRRAQMTEGPNTAPPNFSHTGPTFPVVPPFLSSIAGVPTTAAATAPVPATSSPPNDISTSVIQSEVTVPTEEGIAGVATSTGVVTSGGLPIPPVSESPVLSSVVSSITIPAVVSISTTSPSLQVPTSTSEIVVSSTALYPSVTVSATSASAGGSTATPGPKPPAVVSQQAAGSTTVGATLTSVSTTTSFPSTASQLCIQLSSSTSTPTLAETVVVSAHSLDKTSHSSTTGLAFSLSAPSSSSSPGAGVSSYISQPGGLHPLVIPSVIASTPILPQAAGPTSTPLLPQVPSIPPLVQPVANVPAVQQTLIHSQPQPALLPNQPHTHCPEVDSDTQPKAPGIDDIKTLEEKLRSLFSEHSSSGAQHASVSLETSLVIESTVTPGIPTTAVAPSKLLTSTTSTCLPPTNLPLGTVALPVTPVVTPGQVSTPVSTTTSGVKPGTAPSKPPLTKAPVLPVGTELPAGTLPSEQLPPFPGPSLTQSQQPLEDLDAQLRRTLSPEMITVTSAVGPVSMAAPTAITEAGTQPQKGVSQVKEGPVLATSSGAGVFKMGRFQVSVAADGAQKEGKNKSEDAKSVHFESSTSESSVLSSSSPESTLVKPEPNGITIPGISSDVPESAHKTTASEAKSDTGQPTKVGRFQVTTTANKVGRFSVSKTEDKITDTKKEGPVASPPFMDLEQAVLPAVIPKKEKPELSEPSHLNGPSSDPEAAFLSRDVDDGSGSPHSPHQLSSKSLPSQNLSQSLSNSFNSSYMSSDNESDIEDEDLKLELRRLRDKHLKEIQDLQSRQKHEIESLYTKLGKVPPAVIIPPAAPLSGRRRRPTKSKGSKSSRSSSLGNKSPQLSGNLSGQSAASVLHPQQTLHPPGNIPESGQNQLLQPLKPSPSSDNLYSAFTSDGAISVPSLSAPGQGTSSTNTVGATVNSQAAQAQPPAMTSSRKGTFTDDLHKLVDNWARDAMNLSGRRGSKGHMNYEGPGMARKFSAPGQLCISMTSNLGGSAPISAASATSLGHFTKSMCPPQQYGFPATPFGAQWSGTGGPAPQPLGQFQPVGTASLQNFNISNLQKSISNPPGSNLRTT

SEQ ID NO: 9172 - DNA, 9365 bp, Homo sapiens
ctcctctgccccggggccgccaccgcccgggcgtcggacctggtcccgtgctcgcggtgccgccgccctctgggcctagcccgcccagctcggcgagcggcggcagtgggagccgcgtccgccgcatccgcctcgactcggtgccggcccctggccctcccctcatgactgcggcgcctctgctgccaccgcccgcccggccgccgctcgccgcaggatggatgcggaccgtgcggcgctaacccccgtggctcagctcccgaatcgcccgccttcgagccctcctcgtgagccgcagcagcctcggtgccagcccccgccgcagctgggcccagcggtccgcctgtccctcgttgcggcttgtcggtgctgagtgaggcgtcgtccgggtcggcgcgaacccgcccggccgcggttccctgcagacctctgcgcgggcggctcggcccttcacgcccttttcgttcacgaatccgagcccgctcgcctctctccagcgaaccgaccatgtctggcggcgccgcagagaagcagagcagcactcccggttccctgttcctctcgccgccggctcctgcccccaagaatggctccagctccgattcctccgtgggggagaaactgggagccgcggccgccgacgctgtgaccggcaggaccgaggagtacaggcgccgccgccacactatggacaaggacagccgtggggcggccgcgaccactaccaccactgagcaccgcttcttccgccggagcgtcatctgtgactccaatgccactgcactggagcttcccggccttcctctttccctgccccagcccagcatccccgcggctgtcccgcagagtgctccaccggagccccaccgggaagagaccgtgaccgccaccgccacttcccaggtagcccagcagcctccagccgctgccgcccctggggaacaggccgtcgcgggccctgccccctcgactgtccccagcagtaccagcaaagaccgcccagtgtcccagcctagccttgtggggagcaaagaggagccgccgccggcgagaagtggcagcggcggcggcagcgccaaggagccacaggaggaacggagccagcagcaggatgatatcgaagagctggagaccaaggccgtgggaatgtctaacgatggccgctttctcaagtttgacatcgaaatcggcagaggctcctttaagacggtctacaaaggtctggacactgaaaccaccgtggaagtcgcctggtgtgaactgcaggatcgaaaattaacaaagtctgagaggcagagatttaaagaagaagctgaaatgttaaaaggtcttcagcatcccaatattgttagattttatgattcctgggaatccacagtaaaaggaaagaagtgcattgttttggtgactgaacttatgacgtctggaacacttaaaacgtatctgaaaaggtttaaagtgatgaagatcaaagttctaagaagctggtgccgtcagatccttaaaggtcttcagtttcttcatactcgaactccacctatcattcaccgcgatcttaaatgtgacaacatctttatcaccggccctactggctcagtcaagattggagacctcggtctggcaaccctgaagcgggcttcttttgccaagagtgtgataggtaccccagagttcatggcccctgagatgtatgaggagaaatatgatgaatccgttgacgtttatgcttttgggatgtgcatgcttgagatggctacatctgaatatccttactcggagtgccaaaatgctgcacagatctaccgtcgcgtgaccagtggggtgaagccagccagttttgacaaagtagcaattcctgaagtgaaggaaattattgaaggatgcatacgacaaaacaaagatgaaagatattccatcaaagaccttttgaaccatgccttcttccaagaggaaacaggagtacgggtagaattagcagaagaagatgatggagaaaaaatagccataaaattatggctacgtattgaagatattaagaaattaaagggaaaatacaaagataatgaagctattgagttttcttttgatttagagagagatgtcccagaagatgttgcacaagaaatggtagagtctgggtatgtctgtgaaggtgatcacaagaccatggctaaagctatcaaagacagagtatcattaattaagaggaaacgagagcagcggcagttggtacgggaggagcaagaaaaaaaaaagcaggaagagagcagtctcaaacagcaggtagaacaatccagtgcttcccagacaggaatcaagcagctcccttctgctagcaccggcatacctactgcttctaccacttcagcttcagtttctacacaagtagaacctgaagaacctgaggcagatcaacatcaacaactacagtaccagcaacccagtatatctgtgttatctgatgggacggttgacagtggtcagggatcctctgtcttcacagaatctcgagtgagcagccaacagacagtttcatatggttcccaacatgaacaggcacattctacaggcacagtcccagggcatataccttctactgtccaagcacagtctcagccccatggggtatatccaccctcaagtgtggcacaggggcagagccagggtcagccatcctcaagtagcttaacaggggtttcatcttcccaacccatacaacatcctcagcagcagcagggaatacagcagacagcccctcctcaacagacagtgcagtattcactttcacagacatcaacctccagtgaggccactactgcacagccagtgagtcagcctcaagctccacaagtcttgcctcaagtatcagctggaaaacagagtactcagggagtctctcaggttgctcctgcagagccagttgcagtagcacagacccaagctacccagccgaccactttggcttcctctgtagacagtgcacattcagatgttgcttcaggtatgagtgatggcaatgagaacgtcccatcttccagtggaaggcatgaaggaagaactacaaaacggcattaccgaaaatctgtaaggagtcgctctcgacatgaaaaaacttcacgcccaaaattaagaattttgaatgtttcaaataaaggagaccgagtagtagaatgtcaattagagactcataataggaaaatggttacattcaaatttgacctagatggtgacaaccccgaggagatagcaacaattatggtgaacaatgactttattctagcaatagagagagagtcgtttgtggatcaagtgcgagaaattattgaaaaagctgatgaaatgctcagtgaggatgtcagtgtggaaccagagggtgatcagggattggagagtctacaaggaaaggatgactatggcttttcaggttctcagaaattggaaggagagttcaaacaaccaattcctgcgtcttccatgccacagcaaataggcattcctaccagttctttaactcaagttgttcattctgcgggaaggcggtttatagtgagtcctgtgccagaaagccgattacgagaatcaaaagttttccccagtgaaataacagatacagttgctgcctctacagctcagagccctggaatgaacttgtctcactctgcatcatcccttagtctacaacaggccttttctgaacttagacgtgcccaaatgacagaaggacccaacacagcacctccaaactttagtcatacaggaccaacatttccagtagtacctcctttcttaagtagcattgctggagtcccaaccacagcagcagccacagcaccagtccctgcaacaagcagccctcctaatgacatttccacatcagtaattcagtctgaggttacagtgcccactgaagaggggattgctggagttgccaccagcacaggtgtggtaacttcaggtggtctccccataccacctgtgtctgaatcaccagtactttccagcgtagtttcaagtatcacaatacctgcagttgtctcaatatctactacatccccgtcacttcaagtccccacatccacatctgagatcgttgtttctagtacagcactgtatccttcagtaacagtttcagcaacttcagcctctgcagggggcagtactgctaccccaggtcctaagcctccagctgtagtatctcagcaggcagcaggcagcactactgtgggagccacattaacatcagtttctaccaccacttcattcccaagcacagcttcacagctgtgcattcagcttagcagcagtacttctactcctactttagctgaaaccgtggtagttagcgcacactcactagataagacatctcatagcagtacaactggattggctttctccctctctgcaccatcttcctcttcctctcctggagcaggagtgtctagttatatttctcagcctggtgggctgcatcctttggtcattccatcagtgatagcttctactcctattcttccccaagcagcaggacctacttctacacctttattaccccaagtacctagtatcccacccttggtacagcctgttgccaatgtgcctgctgtacagcagacactaattcatagtcagcctcaaccagctttgcttcccaaccagccccatactcattgtcctgaagtagattctgatacacaacccaaagctcctggaattgatgacataaagactctagaagaaaagctgcggtctctgttcagtgaacacagctcatctggagctcagcatgcctctgtctcactggagacctcactagtcatagagagcactgtcacaccaggcatcccaactactgctgttgcaccaagcaaactcctgacttctaccacaagtacttgcttaccaccaaccaatttaccactaggaacagttgctttgccagttacaccagtggtcacacctgggcaagtttctaccccagtcagcactactacatcaggagtgaaacctggaactgctccctccaagccacctctaactaaggctccggtgctgccagtgggtactgaacttccagcaggtactctacccagcgagcagctgccaccttttccaggaccttctctaacccagtcccagcaacctctagaggatcttgatgctcaattgagaagaacacttagtccagagatgatcacagtgacttctgcggttggtcctgtgtccatggcggctccaacagcaatcacagaagcaggaacacagcctcagaagggtgtttctcaagtcaaagaaggccctgtcctagcaactagttcaggagctggtgtttttaagatgggacgatttcaggtttctgttgcagcagacggtgcccagaaagagggtaaaaataagtcagaagatgcaaagtctgttcattttgaatccagcacctcagagtcctcagtgctatcaagtagtagtccagagagtaccttggtgaaaccagagccgaatggcataaccatccctggtatctcttcagatgtgccagagagtgcccacaaaactactgcctcagaggcaaagtcagacactgggcagcctaccaaggttggacgttttcaggtgacaactacagcaaacaaagtgggtcgtttctctgtatcaaaaactgaggacaagatcactgacacaaagaaagaaggaccagtggcatctcctccttttatggatttggaacaagctgttcttcctgctgtgataccaaagaaagagaagcctgaactgtcagagccttcacatctaaatgggccgtcttctgacccggaggccgcttttttaagtagggatgtggatgatggttccggtagtccacactcgccccatcagctgagctcaaagagccttcctagccagaatctaagtcaaagccttagtaattcatttaactcctcttacatgagtagcgacaatgagtcagatatcgaagatgaagacttaaagttagagctgcgacgactacgagataaacatctcaaagagattcaggacctgcagagtcgccagaagcatgaaattgaatctttgtataccaaactgggcaaggtgccccctgctgttattattcccccagctgctcccctttcagggagaagacgacgacccactaaaagcaaaggcagcaaatctagtcgaagcagttccttggggaataaaagcccccagctttcaggtaacctgtctggtcagagtgcagcttcagtcttgcacccccagcagaccctccaccctcctggcaacatcccagagtccgggcagaatcagctgttacagccccttaagccatctccctccagtgacaacctctattcagccttcaccagtgatggtgccatttcagtaccaagcctttctgctccaggtcaaggaaccagcagcacaaacactgttggggcaacagtgaacagccaagccgcccaagctcagcctcctgccatgacgtccagcaggaagggcacattcacagatgacttgcacaagttggtagacaattgggcccgagatgccatgaatctctcaggcaggagaggaagcaaagggcacatgaattacgagggccctggaatggcaaggaagttctctgcacctgggcaactgtgcatctccatgacctcgaacctgggtggctctgcccccatctctgcagcatcagctacctctctaggtcacttcaccaagtctatgtgccccccacagcagtatggctttccagctaccccatttggcgctcaatggagtgggacgggtggcccagcaccacagccacttggccagttccaacctgtgggaactgcctccttgcagaatttcaacatcagcaatttgcagaaatccatcagcaaccccccaggctccaacctgcggaccacttagacctagagacattaactgaatagatctgggggcaggagatggaatgctgagggggtgggtgggggtgggaagtagcctatatactaactactagtgctgcatttaactggttatttcttgccagaggggaatgtttttaatactgcattgagccctcagaatggagagtctcccccgctccagttattggaatgggagaggaaggaaagaacagcttttttgtcaaggggcagcttcagaccatgctttcctgtttatctatactcagtaatgaggatgagggctaggaaagtcttgttcataaggaagctggagaactcaatgtaaaatcaaacccatctgtaatttcgagtgggtggagctcttgcttttggtacatgccctgaatccctcactccctcaagaatccgaaccacaggacaaaaaccacctactgggctctctcctaccctgccctcctcccttttttttacccctctcttttttattttttctttgctctttagaacccagtgaaaaataccagggtactggggtgcaactctttcttatgataggtcattagtgctttaagcaaaagatattagcagctttgactgcagcattagcaattaggaaaaaaaaaaaattaagttccctgcggacatgtaactttgccatcagttttgatgtggaaacactgtgatatataaaatgttgttggacaacagtagttttaagagtaaaatatgaaacgtttaaaaagttccaaaaaaagctagctctgtcctttacttattgagacactttaactttttcctttgtatttccattgtattagataaataaatgtgaatgtaaaattgtataaattactgtacttgaatacttctgtttcccagtgttgcttgctggacattttagtgccttggacttctattgcttctgccattagcatcaacttaccagaccccagatcaataaagggcatgtggaaggaaatcgtaggtccatgtgaccccagcagtccagcagtggttatgccaaagggaaattgaaaaagtatttttttaagtcattcaacaactttgtctagagcaggtgtaagatgagtagggtgggaagttaggttggcatcagtggttaaaaacagaaagttctgtttcgggaatagtgaggagggggtgttgtaacaaaattggacaacttaaaagaatggtgtgtgctgggtgaaagacaaagactaaagaatgaggaaacaaacgtgatgcctggccagtgactgtcatataaacctttcttatttgagctaggcttgaacagacgtgacctagaagaaactgaacataaagagaagggggtggggggctagttttcaagttggggaacctgatagtgaaaagtcacagatggagaaaattgctctcagaaaaactgtttggattgctttcctcttgttgcacatgtaccatgcatttctcagcttggggtactacattttgtggaaagttaatctatctatctttccacatctgaattaatcattctaggaaagaatacttattcctactcatttcctttatgatgtccaaatggttgcaggatcataatctattgtgccacctttatttctagaagtacaactaatatgttcacattttcaaataaataatactccccgtaagtaataactgcaaccaatcagtgttattcagtgctatgcctccttgtaatgggtagttattaattattttcagagctttccggaaatactgtcctaactggctatgtttaggatctttgttatctctgaagacaaagaaagaagctaggactcttaattttggggtgcttcttgactcttagttgggaaactgaaaatatttccaaccttttacccacgtcaatggcatattctgggaatcaccaccaccaccaccactaccacagaaagaggctggaggctcctgtaccctgttcattccttaagggccctgcttcccttagtaagtaagtaagttggtctacggccctaaatatgcaaatgagagctgaaggtttttaaaaggtagaaaggaaaagggcaagggcttccacccctgctttaaaatgatttatttattctctgcttgtatttcttgtggagagagtaaggatagaaccaacaaggggctgagtagctgagaaaggggccacccaagagtgaaacatactttataccagaggagcagtggagcctcatgcagcacattatcatttgttatttgggtttaataataattttgacatcttttcactcatacacaaaaaaagtcagaactggtgttatttactgttgatttcatcctcctgtgtatgaaataacaagcctagaggaatgaactagtgctactgaactgtttaaattatttttgtgttaatagtacactttgagtatctttttccacattaaaaactttctgaattat

SEQ ID NO: 9173 - protein, 2136 aa, Homo sapiens; identical to SEQ ID NO: 9169

SEQ ID NO: 9174 - DNA, 10103 bp, Homo sapiens
ctcctctgccccggggccgccaccgcccgggcgtcggacctggtcccgtgctcgcggtgccgccgccctctgggcctagcccgcccagctcggcgagcggcggcagtgggagccgcgtccgccgcatccgcctcgactcggtgccggcccctggccctcccctcatgactgcggcgcctctgctgccaccgcccgcccggccgccgctcgccgcaggatggatgcggaccgtgcggcgctaacccccgtggctcagctcccgaatcgcccgccttcgagccctcctcgtgagccgcagcagcctcggtgccagcccccgccgcagctgggcccagcggtccgcctgtccctcgttgcggcttgtcggtgctgagtgaggcgtcgtccgggtcggcgcgaacccgcccggccgcggttccctgcagacctctgcgcgggcggctcggcccttcacgcccttttcgttcacgaatccgagcccgctcgcctctctccagcgaaccgaccatgtctggcggcgccgcagagaagcagagcagcactcccggttccctgttcctctcgccgccggctcctgcccccaagaatggctccagctccgattcctccgtgggggagaaactgggagccgcggccgccgacgctgtgaccggcaggaccgaggagtacaggcgccgccgccacactatggacaaggacagccgtggggcggccgcgaccactaccaccactgagcaccgcttcttccgccggagcgtcatctgtgactccaatgccactgcactggagcttcccggccttcctctttccctgccccagcccagcatccccgcggctgtcccgcagagtgctccaccggagccccaccgggaagagaccgtgaccgccaccgccacttcccaggtagcccagcagcctccagccgctgccgcccctggggaacaggccgtcgcgggccctgccccctcgactgtccccagcagtaccagcaaagaccgcccagtgtcccagcctagccttgtggggagcaaagaggagccgccgccggcgagaagtggcagcggcggcggcagcgccaaggagccacaggaggaacggagccagcagcaggatgatatcgaagagctggagaccaaggccgtgggaatgtctaacgatggccgctttctcaagtttgacatcgaaatcggcagaggctcctttaagacggtctacaaaggtctggacactgaaaccaccgtggaagtcgcctggtgtgaactgcaggatcgaaaattaacaaagtctgagaggcagagatttaaagaagaagctgaaatgttaaaaggtcttcagcatcccaatattgttagattttatgattcctgggaatccacagtaaaaggaaagaagtgcattgttttggtgactgaacttatgacgtctggaacacttaaaacgtatctgaaaaggtttaaagtgatgaagatcaaagttctaagaagctggtgccgtcagatccttaaaggtcttcagtttcttcatactcgaactccacctatcattcaccgcgatcttaaatgtgacaacatctttatcaccggccctactggctcagtcaagattggagacctcggtctggcaaccctgaagcgggcttcttttgccaagagtgtgataggtaccccagagttcatggcccctgagatgtatgaggagaaatatgatgaatccgttgacgtttatgcttttgggatgtgcatgcttgagatggctacatctgaatatccttactcggagtgccaaaatgctgcacagatctaccgtcgcgtgaccagtggggtgaagccagccagttttgacaaagtagcaattcctgaagtgaaggaaattattgaaggatgcatacgacaaaacaaagatgaaagatattccatcaaagaccttttgaaccatgccttcttccaagaggaaacaggagtacgggtagaattagcagaagaagatgatggagaaaaaatagccataaaattatggctacgtattgaagatattaagaaattaaagggaaaatacaaagataatgaagctattgagttttcttttgatttagagagagatgtcccagaagatgttgcacaagaaatggtagagtctgggtatgtctgtgaaggtgatcacaagaccatggctaaagctatcaaagacagagtatcattaattaagaggaaacgagagcagcggcagttggtacgggaggagcaagaaaaaaaaaagcaggaagagagcagtctcaaacagcaggtagaacaatccagtgcttcccagacaggaatcaagcagctcccttctgctagcaccggcatacctactgcttctaccacttcagcttcagtttctacacaagtagaacctgaagaacctgaggcagatcaacatcaacaactacagtaccagcaacccagtatatctgtgttatctgatgggacggttgacagtggtcagggatcctctgtcttcacagaatctcgagtgagcagccaacagacagtttcatatggttcccaacatgaacaggcacattctacaggcacagtcccagggcatataccttctactgtccaagcacagtctcagccccatggggtatatccaccctcaagtgtggcacaggggcagagccagggtcagccatcctcaagtagcttaacaggggtttcatcttcccaacccatacaacatcctcagcagcagcagggaatacagcagacagcccctcctcaacagacagtgcagtattcactttcacagacatcaacctccagtgaggccactactgcacagccagtgagtcagcctcaagctccacaagtcttgcctcaagtatcagctggaaaacagcttccagtttcccagccagtaccaactatccaaggcgaacctcagatcccagttgcgacacaaccctcggttgttccagtccactctggtgctcatttccttccagtgggacagccgctccctactcccttgctccctcagtaccctgtctctcagattcccatatcaactcctcatgtgtctacggctcagacaggtttctcatcccttcccatcacaatggcagctggcattactcagcctctgctcacgttggcttcatctgctacaacagctgcgatcccgggggtatcaactgtggttcctagtcagcttccaacccttctgcagcctgtgactcagctgccaagtcaggttcacccacagctcctacaaccagcagttcagtccatgggaataccagctaaccttggacaagctgctgaggttccactttcctctggagatgttctgtaccagggcttcccacctcgactgccaccacagtacccaggagattcaaatattgctccctcttccaacgtggcttctgtttgcatccattctacagtcctatcccctcccatgccgacagaagtactggctacacctgggtactttcccacagtggtgcagccttatgtggaatcaaatcttttagttcctatgggtggtgtaggaggacaggttcaagtgtcccagccaggagggagtttagcacaagcccccactacatcctcccagcaagcagttttggagagtactcagggagtctctcaggttgctcctgcagagccagttgcagtagcacagacccaagctacccagccgaccactttggcttcctctgtagacagtgcacattcagatgttgcttcaggtatgagtgatggcaatgagaacgtcccatcttccagtggaaggcatgaaggaagaactacaaaacggcattaccgaaaatctgtaaggagtcgctctcgacatgaaaaaacttcacgcccaaaattaagaattttgaatgtttcaaataaaggagaccgagtagtagaatgtcaattagagactcataataggaaaatggttacattcaaatttgacctagatggtgacaaccccgaggagatagcaacaattatggtgaacaatgactttattctagcaatagagagagagtcgtttgtggatcaagtgcgagaaattattgaaaaagctgatgaaatgctcagtgaggatgtcagtgtggaaccagagggtgatcagggattggagagtctacaaggaaaggatgactatggcttttcaggttctcagaaattggaaggagagttcaaacaaccaattcctgcgtcttccatgccacagcaaataggcattcctaccagttctttaactcaagttgttcattctgcgggaaggcggtttatagtgagtcctgtgccagaaagccgattacgagaatcaaaagttttccccagtgaaataacagatacagttgctgcctctacagctcagagccctggaatgaacttgtctcactctgcatcatcccttagtctacaacaggccttttctgaacttagacgtgcccaaatgacagaaggacccaacacagcacctccaaactttagtcatacaggaccaacatttccagtagtacctcctttcttaagtagcattgctggagtcccaaccacagcagcagccacagcaccagtccctgcaacaagcagccctcctaatgacatttccacatcagtaattcagtctgaggttacagtgcccactgaagaggggattgctggagttgccaccagcacaggtgtggtaacttcaggtggtctccccataccacctgtgtctgaatcaccagtactttccagcgtagtttcaagtatcacaatacctgcagttgtctcaatatctactacatccccgtcacttcaagtccccacatccacatctgagatcgttgtttctagtacagcactgtatccttcagtaacagtttcagcaacttcagcctctgcagggggcagtactgctaccccaggtcctaagcctccagctgtagtatctcagcaggcagcaggcagcactactgtgggagccacattaacatcagtttctaccaccacttcattcccaagcacagcttcacagctgtgcattcagcttagcagcagtacttctactcctactttagctgaaaccgtggtagttagcgcacactcactagataagacatctcatagcagtacaactggattggctttctccctctctgcaccatcttcctcttcctctcctggagcaggagtgtctagttatatttctcagcctggtgggctgcatcctttggtcattccatcagtgatagcttctactcctattcttccccaagcagcaggacctacttctacacctttattaccccaagtacctagtatcccacccttggtacagcctgttgccaatgtgcctgctgtacagcagacactaattcatagtcagcctcaaccagctttgcttcccaaccagccccatactcattgtcctgaagtagattctgatacacaacccaaagctcctggaattgatgacataaagactctagaagaaaagctgcggtctctgttcagtgaacacagctcatctggagctcagcatgcctctgtctcactggagacctcactagtcatagagagcactgtcacaccaggcatcccaactactgctgttgcaccaagcaaactcctgacttctaccacaagtacttgcttaccaccaaccaatttaccactaggaacagttgctttgccagttacaccagtggtcacacctgggcaagtttctaccccagtcagcactactacatcaggagtgaaacctggaactgctccctccaagccacctctaactaaggctccggtgctgccagtgggtactgaacttccagcaggtactctacccagcgagcagctgccaccttttccaggaccttctctaacccagtcccagcaacctctagaggatcttgatgctcaattgagaagaacacttagtccagagatgatcacagtgacttctgcggttggtcctgtgtccatggcggctccaacagcaatcacagaagcaggaacacagcctcagaagggtgtttctcaagtcaaagaaggccctgtcctagcaactagttcaggagctggtgtttttaagatgggacgatttcaggtttctgttgcagcagacggtgcccagaaagagggtaaaaataagtcagaagatgcaaagtctgttcattttgaatccagcacctcagagtcctcagtgctatcaagtagtagtccagagagtaccttggtgaaaccagagccgaatggcataaccatccctggtatctcttcagatgtgccagagagtgcccacaaaactactgcctcagaggcaaagtcagacactgggcagcctaccaaggttggacgttttcaggtgacaactacagcaaacaaagtgggtcgtttctctgtatcaaaaactgaggacaagatcactgacacaaagaaagaaggaccagtggcatctcctccttttatggatttggaacaagctgttcttcctgctgtgataccaaagaaagagaagcctgaactgtcagagccttcacatctaaatgggccgtcttctgacccggaggccgcttttttaagtagggatgtggatgatggttccggtagtccacactcgccccatcagctgagctcaaagagccttcctagccagaatctaagtcaaagccttagtaattcatttaactcctcttacatgagtagcgacaatgagtcagatatcgaagatgaagacttaaagttagagctgcgacgactacgagataaacatctcaaagagattcaggacctgcagagtcgccagaagcatgaaattgaatctttgtataccaaactgggcaaggtgccccctgctgttattattcccccagctgctcccctttcagggagaagacgacgacccactaaaagcaaaggcagcaaatctagtcgaagcagttccttggggaataaaagcccccagctttcaggtaacctgtctggtcagagtgcagcttcagtcttgcacccccagcagaccctccaccctcctggcaacatcccagagtccgggcagaatcagctgttacagccccttaagccatctccctccagtgacaacctctattcagccttcaccagtgatggtgccatttcagtaccaagcctttctgctccaggtcaaggaaccagcagcacaaacactgttggggcaacagtgaacagccaagccgcccaagctcagcctcctgccatgacgtccagcaggaagggcacattcacagatgacttgcacaagttggtagacaattgggcccgagatgccatgaatctctcaggcaggagaggaagcaaagggcacatgaattacgagggccctggaatggcaaggaagttctctgcacctgggcaactgtgcatctccatgacctcgaacctgggtggctctgcccccatctctgcagcatcagctacctctctaggtcacttcaccaagtctatgtgccccccacagcagtatggctttccagctaccccatttggcgctcaatggagtgggacgggtggcccagcaccacagccacttggccagttccaacctgtgggaactgcctccttgcagaatttcaacatcagcaatttgcagaaatccatcagcaaccccccaggctccaacctgcggaccacttagacctagagacattaactgaatagatctgggggcaggagatggaatgctgagggggtgggtgggggtgggaagtagcctatatactaactactagtgctgcatttaactggttatttcttgccagaggggaatgtttttaatactgcattgagccctcagaatggagagtctcccccgctccagttattggaatgggagaggaaggaaagaacagcttttttgtcaaggggcagcttcagaccatgctttcctgtttatctatactcagtaatgaggatgagggctaggaaagtcttgttcataaggaagctggagaactcaatgtaaaatcaaacccatctgtaatttcgagtgggtggagctcttgcttttggtacatgccctgaatccctcactccctcaagaatccgaaccacaggacaaaaaccacctactgggctctctcctaccctgccctcctcccttttttttacccctctcttttttattttttctttgctctttagaacccagtgaaaaataccagggtactggggtgcaactctttcttatgataggtcattagtgctttaagcaaaagatattagcagctttgactgcagcattagcaattaggaaaaaaaaaaaattaagttccctgcggacatgtaactttgccatcagttttgatgtggaaacactgtgatatataaaatgttgttggacaacagtagttttaagagtaaaatatgaaacgtttaaaaagttccaaaaaaagctagctctgtcctttacttattgagacactttaactttttcctttgtatttccattgtattagataaataaatgtgaatgtaaaattgtataaattactgtacttgaatacttctgtttcccagtgttgcttgctggacattttagtgccttggacttctattgcttctgccattagcatcaacttaccagaccccagatcaataaagggcatgtggaaggaaatcgtaggtccatgtgaccccagcagtccagcagtggttatgccaaagggaaattgaaaaagtatttttttaagtcattcaacaactttgtctagagcaggtgtaagatgagtagggtgggaagttaggttggcatcagtggttaaaaacagaaagttctgtttcgggaatagtgaggagggggtgttgtaacaaaattggacaacttaaaagaatggtgtgtgctgggtgaaagacaaagactaaagaatgaggaaacaaacgtgatgcctggccagtgactgtcatataaacctttcttatttgagctaggcttgaacagacgtgacctagaagaaactgaacataaagagaagggggtggggggctagttttcaagttggggaacctgatagtgaaaagtcacagatggagaaaattgctctcagaaaaactgtttggattgctttcctcttgttgcacatgtaccatgcatttctcagcttggggtactacattttgtggaaagttaatctatctatctttccacatctgaattaatcattctaggaaagaatacttattcctactcatttcctttatgatgtccaaatggttgcaggatcataatctattgtgccacctttatttctagaagtacaactaatatgttcacattttcaaataaataatactccccgtaagtaataactgcaaccaatcagtgttattcagtgctatgcctccttgtaatgggtagttattaattattttcagagctttccggaaatactgtcctaactggctatgtttaggatctttgttatctctgaagacaaagaaagaagctaggactcttaattttggggtgcttcttgactcttagttgggaaactgaaaatatttccaaccttttacccacgtcaatggcatattctgggaatcaccaccaccaccaccactaccacagaaagaggctggaggctcctgtaccctgttcattccttaagggccctgcttcccttagtaagtaagtaagttggtctacggccctaaatatgcaaatgagagctgaaggtttttaaaaggtagaaaggaaaagggcaagggcttccacccctgctttaaaatgatttatttattctctgcttgtatttcttgtggagagagtaaggatagaaccaacaaggggctgagtagctgagaaaggggccacccaagagtgaaacatactttataccagaggagcagtggagcctcatgcagcacattatcatttgttatttgggtttaataataattttgacatcttttcactcatacacaaaaaaagtcagaactggtgttatttactgttgatttcatcctcctgtgtatgaaataacaagcctagaggaatgaactagtgctactgaactgtttaaattatttttgtgttaatagtacactttgagtatctttttccacattaaaaactttctgaattat

SEQ ID NO: 9175 - protein, 2382 aa, Homo sapiens; identical to SEQ ID NO: 9171

SEQ ID NO: 9176 - DNA, 9431 bp, Homo sapiens
ctcctctgccccggggccgccaccgcccgggcgtcggacctggtcccgtgctcgcggtgccgccgccctctgggcctagcccgcccagctcggcgagcggcggcagtgggagccgcgtccgccgcatccgcctcgactcggtgccggcccctggccctcccctcatgactgcggcgcctctgctgccaccgcccgcccggccgccgctcgccgcaggatggatgcggaccgtgcggcgctaacccccgtggctcagctcccgaatcgcccgccttcgagccctcctcgtgagccgcagcagcctcggtgccagcccccgccgcagctgggcccagcggtccgcctgtccctcgttgcggcttgtcggtgctgagtgaggcgtcgtccgggtcggcgcgaacccgcccggccgcggttccctgcagacctctgcgcgggcggctcggcccttcacgcccttttcgttcacgaatccgagcccgctcgcctctctccagcgaaccgaccatgtctggcggcgccgcagagaagcagagcagcactcccggttccctgttcctctcgccgccggctcctgcccccaagaatggctccagctccgattcctccgtgggggagaaactgggagccgcggccgccgacgctgtgaccggcaggaccgaggagtacaggcgccgccgccacactatggacaaggacagccgtggggcggccgcgaccactaccaccactgagcaccgcttcttccgccggagcgtcatctgtgactccaatgccactgcactggagcttcccggccttcctctttccctgccccagcccagcatccccgcggctgtcccgcagagtgctccaccggagccccaccgggaagagaccgtgaccgccaccgccacttcccaggtagcccagcagcctccagccgctgccgcccctggggaacaggccgtcgcgggccctgccccctcgactgtccccagcagtaccagcaaagaccgcccagtgtcccagcctagccttgtggggagcaaagaggagccgccgccggcgagaagtggcagcggcggcggcagcgccaaggagccacaggaggaacggagccagcagcaggatgatatcgaagagctggagaccaaggccgtgggaatgtctaacgatggccgctttctcaagtttgacatcgaaatcggcagaggctcctttaagacggtctacaaaggtctggacactgaaaccaccgtggaagtcgcctggtgtgaactgcaggatcgaaaattaacaaagtctgagaggcagagatttaaagaagaagctgaaatgttaaaaggtcttcagcatcccaatattgttagattttatgattcctgggaatccacagtaaaaggaaagaagtgcattgttttggtgactgaacttatgacgtctggaacacttaaaacgtatctgaaaaggtttaaagtgatgaagatcaaagttctaagaagctggtgccgtcagatccttaaaggtcttcagtttcttcatactcgaactccacctatcattcaccgcgatcttaaatgtgacaacatctttatcaccggccctactggctcagtcaagattggagacctcggtctggcaaccctgaagcgggcttcttttgccaagagtgtgataggtaccccagagttcatggcccctgagatgtatgaggagaaatatgatgaatccgttgacgtttatgcttttgggatgtgcatgcttgagatggctacatctgaatatccttactcggagtgccaaaatgctgcacagatctaccgtcgcgtgaccagtggggtgaagccagccagttttgacaaagtagcaattcctgaagtgaaggaaattattgaaggatgcatacgacaaaacaaagatgaaagatattccatcaaagaccttttgaaccatgccttcttccaagaggaaacaggagtacgggtagaattagcagaagaagatgatggagaaaaaatagccataaaattatggctacgtattgaagatattaagaaattaaagggaaaatacaaagataatgaagctattgagttttcttttgatttagagagagatgtcccagaagatgttgcacaagaaatggtagagtctgggtatgtctgtgaaggtgatcacaagaccatggctaaagctatcaaagacagagtatcattaattaagaggaaacgagagcagcggcagttggtacgggaggagcaagaaaaaaaaaagcaggaagagagcagtctcaaacagcaggtagaacaatccagtgcttcccagacaggaatcaagcagctcccttctgctagcaccggcatacctactgcttctaccacttcagcttcagtttctacacaagtagaacctgaagaacctgaggcagatcaacatcaacaactacagtaccagcaacccagtatatctgtgttatctgatgggacggttgacagtggtcagggatcctctgtcttcacagaatctcgagtgagcagccaacagacagtttcatatggttcccaacatgaacaggcacattctacaggcacagtcccagggcatataccttctactgtccaagcacagtctcagccccatggggtatatccaccctcaagtgtggcacaggggcagagccagggtcagccatcctcaagtagcttaacaggggtttcatcttcccaacccatacaacatcctcagcagcagcagggaatacagcagacagcccctcctcaacagacagtgcagtattcactttcacagacatcaacctccagtgaggccactactgcacagccagtgagtcagcctcaagctccacaagtcttgcctcaagtatcagctggaaaacagagtactcagggagtctctcaggttgctcctgcagagccagttgcagtagcacagacccaagctacccagccgaccactttggcttcctctgtagacagtgcacattcagatgttgcttcaggtatgagtgatggcaatgagaacgtcccatcttccagtggaaggcatgaaggaagaactacaaaacggcattaccgaaaatctgtaaggagtcgctctcgacatgaaaaaacttcacgcccaaaattaagaattttgaatgtttcaaataaaggagaccgagtagtagaatgtcaattagagactcataataggaaaatggttacattcaaatttgacctagatggtgacaaccccgaggagatagcaacaattatggtgaacaatgactttattctagcaatagagagagagtcgtttgtggatcaagtgcgagaaattattgaaaaagctgatgaaatgctcagtgaggatgtcagtgtggaaccagagggtgatcagggattggagagtctacaaggaaaggatgactatggcttttcaggttctcagaaattggaaggagagttcaaacaaccaattcctgcgtcttccatgccacagcaaataggcattcctaccagttctttaactcaagttgttcattctgcgggaaggcggtttatagtgagtcctgtgccagaaagccgattacgagaatcaaaagttttccccagtgaaataacagatacagttgctgcctctacagctcagagccctggaatgaacttgtctcactctgcatcatcccttagtctacaacaggccttttctgaacttagacgtgcccaaatgacagaaggacccaacacagcacctccaaactttagtcatacaggaccaacatttccagtagtacctcctttcttaagtagcattgctggagtcccaaccacagcagcagccacagcaccagtccctgcaacaagcagccctcctaatgacatttccacatcagtaattcagtctgaggttacagtgcccactgaagaggggattgctggagttgccaccagcacaggtgtggtaacttcaggtggtctccccataccacctgtgtctgaatcaccagtactttccagcgtagtttcaagtatcacaatacctgcagttgtctcaatatctactacatccccgtcacttcaagtccccacatccacatctgagatcgttgtttctagtacagcactgtatccttcagtaacagtttcagcaacttcagcctctgcagggggcagtactgctaccccaggtcctaagcctccagctgtagtatctcagcaggcagcaggcagcactactgtgggagccacattaacatcagtttctaccaccacttcattcccaagcacagcttcacagctgtgcattcagcttagcagcagtacttctactcctactttagctgaaaccgtggtagttagcgcacactcactagataagacatctcatagcagtacaactggattggctttctccctctctgcaccatcttcctcttcctctcctggagcaggagtgtctagttatatttctcagcctggtgggctgcatcctttggtcattccatcagtgatagcttctactcctattcttccccaagcagcaggacctacttctacacctttattaccccaagtacctagtatcccacccttggtacagcctgttgccaatgtgcctgctgtacagcagacactaattcatagtcagcctcaaccagctttgcttcccaaccagccccatactcattgtcctgaagtagattctgatacacaacccaaagctcctggaattgatgacataaagactctagaagaaaagctgcggtctctgttcagtgaacacagctcatctggagctcagcatgcctctgtctcactggagacctcactagtcatagagagcactgtcacaccaggcatcccaactactgctgttgcaccaagcaaactcctgacttctaccacaagtacttgcttaccaccaaccaatttaccactaggaacagttgctttgccagttacaccagtggtcacacctgggcaagtttctaccccagtcagcactactacatcaggagtgaaacctggaactgctccctccaagccacctctaactaaggctccggtgctgccagtgggtactgaacttccagcaggtactctacccagcgagcagctgccaccttttccaggaccttctctaacccagtcccagcaacctctagaggatcttgatgctcaattgagaagaacacttagtccagagatgatcacagtgacttctgcggttggtcctgtgtccatggcggctccaacagcaatcacagaagcaggaacacagcctcagaagggtgtttctcaagtcaaagaaggccctgtcctagcaactagttcaggagctggtgtttttaagatgggacgatttcaggtttctgttgcagcagacggtgcccagaaagagggtaaaaataagtcagaagatgcaaagtctgttcattttgaatccagcacctcagagtcctcagtgctatcaagtagtagtccagagagtaccttggtgaaaccagagccgaatggcataaccatccctggtatctcttcagatgtgccagagagtgcccacaaaactactgcctcagaggcaaagtcagacactgggcagcctaccaaggttggacgttttcaggtgacaactacagcaaacaaagtgggtcgtttctctgtatcaaaaactgaggacaagatcactgacacaaagaaagaaggaccagtggcatctcctccttttatggatttggaacaagctgttcttcctgctgtgataccaaagaaagagaagcctgaactgtcagagccttcacatctaaatgggccgtcttctgacccggaggccgcttttttaagtagggatgtggatgatggttccggtagtccacactcgccccatcagctgagctcaaagagccttcctagccagaatctaagtcaaagccttagtaattcatttaactcctcttacatgagtagcgacaatgagtcagatatcgaagatgaagacttaaagttagagctgcgacgactacgagataaacatctcaaagagattcaggacctgcagagtcgccagaagcatgaaattgaatctttgtataccaaactgggcaaggtgccccctgctgttattattcccccagctgctcccctttcagggagaagacgacgacccactaaaagcaaaggcagcaaatctagtcgaagcagttccttggggaataaaagcccccagctttcaggtaacctgtctggtcagagtgcagcttcagtcttgcacccccagcagaccctccaccctcctggcaacatcccagagtccgggcagaatcagctgttacagccccttaagccatctccctccagtgacaacctctattcagccttcaccagtgatggtgccatttcagtaccaagcctttctgctccaggtcaaggaaccagcagcacaaacactgttggggcaacagtgaacagccaagccgcccaagctcagcctcctgccatgacgtccagcaggaagggcacattcacagatgacttgcacaagttggtagacaattgggcccgagatgccatgaatctctcaggcaggagaggaagcaaagggcacatgaattacgagggccctggaatggcaaggaagttctctgcacctgggcaactgtgcatctccatgacctcgaacctgggtggctctgcccccatctctgcagcatcagctacctctctaggtcacttcaccaagtctatgtgccccccacagcagtatggctttccagctaccccatttggcgctcaatggagtgggacgggtggcccagcaccacagccacttggccagttccaacctgtgggaactgcctccttgcagaatttcaacatcagcaatttgcagaaatccatcagcaaccccccaggctccaacctgcggaccacttagacctagagacattaactgaatagatctgggggcaggagatggaatgctgagggggtgggtgggggtgggaagtagcctatatactaactactagtgctgcatttaactggttatttcttgccagaggggaatgtttttaatactgcattgagccctcagaatggagagtctcccccgctccagttattggaatgggagaggaaggaaagaacagcttttttgtcaaggggcagcttcagaccatgctttcctgtttatctatactcagtaatgaggatgagggctaggaaagtcttgttcataaggaagctggagaactcaatgtaaaatcaaacccatctgtaatttcgagtgggtggagctcttgcttttggtacatgccctgaatccctcactccctcaagaatccgaaccacaggacaaaaaccacctactgggctctctcctaccctgccctcctcccttttttttacccctctcttttttattttttctttgctctttagaacccagtgaaaaataccagggtactggggtgcaactctttcttatgataggtcattagtgctttaagcaaaagatattagcagctttgactgcagcattagcaattaggaaaaaaaaaaaattaagttccctgcggacatgtaactttgccatcagttttgatgtggaaacactgtgatatataaaatgttgttggacaacagtagttttaagagtaaaatatgaaacgtttaaaaagttccaaaaaaagctagctctgtcctttacttattgagacactttaactttttcctttgtatttccattgtattagataaataaatgtgaatgtaaaattgtataaattactgtacttgaatacttctgtttcccagtgttgcttgctggacattttagtgccttggacttctattgcttctgccattagcatcaacttaccagaccccagatcaataaagggcatgtggaaggaaatcgtaggtccatgtgaccccagcagtccagcagtggttatgccaaagggaaattgaaaaagtatttttttaagtcattcaacaactttgtctagagcaggtgtaagatgagtagggtgggaagttaggttggcatcagtggttaaaaacagaaagttctgtttcgggaatagtgaggagggggtgttgtaacaaaattggacaacttaaaagaatggtgtgtgctgggtgaaagacaaagactaaagaatgaggaaacaaacgtgatgcctggccagtgactgtcatataaacctttcttatttgagctaggcttgaacagacgtgacctagaagaaactgaacataaagagaagggggtggggggctagttttcaagttggggaacctgatagtgaaaagtcacagatggagaaaattgctctcagaaaaactgtttggattgctttcctcttgttgcacatgtaccatgcatttctcagcttggggtactacattttgtggaaagttaatctatctatctttccacatctgaattaatcattctaggaaagaatacttattcctactcatttcctttatgatgtccaaatggttgcaggatcataatctattgtgccacctttatttctagaagtacaactaatatgttcacattttcaaataaataatactccccgtaagtaataactgcaaccaatcagtgttattcagtgctatgcctccttgtaatgggtagttattaattattttcagagctttccggaaatactgtcctaactggctatgtttaggatctttgttatctctgaagacaaagaaagaagctaggactcttaattttggggtgcttcttgactcttagttgggaaactgaaaatatttccaaccttttacccacgtcaatggcatattctgggaatcaccaccaccaccaccactaccacagaaagaggctggaggctcctgtaccctgttcattccttaagggccctgcttcccttagtaagtaagtaagttggtctacggccctaaatatgcaaatgagagctgaaggtttttaaaaggtagaaaggaaaagggcaagggcttccacccctgctttaaaatgatttatttattctctgcttgtatttcttgtggagagagtaaggatagaaccaacaaggggctgagtagctgagaaaggggccacccaagagtgaaacatactttataccagaggagcagtggagcctcatgcagcacattatcatttgttatttgggtttaataataattttgacatcttttcactcatacacaaaaaaagtcagaactggtgttatttactgttgatttcatcctcctgtgtatgaaataacaagcctagaggaatgaactagtgctactgaactgtttaaattatttttgtgttaatagtacactttgagtatctttttccacattaaaaactttctgaattataaatgttttccttacattatttaacaatgtacactgttaaaaataaaaataaaaattcaaactttg

SEQ ID NO: 9177 - protein, 2136 aa, Homo sapiens; identical to SEQ ID NO: 9169

SEQ ID NO: 9178 - DNA, 10169 bp, Homo sapiens
ctcctctgccccggggccgccaccgcccgggcgtcggacctggtcccgtgctcgcggtgccgccgccctctgggcctagcccgcccagctcggcgagcggcggcagtgggagccgcgtccgccgcatccgcctcgactcggtgccggcccctggccctcccctcatgactgcggcgcctctgctgccaccgcccgcccggccgccgctcgccgcaggatggatgcggaccgtgcggcgctaacccccgtggctcagctcccgaatcgcccgccttcgagccctcctcgtgagccgcagcagcctcggtgccagcccccgccgcagctgggcccagcggtccgcctgtccctcgttgcggcttgtcggtgctgagtgaggcgtcgtccgggtcggcgcgaacccgcccggccgcggttccctgcagacctctgcgcgggcggctcggcccttcacgcccttttcgttcacgaatccgagcccgctcgcctctctccagcgaaccgaccatgtctggcggcgccgcagagaagcagagcagcactcccggttccctgttcctctcgccgccggctcctgcccccaagaatggctccagctccgattcctccgtgggggagaaactgggagccgcggccgccgacgctgtgaccggcaggaccgaggagtacaggcgccgccgccacactatggacaaggacagccgtggggcggccgcgaccactaccaccactgagcaccgcttcttccgccggagcgtcatctgtgactccaatgccactgcactggagcttcccggccttcctctttccctgccccagcccagcatccccgcggctgtcccgcagagtgctccaccggagccccaccgggaagagaccgtgaccgccaccgccacttcccaggtagcccagcagcctccagccgctgccgcccctggggaacaggccgtcgcgggccctgccccctcgactgtccccagcagtaccagcaaagaccgcccagtgtcccagcctagccttgtggggagcaaagaggagccgccgccggcgagaagtggcagcggcggcggcagcgccaaggagccacaggaggaacggagccagcagcaggatgatatcgaagagctggagaccaaggccgtgggaatgtctaacgatggccgctttctcaagtttgacatcgaaatcggcagaggctcctttaagacggtctacaaaggtctggacactgaaaccaccgtggaagtcgcctggtgtgaactgcaggatcgaaaattaacaaagtctgagaggcagagatttaaagaagaagctgaaatgttaaaaggtcttcagcatcccaatattgttagattttatgattcctgggaatccacagtaaaaggaaagaagtgcattgttttggtgactgaacttatgacgtctggaacacttaaaacgtatctgaaaaggtttaaagtgatgaagatcaaagttctaagaagctggtgccgtcagatccttaaaggtcttcagtttcttcatactcgaactccacctatcattcaccgcgatcttaaatgtgacaacatctttatcaccggccctactggctcagtcaagattggagacctcggtctggcaaccctgaagcgggcttcttttgccaagagtgtgataggtaccccagagttcatggcccctgagatgtatgaggagaaatatgatgaatccgttgacgtttatgcttttgggatgtgcatgcttgagatggctacatctgaatatccttactcggagtgccaaaatgctgcacagatctaccgtcgcgtgaccagtggggtgaagccagccagttttgacaaagtagcaattcctgaagtgaaggaaattattgaaggatgcatacgacaaaacaaagatgaaagatattccatcaaagaccttttgaaccatgccttcttccaagaggaaacaggagtacgggtagaattagcagaagaagatgatggagaaaaaatagccataaaattatggctacgtattgaagatattaagaaattaaagggaaaatacaaagataatgaagctattgagttttcttttgatttagagagagatgtcccagaagatgttgcacaagaaatggtagagtctgggtatgtctgtgaaggtgatcacaagaccatggctaaagctatcaaagacagagtatcattaattaagaggaaacgagagcagcggcagttggtacgggaggagcaagaaaaaaaaaagcaggaagagagcagtctcaaacagcaggtagaacaatccagtgcttcccagacaggaatcaagcagctcccttctgctagcaccggcatacctactgcttctaccacttcagcttcagtttctacacaagtagaacctgaagaacctgaggcagatcaacatcaacaactacagtaccagcaacccagtatatctgtgttatctgatgggacggttgacagtggtcagggatcctctgtcttcacagaatctcgagtgagcagccaacagacagtttcatatggttcccaacatgaacaggcacattctacaggcacagtcccagggcatataccttctactgtccaagcacagtctcagccccatggggtatatccaccctcaagtgtggcacaggggcagagccagggtcagccatcctcaagtagcttaacaggggtttcatcttcccaacccatacaacatcctcagcagcagcagggaatacagcagacagcccctcctcaacagacagtgcagtattcactttcacagacatcaacctccagtgaggccactactgcacagccagtgagtcagcctcaagctccacaagtcttgcctcaagtatcagctggaaaacagcttccagtttcccagccagtaccaactatccaaggcgaacctcagatcccagttgcgacacaaccctcggttgttccagtccactctggtgctcatttccttccagtgggacagccgctccctactcccttgctccctcagtaccctgtctctcagattcccatatcaactcctcatgtgtctacggctcagacaggtttctcatcccttcccatcacaatggcagctggcattactcagcctctgctcacgttggcttcatctgctacaacagctgcgatcccgggggtatcaactgtggttcctagtcagcttccaacccttctgcagcctgtgactcagctgccaagtcaggttcacccacagctcctacaaccagcagttcagtccatgggaataccagctaaccttggacaagctgctgaggttccactttcctctggagatgttctgtaccagggcttcccacctcgactgccaccacagtacccaggagattcaaatattgctccctcttccaacgtggcttctgtttgcatccattctacagtcctatcccctcccatgccgacagaagtactggctacacctgggtactttcccacagtggtgcagccttatgtggaatcaaatcttttagttcctatgggtggtgtaggaggacaggttcaagtgtcccagccaggagggagtttagcacaagcccccactacatcctcccagcaagcagttttggagagtactcagggagtctctcaggttgctcctgcagagccagttgcagtagcacagacccaagctacccagccgaccactttggcttcctctgtagacagtgcacattcagatgttgcttcaggtatgagtgatggcaatgagaacgtcccatcttccagtggaaggcatgaaggaagaactacaaaacggcattaccgaaaatctgtaaggagtcgctctcgacatgaaaaaacttcacgcccaaaattaagaattttgaatgtttcaaataaaggagaccgagtagtagaatgtcaattagagactcataataggaaaatggttacattcaaatttgacctagatggtgacaaccccgaggagatagcaacaattatggtgaacaatgactttattctagcaatagagagagagtcgtttgtggatcaagtgcgagaaattattgaaaaagctgatgaaatgctcagtgaggatgtcagtgtggaaccagagggtgatcagggattggagagtctacaaggaaaggatgactatggcttttcaggttctcagaaattggaaggagagttcaaacaaccaattcctgcgtcttccatgccacagcaaataggcattcctaccagttctttaactcaagttgttcattctgcgggaaggcggtttatagtgagtcctgtgccagaaagccgattacgagaatcaaaagttttccccagtgaaataacagatacagttgctgcctctacagctcagagccctggaatgaacttgtctcactctgcatcatcccttagtctacaacaggccttttctgaacttagacgtgcccaaatgacagaaggacccaacacagcacctccaaactttagtcatacaggaccaacatttccagtagtacctcctttcttaagtagcattgctggagtcccaaccacagcagcagccacagcaccagtccctgcaacaagcagccctcctaatgacatttccacatcagtaattcagtctgaggttacagtgcccactgaagaggggattgctggagttgccaccagcacaggtgtggtaacttcaggtggtctccccataccacctgtgtctgaatcaccagtactttccagcgtagtttcaagtatcacaatacctgcagttgtctcaatatctactacatccccgtcacttcaagtccccacatccacatctgagatcgttgtttctagtacagcactgtatccttcagtaacagtttcagcaacttcagcctctgcagggggcagtactgctaccccaggtcctaagcctccagctgtagtatctcagcaggcagcaggcagcactactgtgggagccacattaacatcagtttctaccaccacttcattcccaagcacagcttcacagctgtgcattcagcttagcagcagtacttctactcctactttagctgaaaccgtggtagttagcgcacactcactagataagacatctcatagcagtacaactggattggctttctccctctctgcaccatcttcctcttcctctcctggagcaggagtgtctagttatatttctcagcctggtgggctgcatcctttggtcattccatcagtgatagcttctactcctattcttccccaagcagcaggacctacttctacacctttattaccccaagtacctagtatcccacccttggtacagcctgttgccaatgtgcctgctgtacagcagacactaattcatagtcagcctcaaccagctttgcttcccaaccagccccatactcattgtcctgaagtagattctgatacacaacccaaagctcctggaattgatgacataaagactctagaagaaaagctgcggtctctgttcagtgaacacagctcatctggagctcagcatgcctctgtctcactggagacctcactagtcatagagagcactgtcacaccaggcatcccaactactgctgttgcaccaagcaaactcctgacttctaccacaagtacttgcttaccaccaaccaatttaccactaggaacagttgctttgccagttacaccagtggtcacacctgggcaagtttctaccccagtcagcactactacatcaggagtgaaacctggaactgctccctccaagccacctctaactaaggctccggtgctgccagtgggtactgaacttccagcaggtactctacccagcgagcagctgccaccttttccaggaccttctctaacccagtcccagcaacctctagaggatcttgatgctcaattgagaagaacacttagtccagagatgatcacagtgacttctgcggttggtcctgtgtccatggcggctccaacagcaatcacagaagcaggaacacagcctcagaagggtgtttctcaagtcaaagaaggccctgtcctagcaactagttcaggagctggtgtttttaagatgggacgatttcaggtttctgttgcagcagacggtgcccagaaagagggtaaaaataagtcagaagatgcaaagtctgttcattttgaatccagcacctcagagtcctcagtgctatcaagtagtagtccagagagtaccttggtgaaaccagagccgaatggcataaccatccctggtatctcttcagatgtgccagagagtgcccacaaaactactgcctcagaggcaaagtcagacactgggcagcctaccaaggttggacgttttcaggtgacaactacagcaaacaaagtgggtcgtttctctgtatcaaaaactgaggacaagatcactgacacaaagaaagaaggaccagtggcatctcctccttttatggatttggaacaagctgttcttcctgctgtgataccaaagaaagagaagcctgaactgtcagagccttcacatctaaatgggccgtcttctgacccggaggccgcttttttaagtagggatgtggatgatggttccggtagtccacactcgccccatcagctgagctcaaagagccttcctagccagaatctaagtcaaagccttagtaattcatttaactcctcttacatgagtagcgacaatgagtcagatatcgaagatgaagacttaaagttagagctgcgacgactacgagataaacatctcaaagagattcaggacctgcagagtcgccagaagcatgaaattgaatctttgtataccaaactgggcaaggtgccccctgctgttattattcccccagctgctcccctttcagggagaagacgacgacccactaaaagcaaaggcagcaaatctagtcgaagcagttccttggggaataaaagcccccagctttcaggtaacctgtctggtcagagtgcagcttcagtcttgcacccccagcagaccctccaccctcctggcaacatcccagagtccgggcagaatcagctgttacagccccttaagccatctccctccagtgacaacctctattcagccttcaccagtgatggtgccatttcagtaccaagcctttctgctccaggtcaaggaaccagcagcacaaacactgttggggcaacagtgaacagccaagccgcccaagctcagcctcctgccatgacgtccagcaggaagggcacattcacagatgacttgcacaagttggtagacaattgggcccgagatgccatgaatctctcaggcaggagaggaagcaaagggcacatgaattacgagggccctggaatggcaaggaagttctctgcacctgggcaactgtgcatctccatgacctcgaacctgggtggctctgcccccatctctgcagcatcagctacctctctaggtcacttcaccaagtctatgtgccccccacagcagtatggctttccagctaccccatttggcgctcaatggagtgggacgggtggcccagcaccacagccacttggccagttccaacctgtgggaactgcctccttgcagaatttcaacatcagcaatttgcagaaatccatcagcaaccccccaggctccaacctgcggaccacttagacctagagacattaactgaatagatctgggggcaggagatggaatgctgagggggtgggtgggggtgggaagtagcctatatactaactactagtgctgcatttaactggttatttcttgccagaggggaatgtttttaatactgcattgagccctcagaatggagagtctcccccgctccagttattggaatgggagaggaaggaaagaacagcttttttgtcaaggggcagcttcagaccatgctttcctgtttatctatactcagtaatgaggatgagggctaggaaagtcttgttcataaggaagctggagaactcaatgtaaaatcaaacccatctgtaatttcgagtgggtggagctcttgcttttggtacatgccctgaatccctcactccctcaagaatccgaaccacaggacaaaaaccacctactgggctctctcctaccctgccctcctcccttttttttacccctctcttttttattttttctttgctctttagaacccagtgaaaaataccagggtactggggtgcaactctttcttatgataggtcattagtgctttaagcaaaagatattagcagctttgactgcagcattagcaattaggaaaaaaaaaaaattaagttccctgcggacatgtaactttgccatcagttttgatgtggaaacactgtgatatataaaatgttgttggacaacagtagttttaagagtaaaatatgaaacgtttaaaaagttccaaaaaaagctagctctgtcctttacttattgagacactttaactttttcctttgtatttccattgtattagataaataaatgtgaatgtaaaattgtataaattactgtacttgaatacttctgtttcccagtgttgcttgctggacattttagtgccttggacttctattgcttctgccattagcatcaacttaccagaccccagatcaataaagggcatgtggaaggaaatcgtaggtccatgtgaccccagcagtccagcagtggttatgccaaagggaaattgaaaaagtatttttttaagtcattcaacaactttgtctagagcaggtgtaagatgagtagggtgggaagttaggttggcatcagtggttaaaaacagaaagttctgtttcgggaatagtgaggagggggtgttgtaacaaaattggacaacttaaaagaatggtgtgtgctgggtgaaagacaaagactaaagaatgaggaaacaaacgtgatgcctggccagtgactgtcatataaacctttcttatttgagctaggcttgaacagacgtgacctagaagaaactgaacataaagagaagggggtggggggctagttttcaagttggggaacctgatagtgaaaagtcacagatggagaaaattgctctcagaaaaactgtttggattgctttcctcttgttgcacatgtaccatgcatttctcagcttggggtactacattttgtggaaagttaatctatctatctttccacatctgaattaatcattctaggaaagaatacttattcctactcatttcctttatgatgtccaaatggttgcaggatcataatctattgtgccacctttatttctagaagtacaactaatatgttcacattttcaaataaataatactccccgtaagtaataactgcaaccaatcagtgttattcagtgctatgcctccttgtaatgggtagttattaattattttcagagctttccggaaatactgtcctaactggctatgtttaggatctttgttatctctgaagacaaagaaagaagctaggactcttaattttggggtgcttcttgactcttagttgggaaactgaaaatatttccaaccttttacccacgtcaatggcatattctgggaatcaccaccaccaccaccactaccacagaaagaggctggaggctcctgtaccctgttcattccttaagggccctgcttcccttagtaagtaagtaagttggtctacggccctaaatatgcaaatgagagctgaaggtttttaaaaggtagaaaggaaaagggcaagggcttccacccctgctttaaaatgatttatttattctctgcttgtatttcttgtggagagagtaaggatagaaccaacaaggggctgagtagctgagaaaggggccacccaagagtgaaacatactttataccagaggagcagtggagcctcatgcagcacattatcatttgttatttgggtttaataataattttgacatcttttcactcatacacaaaaaaagtcagaactggtgttatttactgttgatttcatcctcctgtgtatgaaataacaagcctagaggaatgaactagtgctactgaactgtttaaattatttttgtgttaatagtacactttgagtatctttttccacattaaaaactttctgaattataaatgttttccttacattatttaacaatgtacactgttaaaaataaaaataaaaattcaaactttg

SEQ ID NO: 9179 - protein, 2382 aa, Homo sapiens; identical to SEQ ID NO: 9171

SEQ ID NO: 9180 - DNA, 10315 bp, Homo sapiens
ctcctctgccccggggccgccaccgcccgggcgtcggacctggtcccgtgctcgcggtgccgccgccctctgggcctagcccgcccagctcggcgagcggcggcagtgggagccgcgtccgccgcatccgcctcgactcggtgccggcccctggccctcccctcatgactgcggcgcctctgctgccaccgcccgcccggccgccgctcgccgcaggatggatgcggaccgtgcggcgctaacccccgtggctcagctcccgaatcgcccgccttcgagccctcctcgtgagccgcagcagcctcggtgccagcccccgccgcagctgggcccagcggtccgcctgtccctcgttgcggcttgtcggtgctgagtgaggcgtcgtccgggtcggcgcgaacccgcccggccgcggttccctgcagacctctgcgcgggcggctcggcccttcacgcccttttcgttcacgaatccgagcccgctcgcctctctccagcgaaccgaccatgtctggcggcgccgcagagaagcagagcagcactcccggttccctgttcctctcgccgccggctcctgcccccaagaatggctccagctccgattcctccgtgggggagaaactgggagccgcggccgccgacgctgtgaccggcaggaccgaggagtacaggcgccgccgccacactatggacaaggacagccgtggggcggccgcgaccactaccaccactgagcaccgcttcttccgccggagcgtcatctgtgactccaatgccactgcactggagcttcccggccttcctctttccctgccccagcccagcatccccgcggctgtcccgcagagtgctccaccggagccccaccgggaagagaccgtgaccgccaccgccacttcccaggtagcccagcagcctccagccgctgccgcccctggggaacaggccgtcgcgggccctgccccctcgactgtccccagcagtaccagcaaagaccgcccagtgtcccagcctagccttgtggggagcaaagaggagccgccgccggcgagaagtggcagcggcggcggcagcgccaaggagccacaggaggaacggagccagcagcaggatgatatcgaagagctggagaccaaggccgtgggaatgtctaacgatggccgctttctcaagtttgacatcgaaatcggcagaggctcctttaagacggtctacaaaggtctggacactgaaaccaccgtggaagtcgcctggtgtgaactgcaggatcgaaaattaacaaagtctgagaggcagagatttaaagaagaagctgaaatgttaaaaggtcttcagcatcccaatattgttagattttatgattcctgggaatccacagtaaaaggaaagaagtgcattgttttggtgactgaacttatgacgtctggaacacttaaaacgtatctgaaaaggtttaaagtgatgaagatcaaagttctaagaagctggtgccgtcagatccttaaaggtcttcagtttcttcatactcgaactccacctatcattcaccgcgatcttaaatgtgacaacatctttatcaccggccctactggctcagtcaagattggagacctcggtctggcaaccctgaagcgggcttcttttgccaagagtgtgataggtaccccagagttcatggcccctgagatgtatgaggagaaatatgatgaatccgttgacgtttatgcttttgggatgtgcatgcttgagatggctacatctgaatatccttactcggagtgccaaaatgctgcacagatctaccgtcgcgtgaccagtggggtgaagccagccagttttgacaaagtagcaattcctgaagtgaaggaaattattgaaggatgcatacgacaaaacaaagatgaaagatattccatcaaagaccttttgaaccatgccttcttccaagaggaaacaggagtacgggtagaattagcagaagaagatgatggagaaaaaatagccataaaattatggctacgtattgaagatattaagaaattaaagggaaaatacaaagataatgaagctattgagttttcttttgatttagagagagatgtcccagaagatgttgcacaagaaatggtagagtctgggtatgtctgtgaaggtgatcacaagaccatggctaaagctatcaaagacagagtatcattaattaagaggaaacgagagcagcggcagttggtacgggaggagcaagaaaaaaaaaagcaggaagagagcagtctcaaacagcaggtagaacaatccagtgcttcccagacaggaatcaagcagctcccttctgctagcaccggcatacctactgcttctaccacttcagcttcagtttctacacaagtagaacctgaagaacctgaggcagatcaacatcaacaactacagtaccagcaacccagtatatctgtgttatctgatgggacggttgacagtggtcagggatcctctgtcttcacagaatctcgagtgagcagccaacagacagtttcatatggttcccaacatgaacaggcacattctacaggcacagtcccagggcatataccttctactgtccaagcacagtctcagccccatggggtatatccaccctcaagtgtggcacaggggcagagccagggtcagccatcctcaagtagcttaacaggggtttcatcttcccaacccatacaacatcctcagcagcagcagggaatacagcagacagcccctcctcaacagacagtgcagtattcactttcacagacatcaacctccagtgaggccactactgcacagccagtgagtcagcctcaagctccacaagtcttgcctcaagtatcagctggaaaacagcttccagtttcccagccagtaccaactatccaaggcgaacctcagatcccagttgcgacacaaccctcggttgttccagtccactctggtgctcatttccttccagtgggacagccgctccctactcccttgctccctcagtaccctgtctctcagattcccatatcaactcctcatgtgtctacggctcagacaggtttctcatcccttcccatcacaatggcagctggcattactcagcctctgctcacgttggcttcatctgctacaacagctgcgatcccgggggtatcaactgtggttcctagtcagcttccaacccttctgcagcctgtgactcagctgccaagtcaggttcacccacagctcctacaaccagcagttcagtccatgggaataccagctaaccttggacaagctgctgaggttccactttcctctggagatgttctgtaccagggcttcccacctcgactgccaccacagtacccaggagattcaaatattgctccctcttccaacgtggcttctgtttgcatccattctacagtcctatcccctcccatgccgacagaagtactggctacacctgggtactttcccacagtggtgcagccttatgtggaatcaaatcttttagttcctatgggtggtgtaggaggacaggttcaagtgtcccagccaggagggagtttagcacaagcccccactacatcctcccagcaagcagttttggagagtactcagggagtctctcaggttgctcctgcagagccagttgcagtagcacagacccaagctacccagccgaccactttggcttcctctgtagacagtgcacattcagatgttgcttcaggtatgagtgatggcaatgagaacgtcccatcttccagtggaaggcatgaaggaagaactacaaaacggcattaccgaaaatctgtaaggagtcgctctcgacatgaaaaaacttcacgcccaaaattaagaattttgaatgtttcaaataaaggagaccgagtagtagaatgtcaattagagactcataataggaaaatggttacattcaaatttgacctagatggtgacaaccccgaggagatagcaacaattatggtgaacaatgactttattctagcaatagagagagagtcgtttgtggatcaagtgcgagaaattattgaaaaagctgatgaaatgctcagtgaggatgtcagtgtggaaccagagggtgatcagggattggagagtctacaaggaaaggatgactatggcttttcaggttctcagaaattggaaggagagttcaaacaaccaattcctgcgtcttccatgccacagcaaataggcattcctaccagttctttaactcaagttgttcattctgcgggaaggcggtttatagtgagtcctgtgccagaaagccgattacgagaatcaaaagttttccccagtgaaataacagatacagttgctgcctctacagctcagagccctggaatgaacttgtctcactctgcatcatcccttagtctacaacaggccttttctgaacttagacgtgcccaaatgacagaaggacccaacacagcacctccaaactttagtcatacaggaccaacatttccagtagtacctcctttcttaagtagcattgctggagtcccaaccacagcagcagccacagcaccagtccctgcaacaagcagccctcctaatgacatttccacatcagtaattcagtctgaggttacagtgcccactgaagaggggattgctggagttgccaccagcacaggtgtggtaacttcaggtggtctccccataccacctgtgtctgaatcaccagtactttccagcgtagtttcaagtatcacaatacctgcagttgtctcaatatctactacatccccgtcacttcaagtccccacatccacatctgagatcgttgtttctagtacagcactgtatccttcagtaacagtttcagcaacttcagcctctgcagggggcagtactgctaccccaggtcctaagcctccagctgtagtatctcagcaggcagcaggcagcactactgtgggagccacattaacatcagtttctaccaccacttcattcccaagcacagcttcacagctgtgcattcagcttagcagcagtacttctactcctactttagctgaaaccgtggtagttagcgcacactcactagataagacatctcatagcagtacaactggattggctttctccctctctgcaccatcttcctcttcctctcctggagcaggagtgtctagttatatttctcagcctggtgggctgcatcctttggtcattccatcagtgatagcttctactcctattcttccccaagcagcaggacctacttctacacctttattaccccaagtacctagtatcccacccttggtacagcctgttgccaatgtgcctgctgtacagcagacactaattcatagtcagcctcaaccagctttgcttcccaaccagccccatactcattgtcctgaagtagattctgatacacaacccaaagctcctggaattgatgacataaagactctagaagaaaagctgcggtctctgttcagtgaacacagctcatctggagctcagcatgcctctgtctcactggagacctcactagtcatagagagcactgtcacaccaggcatcccaactactgctgttgcaccaagcaaactcctgacttctaccacaagtacttgcttaccaccaaccaatttaccactaggaacagttgctttgccagttacaccagtggtcacacctgggcaagtttctaccccagtcagcactactacatcaggagtgaaacctggaactgctccctccaagccacctctaactaaggctccggtgctgccagtgggtactgaacttccagcaggtactctacccagcgagcagctgccaccttttccaggaccttctctaacccagtcccagcaacctctagaggatcttgatgctcaattgagaagaacacttagtccagagatgatcacagtgacttctgcggttggtcctgtgtccatggcggctccaacagcaatcacagaagcaggaacacagcctcagaagggtgtttctcaagtcaaagaaggccctgtcctagcaactagttcaggagctggtgtttttaagatgggacgatttcaggtttctgttgcagcagacggtgcccagaaagagggtaaaaataagtcagaagatgcaaagtctgttcattttgaatccagcacctcagagtcctcagtgctatcaagtagtagtccagagagtaccttggtgaaaccagagccgaatggcataaccatccctggtatctcttcagatgtgccagagagtgcccacaaaactactgcctcagaggcaaagtcagacactgggcagcctaccaaggttggacgttttcaggtgacaactacagcaaacaaagtgggtcgtttctctgtatcaaaaactgaggacaagatcactgacacaaagaaagaaggaccagtggcatctcctccttttatggatttggaacaagctgttcttcctgctgtgataccaaagaaagagaagcctgaactgtcagagccttcacatctaaatgggccgtcttctgacccggaggccgcttttttaagtagggatgtggatgatggttccggtagtccacactcgccccatcagctgagctcaaagagccttcctagccagaatctaagtcaaagccttagtaattcatttaactcctcttacatgagtagcgacaatgagtcagatatcgaagatgaagacttaaagttagagctgcgacgactacgagataaacatctcaaagagattcaggacctgcagagtcgccagaagcatgaaattgaatctttgtataccaaactgggcaaggtgccccctgctgttattattcccccagctgctcccctttcagggagaagacgacgacccactaaaagcaaaggcagcaaatctagtcgaagcagttccttggggaataaaagcccccagctttcaggtaacctgtctggtcagagtgcagcttcagtcttgcacccccagcagaccctccaccctcctggcaacatcccagagtccgggcagaatcagctgttacagccccttaagccatctccctccagtgacaacctctattcagccttcaccagtgatggtgccatttcagtaccaagcctttctgctccaggtcaaggaaccagcagcacaaacactgttggggcaacagtgaacagccaagccgcccaagctcagcctcctgccatgacgtccagcaggaagggcacattcacagatgacttgcacaagttggtagacaattgggcccgagatgccatgaatctctcaggcaggagaggaagcaaagggcacatgaattacgagggccctggaatggcaaggaagttctctgcacctgggcaactgtgcatctccatgacctcgaacctgggtggctctgcccccatctctgcagcatcagctacctctctaggtcacttcaccaagtctatgtgccccccacagcagtatggctttccagctaccccatttggcgctcaatggagtgggacgggtggcccagcaccacagccacttggccagttccaacctgtgggaactgcctccttgcagaatttcaacatcagcaatttgcagaaatccatcagcaaccccccaggctccaacctgcggaccacttagacctagagacattaactgaatagatctgggggcaggagatggaatgctgagggggtgggtgggggtgggaagtagcctatatactaactactagtgctgcatttaactggttatttcttgccagaggggaatgtttttaatactgcattgagccctcagaatggagagtctcccccgctccagttattggaatgggagaggaaggaaagaacagcttttttgtcaaggggcagcttcagaccatgctttcctgtttatctatactcagtaatgaggatgagggctaggaaagtcttgttcataaggaagctggagaactcaatgtaaaatcaaacccatctgtaatttcgagtgggtggagctcttgcttttggtacatgccctgaatccctcactccctcaagaatccgaaccacaggacaaaaaccacctactgggctctctcctaccctgccctcctcccttttttttacccctctcttttttattttttctttgctctttagaacccagtgaaaaataccagggtactggggtgcaactctttcttatgataggtcattagtgctttaagcaaaagatattagcagctttgactgcagcattagcaattaggaaaaaaaaaaaattaagttccctgcggacatgtaactttgccatcagttttgatgtggaaacactgtgatatataaaatgttgttggacaacagtagttttaagagtaaaatatgaaacgtttaaaaagttccaaaaaaagctagctctgtcctttacttattgagacactttaactttttcctttgtatttccattgtattagataaataaatgtgaatgtaaaattgtataaattactgtacttgaatacttctgtttcccagtgttgcttgctggacattttagtgccttggacttctattgcttctgccattagcatcaacttaccagaccccagatcaataaagggcatgtggaaggaaatcgtaggtccatgtgaccccagcagtccagcagtggttatgccaaagggaaattgaaaaagtatttttttaagtcattcaacaactttgtctagagcaggtgtaagatgagtagggtgggaagttaggttggcatcagtggttaaaaacagaaagttctgtttcgggaatagtgaggagggggtgttgtaacaaaattggacaacttaaaagaatggtgtgtgctgggtgaaagacaaagactaaagaatgaggaaacaaacgtgatgcctggccagtgactgtcatataaacctttcttatttgagctaggcttgaacagacgtgacctagaagaaactgaacataaagagaagggggtggggggctagttttcaagttggggaacctgatagtgaaaagtcacagatggagaaaattgctctcagaaaaactgtttggattgctttcctcttgttgcacatgtaccatgcatttctcagcttggggtactacattttgtggaaagttaatctatctatctttccacatctgaattaatcattctaggaaagaatacttattcctactcatttcctttatgatgtccaaatggttgcaggatcataatctattgtgccacctttatttctagaagtacaactaatatgttcacattttcaaataaataatactccccgtaagtaataactgcaaccaatcagtgttattcagtgctatgcctccttgtaatgggtagttattaattattttcagagctttccggaaatactgtcctaactggctatgtttaggatctttgttatctctgaagacaaagaaagaagctaggactcttaattttggggtgcttcttgactcttagttgggaaactgaaaatatttccaaccttttacccacgtcaatggcatattctgggaatcaccaccaccaccaccactaccacagaaagaggctggaggctcctgtaccctgttcattccttaagggccctgcttcccttagtaagtaagtaagttggtctacggccctaaatatgcaaatgagagctgaaggtttttaaaaggtagaaaggaaaagggcaagggcttccacccctgctttaaaatgatttatttattctctgcttgtatttcttgtggagagagtaaggatagaaccaacaaggggctgagtagctgagaaaggggccacccaagagtgaaacatactttataccagaggagcagtggagcctcatgcagcacattatcatttgttatttgggtttaataataattttgacatcttttcactcatacacaaaaaaagtcagaactggtgttatttactgttgatttcatcctcctgtgtatgaaataacaagcctagaggaatgaactagtgctactgaactgtttaaattatttttgtgttaatagtacactttgagtatctttttccacattaaaaactttctgaattataaatgttttccttacattatttaacaatgtacactgttaaaaataaaaataaaaattcaaactttgggggtttctcagcagccgttaattgtacattttgcactaactctgggtgttgcgcttcttgtaagattgcgctttgtgcttcagtttgttacctttgtagacttatttaatgaaaccattcaaataaaccaaacttgcttttgttg

SEQ ID NO: 9181 - protein, 2382 aa, Homo sapiens; identical to SEQ ID NO: 9171

SEQ ID NO: 9182 - DNA, 9577 bp, Homo sapiens
ctcctctgccccggggccgccaccgcccgggcgtcggacctggtcccgtgctcgcggtgccgccgccctctgggcctagcccgcccagctcggcgagcggcggcagtgggagccgcgtccgccgcatccgcctcgactcggtgccggcccctggccctcccctcatgactgcggcgcctctgctgccaccgcccgcccggccgccgctcgccgcaggatggatgcggaccgtgcggcgctaacccccgtggctcagctcccgaatcgcccgccttcgagccctcctcgtgagccgcagcagcctcggtgccagcccccgccgcagctgggcccagcggtccgcctgtccctcgttgcggcttgtcggtgctgagtgaggcgtcgtccgggtcggcgcgaacccgcccggccgcggttccctgcagacctctgcgcgggcggctcggcccttcacgcccttttcgttcacgaatccgagcccgctcgcctctctccagcgaaccgaccatgtctggcggcgccgcagagaagcagagcagcactcccggttccctgttcctctcgccgccggctcctgcccccaagaatggctccagctccgattcctccgtgggggagaaactgggagccgcggccgccgacgctgtgaccggcaggaccgaggagtacaggcgccgccgccacactatggacaaggacagccgtggggcggccgcgaccactaccaccactgagcaccgcttcttccgccggagcgtcatctgtgactccaatgccactgcactggagcttcccggccttcctctttccctgccccagcccagcatccccgcggctgtcccgcagagtgctccaccggagccccaccgggaagagaccgtgaccgccaccgccacttcccaggtagcccagcagcctccagccgctgccgcccctggggaacaggccgtcgcgggccctgccccctcgactgtccccagcagtaccagcaaagaccgcccagtgtcccagcctagccttgtggggagcaaagaggagccgccgccggcgagaagtggcagcggcggcggcagcgccaaggagccacaggaggaacggagccagcagcaggatgatatcgaagagctggagaccaaggccgtgggaatgtctaacgatggccgctttctcaagtttgacatcgaaatcggcagaggctcctttaagacggtctacaaaggtctggacactgaaaccaccgtggaagtcgcctggtgtgaactgcaggatcgaaaattaacaaagtctgagaggcagagatttaaagaagaagctgaaatgttaaaaggtcttcagcatcccaatattgttagattttatgattcctgggaatccacagtaaaaggaaagaagtgcattgttttggtgactgaacttatgacgtctggaacacttaaaacgtatctgaaaaggtttaaagtgatgaagatcaaagttctaagaagctggtgccgtcagatccttaaaggtcttcagtttcttcatactcgaactccacctatcattcaccgcgatcttaaatgtgacaacatctttatcaccggccctactggctcagtcaagattggagacctcggtctggcaaccctgaagcgggcttcttttgccaagagtgtgataggtaccccagagttcatggcccctgagatgtatgaggagaaatatgatgaatccgttgacgtttatgcttttgggatgtgcatgcttgagatggctacatctgaatatccttactcggagtgccaaaatgctgcacagatctaccgtcgcgtgaccagtggggtgaagccagccagttttgacaaagtagcaattcctgaagtgaaggaaattattgaaggatgcatacgacaaaacaaagatgaaagatattccatcaaagaccttttgaaccatgccttcttccaagaggaaacaggagtacgggtagaattagcagaagaagatgatggagaaaaaatagccataaaattatggctacgtattgaagatattaagaaattaaagggaaaatacaaagataatgaagctattgagttttcttttgatttagagagagatgtcccagaagatgttgcacaagaaatggtagagtctgggtatgtctgtgaaggtgatcacaagaccatggctaaagctatcaaagacagagtatcattaattaagaggaaacgagagcagcggcagttggtacgggaggagcaagaaaaaaaaaagcaggaagagagcagtctcaaacagcaggtagaacaatccagtgcttcccagacaggaatcaagcagctcccttctgctagcaccggcatacctactgcttctaccacttcagcttcagtttctacacaagtagaacctgaagaacctgaggcagatcaacatcaacaactacagtaccagcaacccagtatatctgtgttatctgatgggacggttgacagtggtcagggatcctctgtcttcacagaatctcgagtgagcagccaacagacagtttcatatggttcccaacatgaacaggcacattctacaggcacagtcccagggcatataccttctactgtccaagcacagtctcagccccatggggtatatccaccctcaagtgtggcacaggggcagagccagggtcagccatcctcaagtagcttaacaggggtttcatcttcccaacccatacaacatcctcagcagcagcagggaatacagcagacagcccctcctcaacagacagtgcagtattcactttcacagacatcaacctccagtgaggccactactgcacagccagtgagtcagcctcaagctccacaagtcttgcctcaagtatcagctggaaaacagagtactcagggagtctctcaggttgctcctgcagagccagttgcagtagcacagacccaagctacccagccgaccactttggcttcctctgtagacagtgcacattcagatgttgcttcaggtatgagtgatggcaatgagaacgtcccatcttccagtggaaggcatgaaggaagaactacaaaacggcattaccgaaaatctgtaaggagtcgctctcgacatgaaaaaacttcacgcccaaaattaagaattttgaatgtttcaaataaaggagaccgagtagtagaatgtcaattagagactcataataggaaaatggttacattcaaatttgacctagatggtgacaaccccgaggagatagcaacaattatggtgaacaatgactttattctagcaatagagagagagtcgtttgtggatcaagtgcgagaaattattgaaaaagctgatgaaatgctcagtgaggatgtcagtgtggaaccagagggtgatcagggattggagagtctacaaggaaaggatgactatggcttttcaggttctcagaaattggaaggagagttcaaacaaccaattcctgcgtcttccatgccacagcaaataggcattcctaccagttctttaactcaagttgttcattctgcgggaaggcggtttatagtgagtcctgtgccagaaagccgattacgagaatcaaaagttttccccagtgaaataacagatacagttgctgcctctacagctcagagccctggaatgaacttgtctcactctgcatcatcccttagtctacaacaggccttttctgaacttagacgtgcccaaatgacagaaggacccaacacagcacctccaaactttagtcatacaggaccaacatttccagtagtacctcctttcttaagtagcattgctggagtcccaaccacagcagcagccacagcaccagtccctgcaacaagcagccctcctaatgacatttccacatcagtaattcagtctgaggttacagtgcccactgaagaggggattgctggagttgccaccagcacaggtgtggtaacttcaggtggtctccccataccacctgtgtctgaatcaccagtactttccagcgtagtttcaagtatcacaatacctgcagttgtctcaatatctactacatccccgtcacttcaagtccccacatccacatctgagatcgttgtttctagtacagcactgtatccttcagtaacagtttcagcaacttcagcctctgcagggggcagtactgctaccccaggtcctaagcctccagctgtagtatctcagcaggcagcaggcagcactactgtgggagccacattaacatcagtttctaccaccacttcattcccaagcacagcttcacagctgtgcattcagcttagcagcagtacttctactcctactttagctgaaaccgtggtagttagcgcacactcactagataagacatctcatagcagtacaactggattggctttctccctctctgcaccatcttcctcttcctctcctggagcaggagtgtctagttatatttctcagcctggtgggctgcatcctttggtcattccatcagtgatagcttctactcctattcttccccaagcagcaggacctacttctacacctttattaccccaagtacctagtatcccacccttggtacagcctgttgccaatgtgcctgctgtacagcagacactaattcatagtcagcctcaaccagctttgcttcccaaccagccccatactcattgtcctgaagtagattctgatacacaacccaaagctcctggaattgatgacataaagactctagaagaaaagctgcggtctctgttcagtgaacacagctcatctggagctcagcatgcctctgtctcactggagacctcactagtcatagagagcactgtcacaccaggcatcccaactactgctgttgcaccaagcaaactcctgacttctaccacaagtacttgcttaccaccaaccaatttaccactaggaacagttgctttgccagttacaccagtggtcacacctgggcaagtttctaccccagtcagcactactacatcaggagtgaaacctggaactgctccctccaagccacctctaactaaggctccggtgctgccagtgggtactgaacttccagcaggtactctacccagcgagcagctgccaccttttccaggaccttctctaacccagtcccagcaacctctagaggatcttgatgctcaattgagaagaacacttagtccagagatgatcacagtgacttctgcggttggtcctgtgtccatggcggctccaacagcaatcacagaagcaggaacacagcctcagaagggtgtttctcaagtcaaagaaggccctgtcctagcaactagttcaggagctggtgtttttaagatgggacgatttcaggtttctgttgcagcagacggtgcccagaaagagggtaaaaataagtcagaagatgcaaagtctgttcattttgaatccagcacctcagagtcctcagtgctatcaagtagtagtccagagagtaccttggtgaaaccagagccgaatggcataaccatccctggtatctcttcagatgtgccagagagtgcccacaaaactactgcctcagaggcaaagtcagacactgggcagcctaccaaggttggacgttttcaggtgacaactacagcaaacaaagtgggtcgtttctctgtatcaaaaactgaggacaagatcactgacacaaagaaagaaggaccagtggcatctcctccttttatggatttggaacaagctgttcttcctgctgtgataccaaagaaagagaagcctgaactgtcagagccttcacatctaaatgggccgtcttctgacccggaggccgcttttttaagtagggatgtggatgatggttccggtagtccacactcgccccatcagctgagctcaaagagccttcctagccagaatctaagtcaaagccttagtaattcatttaactcctcttacatgagtagcgacaatgagtcagatatcgaagatgaagacttaaagttagagctgcgacgactacgagataaacatctcaaagagattcaggacctgcagagtcgccagaagcatgaaattgaatctttgtataccaaactgggcaaggtgccccctgctgttattattcccccagctgctcccctttcagggagaagacgacgacccactaaaagcaaaggcagcaaatctagtcgaagcagttccttggggaataaaagcccccagctttcaggtaacctgtctggtcagagtgcagcttcagtcttgcacccccagcagaccctccaccctcctggcaacatcccagagtccgggcagaatcagctgttacagccccttaagccatctccctccagtgacaacctctattcagccttcaccagtgatggtgccatttcagtaccaagcctttctgctccaggtcaaggaaccagcagcacaaacactgttggggcaacagtgaacagccaagccgcccaagctcagcctcctgccatgacgtccagcaggaagggcacattcacagatgacttgcacaagttggtagacaattgggcccgagatgccatgaatctctcaggcaggagaggaagcaaagggcacatgaattacgagggccctggaatggcaaggaagttctctgcacctgggcaactgtgcatctccatgacctcgaacctgggtggctctgcccccatctctgcagcatcagctacctctctaggtcacttcaccaagtctatgtgccccccacagcagtatggctttccagctaccccatttggcgctcaatggagtgggacgggtggcccagcaccacagccacttggccagttccaacctgtgggaactgcctccttgcagaatttcaacatcagcaatttgcagaaatccatcagcaaccccccaggctccaacctgcggaccacttagacctagagacattaactgaatagatctgggggcaggagatggaatgctgagggggtgggtgggggtgggaagtagcctatatactaactactagtgctgcatttaactggttatttcttgccagaggggaatgtttttaatactgcattgagccctcagaatggagagtctcccccgctccagttattggaatgggagaggaaggaaagaacagcttttttgtcaaggggcagcttcagaccatgctttcctgtttatctatactcagtaatgaggatgagggctaggaaagtcttgttcataaggaagctggagaactcaatgtaaaatcaaacccatctgtaatttcgagtgggtggagctcttgcttttggtacatgccctgaatccctcactccctcaagaatccgaaccacaggacaaaaaccacctactgggctctctcctaccctgccctcctcccttttttttacccctctcttttttattttttctttgctctttagaacccagtgaaaaataccagggtactggggtgcaactctttcttatgataggtcattagtgctttaagcaaaagatattagcagctttgactgcagcattagcaattaggaaaaaaaaaaaattaagttccctgcggacatgtaactttgccatcagttttgatgtggaaacactgtgatatataaaatgttgttggacaacagtagttttaagagtaaaatatgaaacgtttaaaaagttccaaaaaaagctagctctgtcctttacttattgagacactttaactttttcctttgtatttccattgtattagataaataaatgtgaatgtaaaattgtataaattactgtacttgaatacttctgtttcccagtgttgcttgctggacattttagtgccttggacttctattgcttctgccattagcatcaacttaccagaccccagatcaataaagggcatgtggaaggaaatcgtaggtccatgtgaccccagcagtccagcagtggttatgccaaagggaaattgaaaaagtatttttttaagtcattcaacaactttgtctagagcaggtgtaagatgagtagggtgggaagttaggttggcatcagtggttaaaaacagaaagttctgtttcgggaatagtgaggagggggtgttgtaacaaaattggacaacttaaaagaatggtgtgtgctgggtgaaagacaaagactaaagaatgaggaaacaaacgtgatgcctggccagtgactgtcatataaacctttcttatttgagctaggcttgaacagacgtgacctagaagaaactgaacataaagagaagggggtggggggctagttttcaagttggggaacctgatagtgaaaagtcacagatggagaaaattgctctcagaaaaactgtttggattgctttcctcttgttgcacatgtaccatgcatttctcagcttggggtactacattttgtggaaagttaatctatctatctttccacatctgaattaatcattctaggaaagaatacttattcctactcatttcctttatgatgtccaaatggttgcaggatcataatctattgtgccacctttatttctagaagtacaactaatatgttcacattttcaaataaataatactccccgtaagtaataactgcaaccaatcagtgttattcagtgctatgcctccttgtaatgggtagttattaattattttcagagctttccggaaatactgtcctaactggctatgtttaggatctttgttatctctgaagacaaagaaagaagctaggactcttaattttggggtgcttcttgactcttagttgggaaactgaaaatatttccaaccttttacccacgtcaatggcatattctgggaatcaccaccaccaccaccactaccacagaaagaggctggaggctcctgtaccctgttcattccttaagggccctgcttcccttagtaagtaagtaagttggtctacggccctaaatatgcaaatgagagctgaaggtttttaaaaggtagaaaggaaaagggcaagggcttccacccctgctttaaaatgatttatttattctctgcttgtatttcttgtggagagagtaaggatagaaccaacaaggggctgagtagctgagaaaggggccacccaagagtgaaacatactttataccagaggagcagtggagcctcatgcagcacattatcatttgttatttgggtttaataataattttgacatcttttcactcatacacaaaaaaagtcagaactggtgttatttactgttgatttcatcctcctgtgtatgaaataacaagcctagaggaatgaactagtgctactgaactgtttaaattatttttgtgttaatagtacactttgagtatctttttccacattaaaaactttctgaattataaatgttttccttacattatttaacaatgtacactgttaaaaataaaaataaaaattcaaactttgggggtttctcagcagccgttaattgtacattttgcactaactctgggtgttgcgcttcttgtaagattgcgctttgtgcttcagtttgttacctttgtagacttatttaatgaaaccattcaaataaaccaaacttgcttttgttg

SEQ ID NO: 9183 - protein, 2136 aa, Homo sapiens; identical to SEQ ID NO: 9169

SEQ ID NO: 9184 - DNA, 11588 bp, Homo sapiens
ctcctctgccccggggccgccaccgcccgggcgtcggacctggtcccgtgctcgcggtgccgccgccctctgggcctagcccgcccagctcggcgagcggcggcagtgggagccgcgtccgccgcatccgcctcgactcggtgccggcccctggccctcccctcatgactgcggcgcctctgctgccaccgcccgcccggccgccgctcgccgcaggatggatgcggaccgtgcggcgctaacccccgtggctcagctcccgaatcgcccgccttcgagccctcctcgtgagccgcagcagcctcggtgccagcccccgccgcagctgggcccagcggtccgcctgtccctcgttgcggcttgtcggtgctgagtgaggcgtcgtccgggtcggcgcgaacccgcccggccgcggttccctgcagacctctgcgcgggcggctcggcccttcacgcccttttcgttcacgaatccgagcccgctcgcctctctccagcgaaccgaccatgtctggcggcgccgcagagaagcagagcagcactcccggttccctgttcctctcgccgccggctcctgcccccaagaatggctccagctccgattcctccgtgggggagaaactgggagccgcggccgccgacgctgtgaccggcaggaccgaggagtacaggcgccgccgccacactatggacaaggacagccgtggggcggccgcgaccactaccaccactgagcaccgcttcttccgccggagcgtcatctgtgactccaatgccactgcactggagcttcccggccttcctctttccctgccccagcccagcatccccgcggctgtcccgcagagtgctccaccggagccccaccgggaagagaccgtgaccgccaccgccacttcccaggtagcccagcagcctccagccgctgccgcccctggggaacaggccgtcgcgggccctgccccctcgactgtccccagcagtaccagcaaagaccgcccagtgtcccagcctagccttgtggggagcaaagaggagccgccgccggcgagaagtggcagcggcggcggcagcgccaaggagccacaggaggaacggagccagcagcaggatgatatcgaagagctggagaccaaggccgtgggaatgtctaacgatggccgctttctcaagtttgacatcgaaatcggcagaggctcctttaagacggtctacaaaggtctggacactgaaaccaccgtggaagtcgcctggtgtgaactgcaggatcgaaaattaacaaagtctgagaggcagagatttaaagaagaagctgaaatgttaaaaggtcttcagcatcccaatattgttagattttatgattcctgggaatccacagtaaaaggaaagaagtgcattgttttggtgactgaacttatgacgtctggaacacttaaaacgtatctgaaaaggtttaaagtgatgaagatcaaagttctaagaagctggtgccgtcagatccttaaaggtcttcagtttcttcatactcgaactccacctatcattcaccgcgatcttaaatgtgacaacatctttatcaccggccctactggctcagtcaagattggagacctcggtctggcaaccctgaagcgggcttcttttgccaagagtgtgataggtaccccagagttcatggcccctgagatgtatgaggagaaatatgatgaatccgttgacgtttatgcttttgggatgtgcatgcttgagatggctacatctgaatatccttactcggagtgccaaaatgctgcacagatctaccgtcgcgtgaccagtggggtgaagccagccagttttgacaaagtagcaattcctgaagtgaaggaaattattgaaggatgcatacgacaaaacaaagatgaaagatattccatcaaagaccttttgaaccatgccttcttccaagaggaaacaggagtacgggtagaattagcagaagaagatgatggagaaaaaatagccataaaattatggctacgtattgaagatattaagaaattaaagggaaaatacaaagataatgaagctattgagttttcttttgatttagagagagatgtcccagaagatgttgcacaagaaatggtagagtctgggtatgtctgtgaaggtgatcacaagaccatggctaaagctatcaaagacagagtatcattaattaagaggaaacgagagcagcggcagttggtacgggaggagcaagaaaaaaaaaagcaggaagagagcagtctcaaacagcaggtagaacaatccagtgcttcccagacaggaatcaagcagctcccttctgctagcaccggcatacctactgcttctaccacttcagcttcagtttctacacaagtagaacctgaagaacctgaggcagatcaacatcaacaactacagtaccagcaacccagtatatctgtgttatctgatgggacggttgacagtggtcagggatcctctgtcttcacagaatctcgagtgagcagccaacagacagtttcatatggttcccaacatgaacaggcacattctacaggcacagtcccagggcatataccttctactgtccaagcacagtctcagccccatggggtatatccaccctcaagtgtggcacaggggcagagccagggtcagccatcctcaagtagcttaacaggggtttcatcttcccaacccatacaacatcctcagcagcagcagggaatacagcagacagcccctcctcaacagacagtgcagtattcactttcacagacatcaacctccagtgaggccactactgcacagccagtgagtcagcctcaagctccacaagtcttgcctcaagtatcagctggaaaacagcttccagtttcccagccagtaccaactatccaaggcgaacctcagatcccagttgcgacacaaccctcggttgttccagtccactctggtgctcatttccttccagtgggacagccgctccctactcccttgctccctcagtaccctgtctctcagattcccatatcaactcctcatgtgtctacggctcagacaggtttctcatcccttcccatcacaatggcagctggcattactcagcctctgctcacgttggcttcatctgctacaacagctgcgatcccgggggtatcaactgtggttcctagtcagcttccaacccttctgcagcctgtgactcagctgccaagtcaggttcacccacagctcctacaaccagcagttcagtccatgggaataccagctaaccttggacaagctgctgaggttccactttcctctggagatgttctgtaccagggcttcccacctcgactgccaccacagtacccaggagattcaaatattgctccctcttccaacgtggcttctgtttgcatccattctacagtcctatcccctcccatgccgacagaagtactggctacacctgggtactttcccacagtggtgcagccttatgtggaatcaaatcttttagttcctatgggtggtgtaggaggacaggttcaagtgtcccagccaggagggagtttagcacaagcccccactacatcctcccagcaagcagttttggagagtactcagggagtctctcaggttgctcctgcagagccagttgcagtagcacagacccaagctacccagccgaccactttggcttcctctgtagacagtgcacattcagatgttgcttcaggtatgagtgatggcaatgagaacgtcccatcttccagtggaaggcatgaaggaagaactacaaaacggcattaccgaaaatctgtaaggagtcgctctcgacatgaaaaaacttcacgcccaaaattaagaattttgaatgtttcaaataaaggagaccgagtagtagaatgtcaattagagactcataataggaaaatggttacattcaaatttgacctagatggtgacaaccccgaggagatagcaacaattatggtgaacaatgactttattctagcaatagagagagagtcgtttgtggatcaagtgcgagaaattattgaaaaagctgatgaaatgctcagtgaggatgtcagtgtggaaccagagggtgatcagggattggagagtctacaaggaaaggatgactatggcttttcaggttctcagaaattggaaggagagttcaaacaaccaattcctgcgtcttccatgccacagcaaataggcattcctaccagttctttaactcaagttgttcattctgcgggaaggcggtttatagtgagtcctgtgccagaaagccgattacgagaatcaaaagttttccccagtgaaataacagatacagttgctgcctctacagctcagagccctggaatgaacttgtctcactctgcatcatcccttagtctacaacaggccttttctgaacttagacgtgcccaaatgacagaaggacccaacacagcacctccaaactttagtcatacaggaccaacatttccagtagtacctcctttcttaagtagcattgctggagtcccaaccacagcagcagccacagcaccagtccctgcaacaagcagccctcctaatgacatttccacatcagtaattcagtctgaggttacagtgcccactgaagaggggattgctggagttgccaccagcacaggtgtggtaacttcaggtggtctccccataccacctgtgtctgaatcaccagtactttccagcgtagtttcaagtatcacaatacctgcagttgtctcaatatctactacatccccgtcacttcaagtccccacatccacatctgagatcgttgtttctagtacagcactgtatccttcagtaacagtttcagcaacttcagcctctgcagggggcagtactgctaccccaggtcctaagcctccagctgtagtatctcagcaggcagcaggcagcactactgtgggagccacattaacatcagtttctaccaccacttcattcccaagcacagcttcacagctgtgcattcagcttagcagcagtacttctactcctactttagctgaaaccgtggtagttagcgcacactcactagataagacatctcatagcagtacaactggattggctttctccctctctgcaccatcttcctcttcctctcctggagcaggagtgtctagttatatttctcagcctggtgggctgcatcctttggtcattccatcagtgatagcttctactcctattcttccccaagcagcaggacctacttctacacctttattaccccaagtacctagtatcccacccttggtacagcctgttgccaatgtgcctgctgtacagcagacactaattcatagtcagcctcaaccagctttgcttcccaaccagccccatactcattgtcctgaagtagattctgatacacaacccaaagctcctggaattgatgacataaagactctagaagaaaagctgcggtctctgttcagtgaacacagctcatctggagctcagcatgcctctgtctcactggagacctcactagtcatagagagcactgtcacaccaggcatcccaactactgctgttgcaccaagcaaactcctgacttctaccacaagtacttgcttaccaccaaccaatttaccactaggaacagttgctttgccagttacaccagtggtcacacctgggcaagtttctaccccagtcagcactactacatcaggagtgaaacctggaactgctccctccaagccacctctaactaaggctccggtgctgccagtgggtactgaacttccagcaggtactctacccagcgagcagctgccaccttttccaggaccttctctaacccagtcccagcaacctctagaggatcttgatgctcaattgagaagaacacttagtccagagatgatcacagtgacttctgcggttggtcctgtgtccatggcggctccaacagcaatcacagaagcaggaacacagcctcagaagggtgtttctcaagtcaaagaaggccctgtcctagcaactagttcaggagctggtgtttttaagatgggacgatttcaggtttctgttgcagcagacggtgcccagaaagagggtaaaaataagtcagaagatgcaaagtctgttcattttgaatccagcacctcagagtcctcagtgctatcaagtagtagtccagagagtaccttggtgaaaccagagccgaatggcataaccatccctggtatctcttcagatgtgccagagagtgcccacaaaactactgcctcagaggcaaagtcagacactgggcagcctaccaaggttggacgttttcaggtgacaactacagcaaacaaagtgggtcgtttctctgtatcaaaaactgaggacaagatcactgacacaaagaaagaaggaccagtggcatctcctccttttatggatttggaacaagctgttcttcctgctgtgataccaaagaaagagaagcctgaactgtcagagccttcacatctaaatgggccgtcttctgacccggaggccgcttttttaagtagggatgtggatgatggttccggtagtccacactcgccccatcagctgagctcaaagagccttcctagccagaatctaagtcaaagccttagtaattcatttaactcctcttacatgagtagcgacaatgagtcagatatcgaagatgaagacttaaagttagagctgcgacgactacgagataaacatctcaaagagattcaggacctgcagagtcgccagaagcatgaaattgaatctttgtataccaaactgggcaaggtgccccctgctgttattattcccccagctgctcccctttcagggagaagacgacgacccactaaaagcaaaggcagcaaatctagtcgaagcagttccttggggaataaaagcccccagctttcaggtaacctgtctggtcagagtgcagcttcagtcttgcacccccagcagaccctccaccctcctggcaacatcccagagtccgggcagaatcagctgttacagccccttaagccatctccctccagtgacaacctctattcagccttcaccagtgatggtgccatttcagtaccaagcctttctgctccaggtcaaggaaccagcagcacaaacactgttggggcaacagtgaacagccaagccgcccaagctcagcctcctgccatgacgtccagcaggaagggcacattcacagatgacttgcacaagttggtagacaattgggcccgagatgccatgaatctctcaggcaggagaggaagcaaagggcacatgaattacgagggccctggaatggcaaggaagttctctgcacctgggcaactgtgcatctccatgacctcgaacctgggtggctctgcccccatctctgcagcatcagctacctctctaggtcacttcaccaagtctatgtgccccccacagcagtatggctttccagctaccccatttggcgctcaatggagtgggacgggtggcccagcaccacagccacttggccagttccaacctgtgggaactgcctccttgcagaatttcaacatcagcaatttgcagaaatccatcagcaaccccccaggctccaacctgcggaccacttagacctagagacattaactgaatagatctgggggcaggagatggaatgctgagggggtgggtgggggtgggaagtagcctatatactaactactagtgctgcatttaactggttatttcttgccagaggggaatgtttttaatactgcattgagccctcagaatggagagtctcccccgctccagttattggaatgggagaggaaggaaagaacagcttttttgtcaaggggcagcttcagaccatgctttcctgtttatctatactcagtaatgaggatgagggctaggaaagtcttgttcataaggaagctggagaactcaatgtaaaatcaaacccatctgtaatttcgagtgggtggagctcttgcttttggtacatgccctgaatccctcactccctcaagaatccgaaccacaggacaaaaaccacctactgggctctctcctaccctgccctcctcccttttttttacccctctcttttttattttttctttgctctttagaacccagtgaaaaataccagggtactggggtgcaactctttcttatgataggtcattagtgctttaagcaaaagatattagcagctttgactgcagcattagcaattaggaaaaaaaaaaaattaagttccctgcggacatgtaactttgccatcagttttgatgtggaaacactgtgatatataaaatgttgttggacaacagtagttttaagagtaaaatatgaaacgtttaaaaagttccaaaaaaagctagctctgtcctttacttattgagacactttaactttttcctttgtatttccattgtattagataaataaatgtgaatgtaaaattgtataaattactgtacttgaatacttctgtttcccagtgttgcttgctggacattttagtgccttggacttctattgcttctgccattagcatcaacttaccagaccccagatcaataaagggcatgtggaaggaaatcgtaggtccatgtgaccccagcagtccagcagtggttatgccaaagggaaattgaaaaagtatttttttaagtcattcaacaactttgtctagagcaggtgtaagatgagtagggtgggaagttaggttggcatcagtggttaaaaacagaaagttctgtttcgggaatagtgaggagggggtgttgtaacaaaattggacaacttaaaagaatggtgtgtgctgggtgaaagacaaagactaaagaatgaggaaacaaacgtgatgcctggccagtgactgtcatataaacctttcttatttgagctaggcttgaacagacgtgacctagaagaaactgaacataaagagaagggggtggggggctagttttcaagttggggaacctgatagtgaaaagtcacagatggagaaaattgctctcagaaaaactgtttggattgctttcctcttgttgcacatgtaccatgcatttctcagcttggggtactacattttgtggaaagttaatctatctatctttccacatctgaattaatcattctaggaaagaatacttattcctactcatttcctttatgatgtccaaatggttgcaggatcataatctattgtgccacctttatttctagaagtacaactaatatgttcacattttcaaataaataatactccccgtaagtaataactgcaaccaatcagtgttattcagtgctatgcctccttgtaatgggtagttattaattattttcagagctttccggaaatactgtcctaactggctatgtttaggatctttgttatctctgaagacaaagaaagaagctaggactcttaattttggggtgcttcttgactcttagttgggaaactgaaaatatttccaaccttttacccacgtcaatggcatattctgggaatcaccaccaccaccaccactaccacagaaagaggctggaggctcctgtaccctgttcattccttaagggccctgcttcccttagtaagtaagtaagttggtctacggccctaaatatgcaaatgagagctgaaggtttttaaaaggtagaaaggaaaagggcaagggcttccacccctgctttaaaatgatttatttattctctgcttgtatttcttgtggagagagtaaggatagaaccaacaaggggctgagtagctgagaaaggggccacccaagagtgaaacatactttataccagaggagcagtggagcctcatgcagcacattatcatttgttatttgggtttaataataattttgacatcttttcactcatacacaaaaaaagtcagaactggtgttatttactgttgatttcatcctcctgtgtatgaaataacaagcctagaggaatgaactagtgctactgaactgtttaaattatttttgtgttaatagtacactttgagtatctttttccacattaaaaactttctgaattataaatgttttccttacattatttaacaatgtacactgttaaaaataaaaataaaaattcaaactttgggggtttctcagcagccgttaattgtacattttgcactaactctgggtgttgcgcttcttgtaagattgcgctttgtgcttcagtttgttacctttgtagacttatttaatgaaaccattcaaataaaccaaacttgcttttgttgagctgtggggtttcatttccagaagattccttcacattctcactggcactattttgagttaagtgcaatttataactggatccctaattcctgggagctcctttgctgtctccttaacttcgaaaggaatagaaacggtcggctgccggctagtactttcagacttccttatctcaggttcacagcttcccaaatgggtctgagccaaaaaataggaagtcactgcttcaagattagccacagcccagcccaaaataatacgtctaaaaaaattattaaattggctgggcgcaatggctcatgcctataattctagtactttttactttgggaggccgaggtgggcagatcacttgaggtcagtttgagaccagcctggccaacatggagaaaccccgtctcctctactaaaaatacaaaaattagtcgggcgtcgtggtgggtgtctgtaatcccagctactcgggagcctgaggcaggagaattgcttgaatcctggcaggcggaggctgcaatgagtcaagatggcaccgctgcactccagcctgcgctacagagccagaccccccctctcaaaaaaaaagttgttaaactgcaaacttcattattttgggggaagaattatgaaacatctgagcactatgaaaagccaatttatggtcaaggtgggttacatctcacacctgaaatggggaagtagaaacagttgcgtttgagcatccctaattgaaatgctctgagatcagaaaatttctgagcactgacgtgatgccagaagtggaaaattccacacgtgacctcgtgtgacaagtcgcaaagcaccaggcatacaacagtttatgcagcgaccctaagagaaaaaaaaacccagccctcttcagctgcagtgtatcttcttatacaaaaactctgtttcatgcacaaaattatgtgtatgaggcatatacacgaaacacaggtgaattccacgttcagacttgggtcccatccccaaggtctcattatgtgtatacaaatattcaaaaaatgcaaaacaattctggtttcaagcatttcagataagcaatatatatatattctattttgttaataaggtatacgatttgctttctcaaaaatgccttttctggccagacacagtggctcacaccagtaatccctgtattttgtaaggcagaggtgggagtatcacttgggcccaagaggttgtggagagagctgtgtttgcaccactgaactccagtcagggcaacacagccagaccccgtctcaa

SEQ ID NO: 9185 - protein, 2382 aa, Homo sapiens; identical to SEQ ID NO: 9171

SEQ ID NO: 9186 - DNA, 10850 bp, Homo sapiens
ctcctctgccccggggccgccaccgcccgggcgtcggacctggtcccgtgctcgcggtgccgccgccctctgggcctagcccgcccagctcggcgagcggcggcagtgggagccgcgtccgccgcatccgcctcgactcggtgccggcccctggccctcccctcatgactgcggcgcctctgctgccaccgcccgcccggccgccgctcgccgcaggatggatgcggaccgtgcggcgctaacccccgtggctcagctcccgaatcgcccgccttcgagccctcctcgtgagccgcagcagcctcggtgccagcccccgccgcagctgggcccagcggtccgcctgtccctcgttgcggcttgtcggtgctgagtgaggcgtcgtccgggtcggcgcgaacccgcccggccgcggttccctgcagacctctgcgcgggcggctcggcccttcacgcccttttcgttcacgaatccgagcccgctcgcctctctccagcgaaccgaccatgtctggcggcgccgcagagaagcagagcagcactcccggttccctgttcctctcgccgccggctcctgcccccaagaatggctccagctccgattcctccgtgggggagaaactgggagccgcggccgccgacgctgtgaccggcaggaccgaggagtacaggcgccgccgccacactatggacaaggacagccgtggggcggccgcgaccactaccaccactgagcaccgcttcttccgccggagcgtcatctgtgactccaatgccactgcactggagcttcccggccttcctctttccctgccccagcccagcatccccgcggctgtcccgcagagtgctccaccggagccccaccgggaagagaccgtgaccgccaccgccacttcccaggtagcccagcagcctccagccgctgccgcccctggggaacaggccgtcgcgggccctgccccctcgactgtccccagcagtaccagcaaagaccgcccagtgtcccagcctagccttgtggggagcaaagaggagccgccgccggcgagaagtggcagcggcggcggcagcgccaaggagccacaggaggaacggagccagcagcaggatgatatcgaagagctggagaccaaggccgtgggaatgtctaacgatggccgctttctcaagtttgacatcgaaatcggcagaggctcctttaagacggtctacaaaggtctggacactgaaaccaccgtggaagtcgcctggtgtgaactgcaggatcgaaaattaacaaagtctgagaggcagagatttaaagaagaagctgaaatgttaaaaggtcttcagcatcccaatattgttagattttatgattcctgggaatccacagtaaaaggaaagaagtgcattgttttggtgactgaacttatgacgtctggaacacttaaaacgtatctgaaaaggtttaaagtgatgaagatcaaagttctaagaagctggtgccgtcagatccttaaaggtcttcagtttcttcatactcgaactccacctatcattcaccgcgatcttaaatgtgacaacatctttatcaccggccctactggctcagtcaagattggagacctcggtctggcaaccctgaagcgggcttcttttgccaagagtgtgataggtaccccagagttcatggcccctgagatgtatgaggagaaatatgatgaatccgttgacgtttatgcttttgggatgtgcatgcttgagatggctacatctgaatatccttactcggagtgccaaaatgctgcacagatctaccgtcgcgtgaccagtggggtgaagccagccagttttgacaaagtagcaattcctgaagtgaaggaaattattgaaggatgcatacgacaaaacaaagatgaaagatattccatcaaagaccttttgaaccatgccttcttccaagaggaaacaggagtacgggtagaattagcagaagaagatgatggagaaaaaatagccataaaattatggctacgtattgaagatattaagaaattaaagggaaaatacaaagataatgaagctattgagttttcttttgatttagagagagatgtcccagaagatgttgcacaagaaatggtagagtctgggtatgtctgtgaaggtgatcacaagaccatggctaaagctatcaaagacagagtatcattaattaagaggaaacgagagcagcggcagttggtacgggaggagcaagaaaaaaaaaagcaggaagagagcagtctcaaacagcaggtagaacaatccagtgcttcccagacaggaatcaagcagctcccttctgctagcaccggcatacctactgcttctaccacttcagcttcagtttctacacaagtagaacctgaagaacctgaggcagatcaacatcaacaactacagtaccagcaacccagtatatctgtgttatctgatgggacggttgacagtggtcagggatcctctgtcttcacagaatctcgagtgagcagccaacagacagtttcatatggttcccaacatgaacaggcacattctacaggcacagtcccagggcatataccttctactgtccaagcacagtctcagccccatggggtatatccaccctcaagtgtggcacaggggcagagccagggtcagccatcctcaagtagcttaacaggggtttcatcttcccaacccatacaacatcctcagcagcagcagggaatacagcagacagcccctcctcaacagacagtgcagtattcactttcacagacatcaacctccagtgaggccactactgcacagccagtgagtcagcctcaagctccacaagtcttgcctcaagtatcagctggaaaacagagtactcagggagtctctcaggttgctcctgcagagccagttgcagtagcacagacccaagctacccagccgaccactttggcttcctctgtagacagtgcacattcagatgttgcttcaggtatgagtgatggcaatgagaacgtcccatcttccagtggaaggcatgaaggaagaactacaaaacggcattaccgaaaatctgtaaggagtcgctctcgacatgaaaaaacttcacgcccaaaattaagaattttgaatgtttcaaataaaggagaccgagtagtagaatgtcaattagagactcataataggaaaatggttacattcaaatttgacctagatggtgacaaccccgaggagatagcaacaattatggtgaacaatgactttattctagcaatagagagagagtcgtttgtggatcaagtgcgagaaattattgaaaaagctgatgaaatgctcagtgaggatgtcagtgtggaaccagagggtgatcagggattggagagtctacaaggaaaggatgactatggcttttcaggttctcagaaattggaaggagagttcaaacaaccaattcctgcgtcttccatgccacagcaaataggcattcctaccagttctttaactcaagttgttcattctgcgggaaggcggtttatagtgagtcctgtgccagaaagccgattacgagaatcaaaagttttccccagtgaaataacagatacagttgctgcctctacagctcagagccctggaatgaacttgtctcactctgcatcatcccttagtctacaacaggccttttctgaacttagacgtgcccaaatgacagaaggacccaacacagcacctccaaactttagtcatacaggaccaacatttccagtagtacctcctttcttaagtagcattgctggagtcccaaccacagcagcagccacagcaccagtccctgcaacaagcagccctcctaatgacatttccacatcagtaattcagtctgaggttacagtgcccactgaagaggggattgctggagttgccaccagcacaggtgtggtaacttcaggtggtctccccataccacctgtgtctgaatcaccagtactttccagcgtagtttcaagtatcacaatacctgcagttgtctcaatatctactacatccccgtcacttcaagtccccacatccacatctgagatcgttgtttctagtacagcactgtatccttcagtaacagtttcagcaacttcagcctctgcagggggcagtactgctaccccaggtcctaagcctccagctgtagtatctcagcaggcagcaggcagcactactgtgggagccacattaacatcagtttctaccaccacttcattcccaagcacagcttcacagctgtgcattcagcttagcagcagtacttctactcctactttagctgaaaccgtggtagttagcgcacactcactagataagacatctcatagcagtacaactggattggctttctccctctctgcaccatcttcctcttcctctcctggagcaggagtgtctagttatatttctcagcctggtgggctgcatcctttggtcattccatcagtgatagcttctactcctattcttccccaagcagcaggacctacttctacacctttattaccccaagtacctagtatcccacccttggtacagcctgttgccaatgtgcctgctgtacagcagacactaattcatagtcagcctcaaccagctttgcttcccaaccagccccatactcattgtcctgaagtagattctgatacacaacccaaagctcctggaattgatgacataaagactctagaagaaaagctgcggtctctgttcagtgaacacagctcatctggagctcagcatgcctctgtctcactggagacctcactagtcatagagagcactgtcacaccaggcatcccaactactgctgttgcaccaagcaaactcctgacttctaccacaagtacttgcttaccaccaaccaatttaccactaggaacagttgctttgccagttacaccagtggtcacacctgggcaagtttctaccccagtcagcactactacatcaggagtgaaacctggaactgctccctccaagccacctctaactaaggctccggtgctgccagtgggtactgaacttccagcaggtactctacccagcgagcagctgccaccttttccaggaccttctctaacccagtcccagcaacctctagaggatcttgatgctcaattgagaagaacacttagtccagagatgatcacagtgacttctgcggttggtcctgtgtccatggcggctccaacagcaatcacagaagcaggaacacagcctcagaagggtgtttctcaagtcaaagaaggccctgtcctagcaactagttcaggagctggtgtttttaagatgggacgatttcaggtttctgttgcagcagacggtgcccagaaagagggtaaaaataagtcagaagatgcaaagtctgttcattttgaatccagcacctcagagtcctcagtgctatcaagtagtagtccagagagtaccttggtgaaaccagagccgaatggcataaccatccctggtatctcttcagatgtgccagagagtgcccacaaaactactgcctcagaggcaaagtcagacactgggcagcctaccaaggttggacgttttcaggtgacaactacagcaaacaaagtgggtcgtttctctgtatcaaaaactgaggacaagatcactgacacaaagaaagaaggaccagtggcatctcctccttttatggatttggaacaagctgttcttcctgctgtgataccaaagaaagagaagcctgaactgtcagagccttcacatctaaatgggccgtcttctgacccggaggccgcttttttaagtagggatgtggatgatggttccggtagtccacactcgccccatcagctgagctcaaagagccttcctagccagaatctaagtcaaagccttagtaattcatttaactcctcttacatgagtagcgacaatgagtcagatatcgaagatgaagacttaaagttagagctgcgacgactacgagataaacatctcaaagagattcaggacctgcagagtcgccagaagcatgaaattgaatctttgtataccaaactgggcaaggtgccccctgctgttattattcccccagctgctcccctttcagggagaagacgacgacccactaaaagcaaaggcagcaaatctagtcgaagcagttccttggggaataaaagcccccagctttcaggtaacctgtctggtcagagtgcagcttcagtcttgcacccccagcagaccctccaccctcctggcaacatcccagagtccgggcagaatcagctgttacagccccttaagccatctccctccagtgacaacctctattcagccttcaccagtgatggtgccatttcagtaccaagcctttctgctccaggtcaaggaaccagcagcacaaacactgttggggcaacagtgaacagccaagccgcccaagctcagcctcctgccatgacgtccagcaggaagggcacattcacagatgacttgcacaagttggtagacaattgggcccgagatgccatgaatctctcaggcaggagaggaagcaaagggcacatgaattacgagggccctggaatggcaaggaagttctctgcacctgggcaactgtgcatctccatgacctcgaacctgggtggctctgcccccatctctgcagcatcagctacctctctaggtcacttcaccaagtctatgtgccccccacagcagtatggctttccagctaccccatttggcgctcaatggagtgggacgggtggcccagcaccacagccacttggccagttccaacctgtgggaactgcctccttgcagaatttcaacatcagcaatttgcagaaatccatcagcaaccccccaggctccaacctgcggaccacttagacctagagacattaactgaatagatctgggggcaggagatggaatgctgagggggtgggtgggggtgggaagtagcctatatactaactactagtgctgcatttaactggttatttcttgccagaggggaatgtttttaatactgcattgagccctcagaatggagagtctcccccgctccagttattggaatgggagaggaaggaaagaacagcttttttgtcaaggggcagcttcagaccatgctttcctgtttatctatactcagtaatgaggatgagggctaggaaagtcttgttcataaggaagctggagaactcaatgtaaaatcaaacccatctgtaatttcgagtgggtggagctcttgcttttggtacatgccctgaatccctcactccctcaagaatccgaaccacaggacaaaaaccacctactgggctctctcctaccctgccctcctcccttttttttacccctctcttttttattttttctttgctctttagaacccagtgaaaaataccagggtactggggtgcaactctttcttatgataggtcattagtgctttaagcaaaagatattagcagctttgactgcagcattagcaattaggaaaaaaaaaaaattaagttccctgcggacatgtaactttgccatcagttttgatgtggaaacactgtgatatataaaatgttgttggacaacagtagttttaagagtaaaatatgaaacgtttaaaaagttccaaaaaaagctagctctgtcctttacttattgagacactttaactttttcctttgtatttccattgtattagataaataaatgtgaatgtaaaattgtataaattactgtacttgaatacttctgtttcccagtgttgcttgctggacattttagtgccttggacttctattgcttctgccattagcatcaacttaccagaccccagatcaataaagggcatgtggaaggaaatcgtaggtccatgtgaccccagcagtccagcagtggttatgccaaagggaaattgaaaaagtatttttttaagtcattcaacaactttgtctagagcaggtgtaagatgagtagggtgggaagttaggttggcatcagtggttaaaaacagaaagttctgtttcgggaatagtgaggagggggtgttgtaacaaaattggacaacttaaaagaatggtgtgtgctgggtgaaagacaaagactaaagaatgaggaaacaaacgtgatgcctggccagtgactgtcatataaacctttcttatttgagctaggcttgaacagacgtgacctagaagaaactgaacataaagagaagggggtggggggctagttttcaagttggggaacctgatagtgaaaagtcacagatggagaaaattgctctcagaaaaactgtttggattgctttcctcttgttgcacatgtaccatgcatttctcagcttggggtactacattttgtggaaagttaatctatctatctttccacatctgaattaatcattctaggaaagaatacttattcctactcatttcctttatgatgtccaaatggttgcaggatcataatctattgtgccacctttatttctagaagtacaactaatatgttcacattttcaaataaataatactccccgtaagtaataactgcaaccaatcagtgttattcagtgctatgcctccttgtaatgggtagttattaattattttcagagctttccggaaatactgtcctaactggctatgtttaggatctttgttatctctgaagacaaagaaagaagctaggactcttaattttggggtgcttcttgactcttagttgggaaactgaaaatatttccaaccttttacccacgtcaatggcatattctgggaatcaccaccaccaccaccactaccacagaaagaggctggaggctcctgtaccctgttcattccttaagggccctgcttcccttagtaagtaagtaagttggtctacggccctaaatatgcaaatgagagctgaaggtttttaaaaggtagaaaggaaaagggcaagggcttccacccctgctttaaaatgatttatttattctctgcttgtatttcttgtggagagagtaaggatagaaccaacaaggggctgagtagctgagaaaggggccacccaagagtgaaacatactttataccagaggagcagtggagcctcatgcagcacattatcatttgttatttgggtttaataataattttgacatcttttcactcatacacaaaaaaagtcagaactggtgttatttactgttgatttcatcctcctgtgtatgaaataacaagcctagaggaatgaactagtgctactgaactgtttaaattatttttgtgttaatagtacactttgagtatctttttccacattaaaaactttctgaattataaatgttttccttacattatttaacaatgtacactgttaaaaataaaaataaaaattcaaactttgggggtttctcagcagccgttaattgtacattttgcactaactctgggtgttgcgcttcttgtaagattgcgctttgtgcttcagtttgttacctttgtagacttatttaatgaaaccattcaaataaaccaaacttgcttttgttgagctgtggggtttcatttccagaagattccttcacattctcactggcactattttgagttaagtgcaatttataactggatccctaattcctgggagctcctttgctgtctccttaacttcgaaaggaatagaaacggtcggctgccggctagtactttcagacttccttatctcaggttcacagcttcccaaatgggtctgagccaaaaaataggaagtcactgcttcaagattagccacagcccagcccaaaataatacgtctaaaaaaattattaaattggctgggcgcaatggctcatgcctataattctagtactttttactttgggaggccgaggtgggcagatcacttgaggtcagtttgagaccagcctggccaacatggagaaaccccgtctcctctactaaaaatacaaaaattagtcgggcgtcgtggtgggtgtctgtaatcccagctactcgggagcctgaggcaggagaattgcttgaatcctggcaggcggaggctgcaatgagtcaagatggcaccgctgcactccagcctgcgctacagagccagaccccccctctcaaaaaaaaagttgttaaactgcaaacttcattattttgggggaagaattatgaaacatctgagcactatgaaaagccaatttatggtcaaggtgggttacatctcacacctgaaatggggaagtagaaacagttgcgtttgagcatccctaattgaaatgctctgagatcagaaaatttctgagcactgacgtgatgccagaagtggaaaattccacacgtgacctcgtgtgacaagtcgcaaagcaccaggcatacaacagtttatgcagcgaccctaagagaaaaaaaaacccagccctcttcagctgcagtgtatcttcttatacaaaaactctgtttcatgcacaaaattatgtgtatgaggcatatacacgaaacacaggtgaattccacgttcagacttgggtcccatccccaaggtctcattatgtgtatacaaatattcaaaaaatgcaaaacaattctggtttcaagcatttcagataagcaatatatatatattctattttgttaataaggtatacgatttgctttctcaaaaatgccttttctggccagacacagtggctcacaccagtaatccctgtattttgtaaggcagaggtgggagtatcacttgggcccaagaggttgtggagagagctgtgtttgcaccactgaactccagtcagggcaacacagccagaccccgtctcaa

SEQ ID NO: 9187 - protein, 2136 aa, Homo sapiens; identical to SEQ ID NO: 9169

SEQ ID NO: 9188 - DNA, 798 bp, Homo sapiens
tttatcttcatctcagacctagtcttcaagttttagtaatatatccaactgcctattgaacttcttactggagattacataagaatctcaaactcaacatgtccaattgaatacatctccatacctcctcccatctaaaaaacaaaaaaccttaaaacttaaaaaaaacctttgatttttctctctcagttgacagcactatcatcccctaacctcttatccatgcttcatttttcctccaaacaccaattaatcactaaattatccactaaaccctaaatattttatctcctaaatatctaaatgttctattccttctattatctccctagtttaggtcctaaaaatctcacactcatatcctaactagagtagccctcccttacttgaggcttcacttcccactgtccaaaaatattaaatggaaaattccagaaataaacaattcataactttttcttttttttttgagacagagtttccctcttgtcgcccaggctggactgggcaacaagagtgaaactctgtctcaaaaaaaaaatgaaaagcaggagaaaaaaataaccattatcccctaagaagaagagtggggactactggaatctctacacttccccctgtatgcctttaatctatttttgggcaattactgctatgcaaatctaaccaattaacttctctgtttaaaactcaactcttcagttactctctactttctacacataagaacagtccgccctccacatcctcaggttccatatccacatgttctgcatccatggattcaactaactgcag

SEQ ID NO: 9189 - protein, 32 aa, Homo sapiens
MENSRNKQFITFSFFFETEFPSCRPGWTGQQE

SEQ ID NO: 9190 - DNA, 3003 bp, Homo sapiens
cgtggtggcgcacgcgtgtagtcccagctacttgggaggctgaggcagaagaatcccttgaacccaggaggcggaggttgcagtaagccaagattgtcactgcactccagcctgggcgaaagaggaagactccatctcaaaaaaaagaaaaaagaaatttcatggttatgcaactcttatttatgatcagaaaaatggacattttgtgatttaactctgtaacatgtttcatgtagtaaaaatataataaaactattaatcatctagcttgggagagataggagaaagacattactgtcactagtcaaattatatatcttttactatccaccaaaaatctcttctgatttctggttagaaggcatactattaattgataagaaaataaaactgaaggcctctaacatatcacagggtaataagaatatagggaaagttagttcaatagtttaaattaaagcacacttcttacagtatagaactagtcgggcttttatgccttgttttagttcttactcttcctttaactctttttctgttgatgtaatttacattaatgcttaagagtgaactttttaagtgtgggtaaaaacgaaataattacttacaaagtttaattcttccatttcctttgagagaggaaagttatggaaaagcagctcttatctaaagcaaagagcccacagattgatttcattggccctggatgtatttaatggatttttactatgcacataatttccagaagcattgttatttatttattaattataaatttagtgtaaccatttcatagggttacacagaactacccagttgtgcatgtctgatgtaatttcacatatgaatgtatgaattacttgtcttattcatgttgatacagcctcagtccatggcgcatccgtgtggggggaccccaacatacccagaatcacagatatttttcccaactattcatgaacgtccagtttctttttcaccacctcccacctgcccaccgaaagtagccatttcccagcggcgtaagagcacctccttcctggaagcccaaactcaccacttccaacccctgctgaggactgttggccaaagtcttcttccacctggtggcagcccaactaactggacaccagaggccgtagttatgttgggtactacagccagtagagtaactggagagtcatgtgagatacaggtccatcctatgtttgaaccatctcaagtttacagtgactatagacctggactagtacttccagaagaagctcactattttattcctcaggaagcagtgtatgtagctggggtacattaccaggcccgggtggcagaacagtatgagggcattccatacaactcatcagtactgtcaagtcctatgaaacagatacctgaacagaagccagtacaagggggccctacttcaagttctgtctttgaatttccatctggacaggctttcctggtaggacaccttcagaatctaagattagattctggattgggtccgggatctcccctctctagtatttctgcacctatcagtacagatgctacacgtttgaaatttcaccctgtctttgttcctcattctgcgcctgctgtgttaactcataacaatgagagcagaagcaactgtgtatttgaatttcatgttcacacaccaagctcctcttcaggagaaggaggtggaattttacctcagcgtgtttaccgaaatcggcaggttgcagtggacttgaatcaagaagaactgcctcctcaatcagttggattacatggctacttgcagcctgtgactgaagaaaagcataattaccatgccccagaattgaccgtttctgtggtagagcctatcggacagaactggccaataggaagcccagaatattccagtgattcctcacaaatcacttcttcagaccccagtgattttcagtcacctccccctacagggggagcagctgcaccttttggctctgacgtctcaatgccctttatccatctgcctcagacagtgttacaagaatccccacttttcttctgtttcccccaaggaaccacatctcagcaggtcttaactgcctcattttcttcaggaggatctgcacttcatccacaggttataggaaaacttccacaattattttaaactaccctactttgcaccataacatttaaattttctattccttatttccctgaatcatggattttggagaaatattgtttaattttatcagtagagtttccccatctttggggggttgtgaactacatatatgcatttaaaaacaaaatgtgagagaagctacctgatttacctattatatgtgaaaaccagtggaaaaaacacaaaaactagaattttagtcattcttcacaatcacgacttctatgcacgttattttcaaccagtagtgaaaatgcaagtgtatgtaatgtatggttgacccagcattatttaggaatacaaatcttaagtattactttcttcctccaaacaagtttttaaaaaataggataaattttttttctataaaatataaaacatggaaaatagggaatgctgtttttgaggtaatattaataatacacagaattttcattagtgtcgaaggatctaaaaagacaaagtatatcatgggaataaaaaaagatagaaaaggaaacagtttaggaatttgccttaacaaatgaaaatgcctttttaaaatggcatcagtcaagcaagttgctgtgcattattatatgtccaaataaaatgctaattcataaaattaaggactgattctaatttttagcaactaacaatctagtgagtggtgggctttttttttttgttataagaatttgtgatatgttgcaagctaaggaacagtagacatcttaggccttgtattttcctcaacaaatttaattttagttatttatgtgtatgagcatatacacacttagcaaataaagacaatgtaatgaatgtaatagaattcaaaagtacag

SEQ ID NO: 9191 - protein, 434 aa, Homo sapiens; identical to SEQ ID NO: 1335

SEQ ID NO: 9192 - DNA, 974 bp, Homo sapiens
gtgtaacaagggtgggatactaggtacttggggtaataaaggtgtagaagtaggtcctgctgcttggggaagaataggagtagaagctatcactgatggaatgaccaaaggatgcagcccaccaggctgagaaatataactagacactcctgctccaggagaggaagaggaagatggtgcagagagggagaaagccaatccagttgtactgctatgagatgtcttatctagtgagtgtgcgctaactaccacggtttcagctaaagtaggagtagaagtactgctgctaagctgaatgcacagctgtgaagctgtgcttgggaatgaagtggtggtagaaactgatgttaatgtggctcccacagtagtgctgcctgctgcctgctgagatactacagctggaggcttaggacctggggtagcagtactgccccctgcagaggctgaagttgctgaaactgttactgaaggatacagtgctgtactagaaacaacgatctcagatgtggatgtggggacttgaagtgacggggatgtagtagatattgagacaactgcaggtattgtgatacttgaaactacgctggaaagtactggtgattcagacacaggtggtatggggagaccacctgaagttaccacacctgtgctggtggcaactccagcaatcccctcttcagtgggcactgtaacctcagactgaattactgatgtggaaatgtcattaggagggctgcttgttgcagggactggtgctgtggctgctgctgtggttgggactccagcaatgctacttaagaaaggaggtactactggaaatgttggtcctgtatgactaaagtttggaggtgctgtgttgggtccttctgtcatttgggcacgtctaagttcagaaaaggcctgttgtagactaagggatgatgcagagtgagacaagttcattccagggctctgagctgtagaggcagcaactg

SEQ ID NO: 9193 - protein, 39 aa, Homo sapiens
MQPTRLRNITRHSCSRRGRGRWCREGESQSSCTAMRCLI

SEQ ID NO: 9194 - DNA, 574 bp, Homo sapiens
tgctgcctctacagctcagagccctggaatgaacttgtctcactctgcatcatcccttattggtctacggccctaaatatgcaaatgagagctgaaggtttttaaaaggtagaaaggaaaagggcaagggcttccacccctgctttaaaatgatttatttattctctgcttgtatttcttgtggagagagtaaggatagaaccaacaaggggctgagtagctgagaaaggggccacccaagagtgaaacatactttataccagaggagcagtggagcctcatgcagcacattatcatttgttatttgggtttaataataattttgacatcttttcactcatacacaaaaaaagtcagaactggtgttatttactgttgatttcatcctcctgtgtatgaaataacaagcctagaggaatgaactagtgctactgaactgtttaaattatttttgtgttaatagtacactttgagtatctttttccacattaaaaactttctgaattataaatgttttccttacattatttaacaatgtacactgttaaaaataaaaataaaaattcaaactttg

SEQ ID NO: 9195 - protein, 32 aa, Homo sapiens
MQHIIICYLGLIIILTSFHSYTKKVRTGVIYC

SEQ ID NO: 9196 - DNA, 720 bp, Homo sapiens
tgctgcctctacagctcagagccctggaatgaacttgtctcactctgcatcatcccttattggtctacggccctaaatatgcaaatgagagctgaaggtttttaaaaggtagaaaggaaaagggcaagggcttccacccctgctttaaaatgatttatttattctctgcttgtatttcttgtggagagagtaaggatagaaccaacaaggggctgagtagctgagaaaggggccacccaagagtgaaacatactttataccagaggagcagtggagcctcatgcagcacattatcatttgttatttgggtttaataataattttgacatcttttcactcatacacaaaaaaagtcagaactggtgttatttactgttgatttcatcctcctgtgtatgaaataacaagcctagaggaatgaactagtgctactgaactgtttaaattatttttgtgttaatagtacactttgagtatctttttccacattaaaaactttctgaattataaatgttttccttacattatttaacaatgtacactgttaaaaataaaaataaaaattcaaactttgggggtttctcagcagccgttaattgtacattttgcactaactctgggtgttgcgcttcttgtaagattgcgctttgtgcttcagtttgttacctttgtagacttatttaatgaaaccattcaaataaaccaaacttgcttttgttg

SEQ ID NO: 9197 - protein, 57 aa, Homo sapiens
MFSLHYLTMYTVKNKNKNSNFGGFSAAVNCTFCTNSGCCASCKIALCASVCYLCRLI

SEQ ID NO: 9198 - DNA, 1993 bp, Homo sapiens
tgctgcctctacagctcagagccctggaatgaacttgtctcactctgcatcatcccttattggtctacggccctaaatatgcaaatgagagctgaaggtttttaaaaggtagaaaggaaaagggcaagggcttccacccctgctttaaaatgatttatttattctctgcttgtatttcttgtggagagagtaaggatagaaccaacaaggggctgagtagctgagaaaggggccacccaagagtgaaacatactttataccagaggagcagtggagcctcatgcagcacattatcatttgttatttgggtttaataataattttgacatcttttcactcatacacaaaaaaagtcagaactggtgttatttactgttgatttcatcctcctgtgtatgaaataacaagcctagaggaatgaactagtgctactgaactgtttaaattatttttgtgttaatagtacactttgagtatctttttccacattaaaaactttctgaattataaatgttttccttacattatttaacaatgtacactgttaaaaataaaaataaaaattcaaactttgggggtttctcagcagccgttaattgtacattttgcactaactctgggtgttgcgcttcttgtaagattgcgctttgtgcttcagtttgttacctttgtagacttatttaatgaaaccattcaaataaaccaaacttgcttttgttgagctgtggggtttcatttccagaagattccttcacattctcactggcactattttgagttaagtgcaatttataactggatccctaattcctgggagctcctttgctgtctccttaacttcgaaaggaatagaaacggtcggctgccggctagtactttcagacttccttatctcaggttcacagcttcccaaatgggtctgagccaaaaaataggaagtcactgcttcaagattagccacagcccagcccaaaataatacgtctaaaaaaattattaaattggctgggcgcaatggctcatgcctataattctagtactttttactttgggaggccgaggtgggcagatcacttgaggtcagtttgagaccagcctggccaacatggagaaaccccgtctcctctactaaaaatacaaaaattagtcgggcgtcgtggtgggtgtctgtaatcccagctactcgggagcctgaggcaggagaattgcttgaatcctggcaggcggaggctgcaatgagtcaagatggcaccgctgcactccagcctgcgctacagagccagaccccccctctcaaaaaaaaagttgttaaactgcaaacttcattattttgggggaagaattatgaaacatctgagcactatgaaaagccaatttatggtcaaggtgggttacatctcacacctgaaatggggaagtagaaacagttgcgtttgagcatccctaattgaaatgctctgagatcagaaaatttctgagcactgacgtgatgccagaagtggaaaattccacacgtgacctcgtgtgacaagtcgcaaagcaccaggcatacaacagtttatgcagcgaccctaagagaaaaaaaaacccagccctcttcagctgcagtgtatcttcttatacaaaaactctgtttcatgcacaaaattatgtgtatgaggcatatacacgaaacacaggtgaattccacgttcagacttgggtcccatccccaaggtctcattatgtgtatacaaatattcaaaaaatgcaaaacaattctggtttcaagcatttcagataagcaatatatatatattctattttgttaataaggtatacgatttgctttctcaaaaatgccttttctggccagacacagtggctcacaccagtaatccctgtattttgtaaggcagaggtgggagtatcacttgggcccaagaggttgtggagagagctgtgtttgcaccactgaactccagtcagggcaacacagccagaccccgtctcaa

SEQ ID NO: 9199 - protein, 63 aa, Homo sapiens
MAPLHSSLRYRARPPLSKKKLLNCKLHYFGGRIMKHLSTMKSQFMVKVGYISHLKWGSRNSCV

SEQ ID NO: 9200 - DNA, 735 bp, Homo sapiens
ggctccaacagcaatcacagaagcaggaacacagcctcagaagggtggtgagaaacatccttcctccttttatattactaatcccagcactttgggaggctgaggcgggcagatcacgaggtcaggagatcgagaccatcctgactaagacggtgaaaccccgtctctactaaaaatacaaaaaattagtcgggtgtggtggtgggcgcctgtggtcccagctactcgagaggctgaggcaggagaatggcatgaacctgggaggtgtagcttgcagtgagccaagatcgcaccactgcactgcaacctgggcaacagagtgagactccatctcaaataataataataataataataattctgagaactgtactatcctattctagaatttgccagtgttacattgagaaaataaaattagctggttttcatttaacaatggatcttggctggacatggtgattcacacctgtaatcccagcactttgggaggctgaggcaggcatattacctgaggtcaggagttcaagaccagcctggacaacgtggtgaaactccgtctctactaaaaatataaaaattagccgggtgtggtggcacacgcctgtaatcccagctactcaggaggctgaggcaggaggatcacctgaacccagtaggtggaggttgcaatgagctgagatcgcaccactgcactccagcctggccaacagagcgaaactccatctcaataaa

SEQ ID NO: 9201 - protein, 56 aa, Homo sapiens
LQQQSQKQEHSLRRVVRNILPPFILLIPALWEAEAGRSRGQEIETILTKTVKPRLY

SEQ ID NO: 9202 - DNA, 1499 bp, Homo sapiens
gcatggcttcccagttcatcctcttctcattctgtggcttgccattcatcatcccgtgaagttttccctcttcctgaaattgtaacctaggcttcttttaatgctcgtattctgttgcttataataggaaccagcagcacaaacactgttggggcaacagtgaacagccaagccgcccaagctcagcctcctgccatgacgtccagcaggaagggcacattcacagatgacttgcacaagttggtagacaattgggcccgagatgccatgaatctctcaggcaggagaggaagcaaagggcacatgaattacgagggccctggaatggcaaggaagttctctgcacctgggcaactgtgcatctccatgacctcgaacctgggtggctctgcccccatctctgcagcatcagctacctctctaggtcacttcaccaagtctatgtgccccccacagcagtatggctttccagctaccccatttggcgctcaatggagtgggacgggtggcccagcaccacagccacttggccagttccaacctgtgggaactgcctccttgcagaatttcaacatcagcaatttgcagaaatccatcagcaaccccccaggctccaacctgcggaccacttagacctagagacattaactgaatagatctgggggcaggagatggaatgctgagggggtgggtgggggtgggaagtagcctatatactaactactagtgctgcatttaactggttatttcttgccagaggggaatgtttttaatactgcattgagccctcagaatggagagtctcccccgctccagttattggaatgggagaggaaggaaagaacagcttttttgtcaaggggcagcttcagaccatgctttcctgtttatctatactcagtaatgaggatgagggctaggaaagtcttgttcataaggaagctggagaactcaatgtaaaatcaaacccatctgtaatttcgagtgggtggagctcttgcttttggtacatgccctgaatccctcactccctcaagaatccgaaccacaggacaaaaaccacctactgggctctctcctaccctgccctcctcccttttttttacccctctcttttttattttttctttgctctttagaacccagtgaaaaataccagggtactggggtgcaactctttcttatgataggtcattagtgctttaagcaaaagatattagcagctttgactgcagcattagcaattaggaaaaaaaaaaaattaagttccctgcggacatgtaactttgccatcagttttgatgtggaaacactgtgatatataaaatgttgttggacaacagtagttttaagagtaaaatatgaaacgtttaaaaagttccaaaaaaagctagctctgtcctttacttattgagacactttaactttttcctttgtatttccattgtattagataaataaatgtgaatgtaaaattgtataaattactgtacttgaat

SEQ ID NO: 9203 - protein, 145 aa, Homo sapiens
MTSSRKGTFTDDLHKLVDNWARDAMNLSGRRGSKGHMNYEGPGMARKFSAPGQLCISMTSNLGGSAPISAASATSLGHFTKSMCPPQQYGFPATPFGAQWSGTGGPAPQPLGQFQPVGTASLQNFNISNLQKSISNPPGSNLRTT

SEQ ID NO: 9204 - DNA, 3080 bp, Homo sapiens
gcatggcttcccagttcatcctcttctcattctgtggcttgccattcatcatcccgtgaagttttccctcttcctgaaattgtaacctaggcttcttttaatgctcgtattctgttgcttataataggaaccagcagcacaaacactgttggggcaacagtgaacagccaagccgcccaagctcagcctcctgccatgacgtccagcaggaagggcacattcacagatgacttgcacaagttggtagacaattgggcccgagatgccatgaatctctcaggcaggagaggaagcaaagggcacatgaattacgagggccctggaatggcaaggaagttctctgcacctgggcaactgtgcatctccatgacctcgaacctgggtggctctgcccccatctctgcagcatcagctacctctctaggtcacttcaccaagtctatgtgccccccacagcagtatggctttccagctaccccatttggcgctcaatggagtgggacgggtggcccagcaccacagccacttggccagttccaacctgtgggaactgcctccttgcagaatttcaacatcagcaatttgcagaaatccatcagcaaccccccaggctccaacctgcggaccacttagacctagagacattaactgaatagatctgggggcaggagatggaatgctgagggggtgggtgggggtgggaagtagcctatatactaactactagtgctgcatttaactggttatttcttgccagaggggaatgtttttaatactgcattgagccctcagaatggagagtctcccccgctccagttattggaatgggagaggaaggaaagaacagcttttttgtcaaggggcagcttcagaccatgctttcctgtttatctatactcagtaatgaggatgagggctaggaaagtcttgttcataaggaagctggagaactcaatgtaaaatcaaacccatctgtaatttcgagtgggtggagctcttgcttttggtacatgccctgaatccctcactccctcaagaatccgaaccacaggacaaaaaccacctactgggctctctcctaccctgccctcctcccttttttttacccctctcttttttattttttctttgctctttagaacccagtgaaaaataccagggtactggggtgcaactctttcttatgataggtcattagtgctttaagcaaaagatattagcagctttgactgcagcattagcaattaggaaaaaaaaaaaattaagttccctgcggacatgtaactttgccatcagttttgatgtggaaacactgtgatatataaaatgttgttggacaacagtagttttaagagtaaaatatgaaacgtttaaaaagttccaaaaaaagctagctctgtcctttacttattgagacactttaactttttcctttgtatttccattgtattagataaataaatgtgaatgtaaaattgtataaattactgtacttgaatacttctgtttcccagtgttgcttgctggacattttagtgccttggacttctattgcttctgccattagcatcaacttaccagaccccagatcaataaagggcatgtggaaggaaatcgtaggtccatgtgaccccagcagtccagcagtggttatgccaaagggaaattgaaaaagtatttttttaagtcattcaacaactttgtctagagcaggtgtaagatgagtagggtgggaagttaggttggcatcagtggttaaaaacagaaagttctgtttcgggaatagtgaggagggggtgttgtaacaaaattggacaacttaaaagaatggtgtgtgctgggtgaaagacaaagactaaagaatgaggaaacaaacgtgatgcctggccagtgactgtcatataaacctttcttatttgagctaggcttgaacagacgtgacctagaagaaactgaacataaagagaagggggtggggggctagttttcaagttggggaacctgatagtgaaaagtcacagatggagaaaattgctctcagaaaaactgtttggattgctttcctcttgttgcacatgtaccatgcatttctcagcttggggtactacattttgtggaaagttaatctatctatctttccacatctgaattaatcattctaggaaagaatacttattcctactcatttcctttatgatgtccaaatggttgcaggatcataatctattgtgccacctttatttctagaagtacaactaatatgttcacattttcaaataaataatactccccgtaagtaataactgcaaccaatcagtgttattcagtgctatgcctccttgtaatgggtagttattaattattttcagagctttccggaaatactgtcctaactggctatgtttaggatctttgttatctctgaagacaaagaaagaagctaggactcttaattttggggtgcttcttgactcttagttgggaaactgaaaatatttccaaccttttacccacgtcaatggcatattctgggaatcaccaccaccaccaccactaccacagaaagaggctggaggctcctgtaccctgttcattccttaagggccctgcttcccttagtaagtaagtaagttggtctacggccctaaatatgcaaatgagagctgaaggtttttaaaaggtagaaaggaaaagggcaagggcttccacccctgctttaaaatgatttatttattctctgcttgtatttcttgtggagagagtaaggatagaaccaacaaggggctgagtagctgagaaaggggccacccaagagtgaaacatactttataccagaggagcagtggagcctcatgcagcacattatcatttgttatttgggtttaataataattttgacatcttttcactcatacacaaaaaaagtcagaactggtgttatttactgttgatttcatcctcctgtgtatgaaataacaagcctagaggaatgaactagtgctactgaactgtttaaattatttttgtgttaatagtacactttgagtatctttttccacattaaaaactttctgaattat

SEQ ID NO: 9205 - protein, 145 aa, Homo sapiens; identical to SEQ ID NO: 9203

SEQ ID NO: 9206 - DNA, 3146 bp, Homo sapiens
gcatggcttcccagttcatcctcttctcattctgtggcttgccattcatcatcccgtgaagttttccctcttcctgaaattgtaacctaggcttcttttaatgctcgtattctgttgcttataataggaaccagcagcacaaacactgttggggcaacagtgaacagccaagccgcccaagctcagcctcctgccatgacgtccagcaggaagggcacattcacagatgacttgcacaagttggtagacaattgggcccgagatgccatgaatctctcaggcaggagaggaagcaaagggcacatgaattacgagggccctggaatggcaaggaagttctctgcacctgggcaactgtgcatctccatgacctcgaacctgggtggctctgcccccatctctgcagcatcagctacctctctaggtcacttcaccaagtctatgtgccccccacagcagtatggctttccagctaccccatttggcgctcaatggagtgggacgggtggcccagcaccacagccacttggccagttccaacctgtgggaactgcctccttgcagaatttcaacatcagcaatttgcagaaatccatcagcaaccccccaggctccaacctgcggaccacttagacctagagacattaactgaatagatctgggggcaggagatggaatgctgagggggtgggtgggggtgggaagtagcctatatactaactactagtgctgcatttaactggttatttcttgccagaggggaatgtttttaatactgcattgagccctcagaatggagagtctcccccgctccagttattggaatgggagaggaaggaaagaacagcttttttgtcaaggggcagcttcagaccatgctttcctgtttatctatactcagtaatgaggatgagggctaggaaagtcttgttcataaggaagctggagaactcaatgtaaaatcaaacccatctgtaatttcgagtgggtggagctcttgcttttggtacatgccctgaatccctcactccctcaagaatccgaaccacaggacaaaaaccacctactgggctctctcctaccctgccctcctcccttttttttacccctctcttttttattttttctttgctctttagaacccagtgaaaaataccagggtactggggtgcaactctttcttatgataggtcattagtgctttaagcaaaagatattagcagctttgactgcagcattagcaattaggaaaaaaaaaaaattaagttccctgcggacatgtaactttgccatcagttttgatgtggaaacactgtgatatataaaatgttgttggacaacagtagttttaagagtaaaatatgaaacgtttaaaaagttccaaaaaaagctagctctgtcctttacttattgagacactttaactttttcctttgtatttccattgtattagataaataaatgtgaatgtaaaattgtataaattactgtacttgaatacttctgtttcccagtgttgcttgctggacattttagtgccttggacttctattgcttctgccattagcatcaacttaccagaccccagatcaataaagggcatgtggaaggaaatcgtaggtccatgtgaccccagcagtccagcagtggttatgccaaagggaaattgaaaaagtatttttttaagtcattcaacaactttgtctagagcaggtgtaagatgagtagggtgggaagttaggttggcatcagtggttaaaaacagaaagttctgtttcgggaatagtgaggagggggtgttgtaacaaaattggacaacttaaaagaatggtgtgtgctgggtgaaagacaaagactaaagaatgaggaaacaaacgtgatgcctggccagtgactgtcatataaacctttcttatttgagctaggcttgaacagacgtgacctagaagaaactgaacataaagagaagggggtggggggctagttttcaagttggggaacctgatagtgaaaagtcacagatggagaaaattgctctcagaaaaactgtttggattgctttcctcttgttgcacatgtaccatgcatttctcagcttggggtactacattttgtggaaagttaatctatctatctttccacatctgaattaatcattctaggaaagaatacttattcctactcatttcctttatgatgtccaaatggttgcaggatcataatctattgtgccacctttatttctagaagtacaactaatatgttcacattttcaaataaataatactccccgtaagtaataactgcaaccaatcagtgttattcagtgctatgcctccttgtaatgggtagttattaattattttcagagctttccggaaatactgtcctaactggctatgtttaggatctttgttatctctgaagacaaagaaagaagctaggactcttaattttggggtgcttcttgactcttagttgggaaactgaaaatatttccaaccttttacccacgtcaatggcatattctgggaatcaccaccaccaccaccactaccacagaaagaggctggaggctcctgtaccctgttcattccttaagggccctgcttcccttagtaagtaagtaagttggtctacggccctaaatatgcaaatgagagctgaaggtttttaaaaggtagaaaggaaaagggcaagggcttccacccctgctttaaaatgatttatttattctctgcttgtatttcttgtggagagagtaaggatagaaccaacaaggggctgagtagctgagaaaggggccacccaagagtgaaacatactttataccagaggagcagtggagcctcatgcagcacattatcatttgttatttgggtttaataataattttgacatcttttcactcatacacaaaaaaagtcagaactggtgttatttactgttgatttcatcctcctgtgtatgaaataacaagcctagaggaatgaactagtgctactgaactgtttaaattatttttgtgttaatagtacactttgagtatctttttccacattaaaaactttctgaattataaatgttttccttacattatttaacaatgtacactgttaaaaataaaaataaaaattcaaactttg

SEQ ID NO: 9207 - protein, 145 aa, Homo sapiens; identical to SEQ ID NO: 9203

SEQ ID NO: 9208 - DNA, 3292 bp, Homo sapiens
gcatggcttcccagttcatcctcttctcattctgtggcttgccattcatcatcccgtgaagttttccctcttcctgaaattgtaacctaggcttcttttaatgctcgtattctgttgcttataataggaaccagcagcacaaacactgttggggcaacagtgaacagccaagccgcccaagctcagcctcctgccatgacgtccagcaggaagggcacattcacagatgacttgcacaagttggtagacaattgggcccgagatgccatgaatctctcaggcaggagaggaagcaaagggcacatgaattacgagggccctggaatggcaaggaagttctctgcacctgggcaactgtgcatctccatgacctcgaacctgggtggctctgcccccatctctgcagcatcagctacctctctaggtcacttcaccaagtctatgtgccccccacagcagtatggctttccagctaccccatttggcgctcaatggagtgggacgggtggcccagcaccacagccacttggccagttccaacctgtgggaactgcctccttgcagaatttcaacatcagcaatttgcagaaatccatcagcaaccccccaggctccaacctgcggaccacttagacctagagacattaactgaatagatctgggggcaggagatggaatgctgagggggtgggtgggggtgggaagtagcctatatactaactactagtgctgcatttaactggttatttcttgccagaggggaatgtttttaatactgcattgagccctcagaatggagagtctcccccgctccagttattggaatgggagaggaaggaaagaacagcttttttgtcaaggggcagcttcagaccatgctttcctgtttatctatactcagtaatgaggatgagggctaggaaagtcttgttcataaggaagctggagaactcaatgtaaaatcaaacccatctgtaatttcgagtgggtggagctcttgcttttggtacatgccctgaatccctcactccctcaagaatccgaaccacaggacaaaaaccacctactgggctctctcctaccctgccctcctcccttttttttacccctctcttttttattttttctttgctctttagaacccagtgaaaaataccagggtactggggtgcaactctttcttatgataggtcattagtgctttaagcaaaagatattagcagctttgactgcagcattagcaattaggaaaaaaaaaaaattaagttccctgcggacatgtaactttgccatcagttttgatgtggaaacactgtgatatataaaatgttgttggacaacagtagttttaagagtaaaatatgaaacgtttaaaaagttccaaaaaaagctagctctgtcctttacttattgagacactttaactttttcctttgtatttccattgtattagataaataaatgtgaatgtaaaattgtataaattactgtacttgaatacttctgtttcccagtgttgcttgctggacattttagtgccttggacttctattgcttctgccattagcatcaacttaccagaccccagatcaataaagggcatgtggaaggaaatcgtaggtccatgtgaccccagcagtccagcagtggttatgccaaagggaaattgaaaaagtatttttttaagtcattcaacaactttgtctagagcaggtgtaagatgagtagggtgggaagttaggttggcatcagtggttaaaaacagaaagttctgtttcgggaatagtgaggagggggtgttgtaacaaaattggacaacttaaaagaatggtgtgtgctgggtgaaagacaaagactaaagaatgaggaaacaaacgtgatgcctggccagtgactgtcatataaacctttcttatttgagctaggcttgaacagacgtgacctagaagaaactgaacataaagagaagggggtggggggctagttttcaagttggggaacctgatagtgaaaagtcacagatggagaaaattgctctcagaaaaactgtttggattgctttcctcttgttgcacatgtaccatgcatttctcagcttggggtactacattttgtggaaagttaatctatctatctttccacatctgaattaatcattctaggaaagaatacttattcctactcatttcctttatgatgtccaaatggttgcaggatcataatctattgtgccacctttatttctagaagtacaactaatatgttcacattttcaaataaataatactccccgtaagtaataactgcaaccaatcagtgttattcagtgctatgcctccttgtaatgggtagttattaattattttcagagctttccggaaatactgtcctaactggctatgtttaggatctttgttatctctgaagacaaagaaagaagctaggactcttaattttggggtgcttcttgactcttagttgggaaactgaaaatatttccaaccttttacccacgtcaatggcatattctgggaatcaccaccaccaccaccactaccacagaaagaggctggaggctcctgtaccctgttcattccttaagggccctgcttcccttagtaagtaagtaagttggtctacggccctaaatatgcaaatgagagctgaaggtttttaaaaggtagaaaggaaaagggcaagggcttccacccctgctttaaaatgatttatttattctctgcttgtatttcttgtggagagagtaaggatagaaccaacaaggggctgagtagctgagaaaggggccacccaagagtgaaacatactttataccagaggagcagtggagcctcatgcagcacattatcatttgttatttgggtttaataataattttgacatcttttcactcatacacaaaaaaagtcagaactggtgttatttactgttgatttcatcctcctgtgtatgaaataacaagcctagaggaatgaactagtgctactgaactgtttaaattatttttgtgttaatagtacactttgagtatctttttccacattaaaaactttctgaattataaatgttttccttacattatttaacaatgtacactgttaaaaataaaaataaaaattcaaactttgggggtttctcagcagccgttaattgtacattttgcactaactctgggtgttgcgcttcttgtaagattgcgctttgtgcttcagtttgttacctttgtagacttatttaatgaaaccattcaaataaaccaaacttgcttttgttg

SEQ ID NO: 9209 - protein, 145 aa, Homo sapiens; identical to SEQ ID NO: 9203

SEQ ID NO: 9210 - DNA, 4565 bp, Homo sapiens
gcatggcttcccagttcatcctcttctcattctgtggcttgccattcatcatcccgtgaagttttccctcttcctgaaattgtaacctaggcttcttttaatgctcgtattctgttgcttataataggaaccagcagcacaaacactgttggggcaacagtgaacagccaagccgcccaagctcagcctcctgccatgacgtccagcaggaagggcacattcacagatgacttgcacaagttggtagacaattgggcccgagatgccatgaatctctcaggcaggagaggaagcaaagggcacatgaattacgagggccctggaatggcaaggaagttctctgcacctgggcaactgtgcatctccatgacctcgaacctgggtggctctgcccccatctctgcagcatcagctacctctctaggtcacttcaccaagtctatgtgccccccacagcagtatggctttccagctaccccatttggcgctcaatggagtgggacgggtggcccagcaccacagccacttggccagttccaacctgtgggaactgcctccttgcagaatttcaacatcagcaatttgcagaaatccatcagcaaccccccaggctccaacctgcggaccacttagacctagagacattaactgaatagatctgggggcaggagatggaatgctgagggggtgggtgggggtgggaagtagcctatatactaactactagtgctgcatttaactggttatttcttgccagaggggaatgtttttaatactgcattgagccctcagaatggagagtctcccccgctccagttattggaatgggagaggaaggaaagaacagcttttttgtcaaggggcagcttcagaccatgctttcctgtttatctatactcagtaatgaggatgagggctaggaaagtcttgttcataaggaagctggagaactcaatgtaaaatcaaacccatctgtaatttcgagtgggtggagctcttgcttttggtacatgccctgaatccctcactccctcaagaatccgaaccacaggacaaaaaccacctactgggctctctcctaccctgccctcctcccttttttttacccctctcttttttattttttctttgctctttagaacccagtgaaaaataccagggtactggggtgcaactctttcttatgataggtcattagtgctttaagcaaaagatattagcagctttgactgcagcattagcaattaggaaaaaaaaaaaattaagttccctgcggacatgtaactttgccatcagttttgatgtggaaacactgtgatatataaaatgttgttggacaacagtagttttaagagtaaaatatgaaacgtttaaaaagttccaaaaaaagctagctctgtcctttacttattgagacactttaactttttcctttgtatttccattgtattagataaataaatgtgaatgtaaaattgtataaattactgtacttgaatacttctgtttcccagtgttgcttgctggacattttagtgccttggacttctattgcttctgccattagcatcaacttaccagaccccagatcaataaagggcatgtggaaggaaatcgtaggtccatgtgaccccagcagtccagcagtggttatgccaaagggaaattgaaaaagtatttttttaagtcattcaacaactttgtctagagcaggtgtaagatgagtagggtgggaagttaggttggcatcagtggttaaaaacagaaagttctgtttcgggaatagtgaggagggggtgttgtaacaaaattggacaacttaaaagaatggtgtgtgctgggtgaaagacaaagactaaagaatgaggaaacaaacgtgatgcctggccagtgactgtcatataaacctttcttatttgagctaggcttgaacagacgtgacctagaagaaactgaacataaagagaagggggtggggggctagttttcaagttggggaacctgatagtgaaaagtcacagatggagaaaattgctctcagaaaaactgtttggattgctttcctcttgttgcacatgtaccatgcatttctcagcttggggtactacattttgtggaaagttaatctatctatctttccacatctgaattaatcattctaggaaagaatacttattcctactcatttcctttatgatgtccaaatggttgcaggatcataatctattgtgccacctttatttctagaagtacaactaatatgttcacattttcaaataaataatactccccgtaagtaataactgcaaccaatcagtgttattcagtgctatgcctccttgtaatgggtagttattaattattttcagagctttccggaaatactgtcctaactggctatgtttaggatctttgttatctctgaagacaaagaaagaagctaggactcttaattttggggtgcttcttgactcttagttgggaaactgaaaatatttccaaccttttacccacgtcaatggcatattctgggaatcaccaccaccaccaccactaccacagaaagaggctggaggctcctgtaccctgttcattccttaagggccctgcttcccttagtaagtaagtaagttggtctacggccctaaatatgcaaatgagagctgaaggtttttaaaaggtagaaaggaaaagggcaagggcttccacccctgctttaaaatgatttatttattctctgcttgtatttcttgtggagagagtaaggatagaaccaacaaggggctgagtagctgagaaaggggccacccaagagtgaaacatactttataccagaggagcagtggagcctcatgcagcacattatcatttgttatttgggtttaataataattttgacatcttttcactcatacacaaaaaaagtcagaactggtgttatttactgttgatttcatcctcctgtgtatgaaataacaagcctagaggaatgaactagtgctactgaactgtttaaattatttttgtgttaatagtacactttgagtatctttttccacattaaaaactttctgaattataaatgttttccttacattatttaacaatgtacactgttaaaaataaaaataaaaattcaaactttgggggtttctcagcagccgttaattgtacattttgcactaactctgggtgttgcgcttcttgtaagattgcgctttgtgcttcagtttgttacctttgtagacttatttaatgaaaccattcaaataaaccaaacttgcttttgttgagctgtggggtttcatttccagaagattccttcacattctcactggcactattttgagttaagtgcaatttataactggatccctaattcctgggagctcctttgctgtctccttaacttcgaaaggaatagaaacggtcggctgccggctagtactttcagacttccttatctcaggttcacagcttcccaaatgggtctgagccaaaaaataggaagtcactgcttcaagattagccacagcccagcccaaaataatacgtctaaaaaaattattaaattggctgggcgcaatggctcatgcctataattctagtactttttactttgggaggccgaggtgggcagatcacttgaggtcagtttgagaccagcctggccaacatggagaaaccccgtctcctctactaaaaatacaaaaattagtcgggcgtcgtggtgggtgtctgtaatcccagctactcgggagcctgaggcaggagaattgcttgaatcctggcaggcggaggctgcaatgagtcaagatggcaccgctgcactccagcctgcgctacagagccagaccccccctctcaaaaaaaaagttgttaaactgcaaacttcattattttgggggaagaattatgaaacatctgagcactatgaaaagccaatttatggtcaaggtgggttacatctcacacctgaaatggggaagtagaaacagttgcgtttgagcatccctaattgaaatgctctgagatcagaaaatttctgagcactgacgtgatgccagaagtggaaaattccacacgtgacctcgtgtgacaagtcgcaaagcaccaggcatacaacagtttatgcagcgaccctaagagaaaaaaaaacccagccctcttcagctgcagtgtatcttcttatacaaaaactctgtttcatgcacaaaattatgtgtatgaggcatatacacgaaacacaggtgaattccacgttcagacttgggtcccatccccaaggtctcattatgtgtatacaaatattcaaaaaatgcaaaacaattctggtttcaagcatttcagataagcaatatatatatattctattttgttaataaggtatacgatttgctttctcaaaaatgccttttctggccagacacagtggctcacaccagtaatccctgtattttgtaaggcagaggtgggagtatcacttgggcccaagaggttgtggagagagctgtgtttgcaccactgaactccagtcagggcaacacagccagaccccgtctcaa

SEQ ID NO: 9211 - protein, 145 aa, Homo sapiens; identical to SEQ ID NO: 9203

SEQ ID NO: 9212 - DNA, 5508 bp, Homo sapiens
agggccagtttttccagtgctttctgtgagaatacttcattatttgctgatgacgcacttttccttgacctctgtagagactcttgaagacaactctgaaaagtgggctgtgactcccgatgcaggggatggtgtggtcaagccctcgtctagagcagacccagcccagacctctgacacattagccttgaacaaccagatggtgacccagaacaggactccacacagcgtttgccaccagaaaccacaagcaaaatctggatcttgggacctccaaacttatagcgctgaccaacgcacaacaggaaactgggaatctcataggaagagccaggacatgaagaaaaggaaatatgatccatcttaactgaggctcaggccacataattggactctgtcacaaagggactttggaaaactactttttggtcatgaaattgttcatcgctgctggagaatgaacgtcattgcgatttatcttgcttcattctgaaccttatcaagaggatctgactgagagcccactgcagttagagctgagcacttttgaaaagcttgtccatcactctagtagggagaggctctggacagatgaataccttttcttcggcttgtgaggcttcccactatttattactgaactattatgttaatgaagatggacattttaggaatcaccaatggctccttgccctcaagcaatataggccagacttggtcctaagcacctgcctcagcaattgtctacattcagttgttttgcataacgtctgccttctttcctttacggtccatgcctttaatgttgcccacattaagcactgtggatcacgacaggaaaaaggttggagcagtgcttttcactactttgtatcaatccaggctacaatcttcatttaatataaataatttatggatttatgacattacaatcctgcattgtttcaagactgacattttttcctaaggaaggaaataatcatctaagaccacgaaaaaaggctgttttttgtttttttttttttttttttttttgagacggggtctggctgtgttgccctgactggagttcagtggtgcaaacacagctctctccacaacctcttgggcccaagtgatactcccacctctgccttacaaaatacagggattactggtgtgagccactgtgtctggccagaaaaggcatttttgagaaagcaaatcgtataccttattaacaaaatagaatatatatatattgcttatctgaaatgcttgaaaccagaattgttttgcattttttgaatatttgtatacacataatgagaccttggggatgggacccaagtctgaacgtggaattcacctgtgtttcgtgtatatgcctcatacacataattttgtgcatgaaacagagtttttgtataagaagatacactgcagctgaagagggctgggtttttttttctcttagggtcgctgcataaactgttgtatgcctggtgctttgcgacttgtcacacgaggtcacgtgtggaattttccacttctggcatcacgtcagtgctcagaaattttctgatctcagagcatttcaattagggatgctcaaacgcaactgtttctacttccccatttcaggtgtgagatgtaacccaccttgaccataaattggcttttcatagtgctcagatgtttcataattcttcccccaaaataatgaagtttgcagtttaacaactttttttttgagagggggggtctggctctgtagcgcaggctggagtgcagcggtgccatcttgactcattgcagcctccgcctgccaggattcaagcaattctcctgcctcaggctcccgagtagctgggattacagacacccaccacgacgcccgactaatttttgtatttttagtagaggagacggggtttctccatgttggccaggctggtctcaaactgacctcaagtgatctgcccacctcggcctcccaaagtaaaaagtactagaattataggcatgagccattgcgcccagccaatttaataatttttttagacgtattattttgggctgggctgtggctaatcttgaagcagtgacttcctattttttggctcagacccatttgggaagctgtgaacctgagataaggaagtctgaaagtactagccggcagccgaccgtttctattcctttcgaagttaaggagacagcaaaggagctcccaggaattagggatccagttataaattgcacttaactcaaaatagtgccagtgagaatgtgaaggaatcttctggaaatgaaaccccacagctcaacaaaagcaagtttggtttatttgaatggtttcattaaataagtctacaaaggtaacaaactgaagcacaaagcgcaatcttacaagaagcgcaacacccagagttagtgcaaaatgtacaattaacggctgctgagaaacccccaaagtttgaatttttatttttatttttaacagtgtacattgttaaataatgtaaggaaaacatttataattcagaaagtttttaatgtggaaaaagatactcaaagtgtactattaacacaaaaataatttaaacagttcagtagcactagttcattcctctaggcttgttatttcatacacaggaggatgaaatcaacagtaaataacaccagttctgactttttttgtgtatgagtgaaaagatgtcaaaattattattaaacccaaataacaaatgataatgtgctgcatgaggctccactgctcctctggtataaagtatgtttcactcttgggtggcccctttctcagctactcagccccttgttggttctatccttactctctccacaagaaatacaagcagagaataaataaatcattttaaagcaggggtggaagcccttgcccttttcctttctaccttttaaaaaccttcagctctcatttgcatatttagggccgtagaccaacttacttacttactaagggaagcagggcccttaaggaatgaacagggtacaggagcctccagcctctttctgtggtagtggtggtggtggtggtgattcccagaatatgccattgacgtgggtaaaaggttggaaatattttcagtttcccaactaagagtcaagaagcaccccaaaattaagagtcctagcttctttctttgtcttcagagataacaaagatcctaaacatagccagttaggacagtatttccggaaagctctgaaaataattaataactacccattacaaggaggcatagcactgaataacactgattggttgcagttattacttacggggagtattatttatttgaaaatgtgaacatattagttgtacttctagaaataaaggtggcacaatagattatgatcctgcaaccatttggacatcataaaggaaatgagtaggaataagtattctttcctagaatgattaattcagatgtggaaagatagatagattaactttccacaaaatgtagtaccccaagctgagaaatgcatggtacatgtgcaacaagaggaaagcaatccaaacagtttttctgagagcaattttctccatctgtgacttttcactatcaggttccccaacttgaaaactagccccccacccccttctctttatgttcagtttcttctaggtcacgtctgttcaagcctagctcaaataagaaaggtttatatgacagtcactggccaggcatcacgtttgtttcctcattctttagtctttgtctttcacccagcacacaccattcttttaagttgtccaattttgttacaacaccccctcctcactattcccgaaacagaactttctgtttttaaccactgatgccaacctaacttcccaccctactcatcttacacctgctctagacaaagttgttgaatgacttaaaaaaatactttttcaatttccctttggcataaccactgctggactgctggggtcacatggacctacgatttccttccacatgccctttattgatctggggtctggtaagttgatgctaatggcagaagcaatagaagtccaaggcactaaaatgtccagcaagcaacactgggaaacagaagtattcaagtacagtaatttatacaattttacattcacatttatttatctaatacaatggaaatacaaaggaaaaagttaaagtgtctcaataagtaaaggacagagctagctttttttggaactttttaaacgtttcatattttactcttaaaactactgttgtccaacaacattttatatatcacagtgtttccacatcaaaactgatggcaaagttacatgtccgcagggaacttaattttttttttttcctaattgctaatgctgcagtcaaagctgctaatatcttttgcttaaagcactaatgacctatcataagaaagagttgcaccccagtaccctggtatttttcactgggttctaaagagcaaagaaaaaataaaaaagagaggggtaaaaaaaagggaggagggcagggtaggagagagcccagtaggtggtttttgtcctgtggttcggattcttgagggagtgagggattcagggcatgtaccaaaagcaagagctccacccactcgaaattacagatgggtttgattttacattgagttctccagcttccttatgaacaagactttcctagccctcatcctcattactgagtatagataaacaggaaagcatggtctgaagctgccccttgacaaaaaagctgttctttccttcctctcccattccaataactggagcgggggagactctccattctgagggctcaatgcagtattaaaaacattcccctctggcaagaaataaccagttaaatgcagcactagtagttagtatataggctacttcccacccccacccaccccctcagcattccatctcctgcccccagatctattcagttaatgtctctaggtctaagtggtccgcaggttggagcctggggggttgctgatggatttctgcaaattgctgatgttgaaattctgcaaggaggcagttcccacaggttggaactggccaagtggctgtggtgctgggccacccgtcccactccattgagcgccaaatggggtagctggaaagccatactgctgtggggggcacatagacttggtgaagtgacctagagaggtagctgatgctgcagagatgggggcagagccacccaggttcgaggtcatggagatgcacagttgcccaggtgcagagaacttccttgccattccagggccctgaaaacaaaaccaccacgtgtcaagtctggtgtgggccatggtataaaatgtgtggcgctaacatatacttctagtataatcctgtaagatacagcagaacagtcttctgtagtatttattggctctttatatttaccaagtaagggtgaaaataatcctcatgagagggagggatgtcatgtgcgtgtgtgtctgtgtgtgtgtagttgaggatgacgaagg

SEQ ID NO: 9213 - protein, 105 aa, Homo sapiens [sequence omitted]

SEQ ID NO: 9214 - DNA, 6416 bp, Homo sapiens
aggtcaaccagaatcaagatgtctgggactgaggaagcaattcttggaggacgtgacagccatcctgctgctggcggcggctcagtgttatgctttggacagtgccagtacacagcagaagagtaccaggccatccagaaggccctgaggcagaggctgggcccagaatacataagtagccgcatggctggcggaggccagaaggtgtgctacattgagggtcatcgggtaattaatctggccaatgagatgtttggttacaatggctgggcacactccatcacgcagcagaatgtggattttgttgacctcaacaatggcaagttctacgtgggagtctgtgcatttgtgagggtccagctgaaggatggttcatatcatgaagatgttggttatggtgttagtgagggcctcaagtccaaggctttatctttggagaaggcaaggaaggaggcggtgacagacgggctgaagcgagccctcaggagttttgggaatgcacttggaaactgtattctggacaaagactacctgagatcactaaataagcttccacgccagttgcctcttgaagtggatttaactaaagcgaagagacaagatcttgaaccgtctgtggaggaggcaagatacaacagctgccgaccgaacatggccctgggacacccacagctgcagcaggtgacctccccttccagacccagccatgctgtgataccggcggaccaggactgcagctcccgaagcctgagctcatccgccgtggagagcgaggccacgcaccagcggaagctccggcagaagcagctgcagcagcagttccgggagcggatggagaagcagcaggttcgagtctccacgccgtcagctgagaagagtgaggcagcgcctccggcccctcctgtgacgcacagcactcctgtaactgtctcagaaccactcctggagaaagacttccttgcaggagtgactcaagaattaatcaagactcttgaagacaactctgaaaagtgggctgtgactcccgatgcaggggatggtgtggtcaagccctcgtctagagcagacccagcccagacctctgacacattagccttgaacaaccagatggtgacccagaacaggactccacacagcgtttgccaccagaaaccacaagcaaaatctggatcttgggacctccaaacttatagcgctgaccaacgcacaacaggaaactgggaatctcataggaagagccaggacatgaagaaaaggaaatatgatccatcttaactgaggctcaggccacataattggactctgtcacaaagggactttggaaaactactttttggtcatgaaattgttcatcgctgctggagaatgaacgtcattgcgatttatcttgcttcattctgaaccttatcaagaggatctgactgagagcccactgcagttagagctgagcacttttgaaaagcttgtccatcactctagtagggagaggctctggacagatgaataccttttcttcggcttgtgaggcttcccactatttattactgaactattatgttaatgaagatggacattttaggaatcaccaatggctccttgccctcaagcaatataggccagacttggtcctaagcacctgcctcagcaattgtctacattcagttgttttgcataacgtctgccttctttcctttacggtccatgcctttaatgttgcccacattaagcactgtggatcacgacaggaaaaaggttggagcagtgcttttcactactttgtatcaatccaggctacaatcttcatttaatataaataatttatggatttatgacattacaatcctgcattgtttcaagactgacattttttcctaaggaaggaaataatcatctaagaccacgaaaaaaggctgttttttgtttttttttttttttttttttttgagacggggtctggctgtgttgccctgactggagttcagtggtgcaaacacagctctctccacaacctcttgggcccaagtgatactcccacctctgccttacaaaatacagggattactggtgtgagccactgtgtctggccagaaaaggcatttttgagaaagcaaatcgtataccttattaacaaaatagaatatatatatattgcttatctgaaatgcttgaaaccagaattgttttgcattttttgaatatttgtatacacataatgagaccttggggatgggacccaagtctgaacgtggaattcacctgtgtttcgtgtatatgcctcatacacataattttgtgcatgaaacagagtttttgtataagaagatacactgcagctgaagagggctgggtttttttttctcttagggtcgctgcataaactgttgtatgcctggtgctttgcgacttgtcacacgaggtcacgtgtggaattttccacttctggcatcacgtcagtgctcagaaattttctgatctcagagcatttcaattagggatgctcaaacgcaactgtttctacttccccatttcaggtgtgagatgtaacccaccttgaccataaattggcttttcatagtgctcagatgtttcataattcttcccccaaaataatgaagtttgcagtttaacaactttttttttgagagggggggtctggctctgtagcgcaggctggagtgcagcggtgccatcttgactcattgcagcctccgcctgccaggattcaagcaattctcctgcctcaggctcccgagtagctgggattacagacacccaccacgacgcccgactaatttttgtatttttagtagaggagacggggtttctccatgttggccaggctggtctcaaactgacctcaagtgatctgcccacctcggcctcccaaagtaaaaagtactagaattataggcatgagccattgcgcccagccaatttaataatttttttagacgtattattttgggctgggctgtggctaatcttgaagcagtgacttcctattttttggctcagacccatttgggaagctgtgaacctgagataaggaagtctgaaagtactagccggcagccgaccgtttctattcctttcgaagttaaggagacagcaaaggagctcccaggaattagggatccagttataaattgcacttaactcaaaatagtgccagtgagaatgtgaaggaatcttctggaaatgaaaccccacagctcaacaaaagcaagtttggtttatttgaatggtttcattaaataagtctacaaaggtaacaaactgaagcacaaagcgcaatcttacaagaagcgcaacacccagagttagtgcaaaatgtacaattaacggctgctgagaaacccccaaagtttgaatttttatttttatttttaacagtgtacattgttaaataatgtaaggaaaacatttataattcagaaagtttttaatgtggaaaaagatactcaaagtgtactattaacacaaaaataatttaaacagttcagtagcactagttcattcctctaggcttgttatttcatacacaggaggatgaaatcaacagtaaataacaccagttctgactttttttgtgtatgagtgaaaagatgtcaaaattattattaaacccaaataacaaatgataatgtgctgcatgaggctccactgctcctctggtataaagtatgtttcactcttgggtggcccctttctcagctactcagccccttgttggttctatccttactctctccacaagaaatacaagcagagaataaataaatcattttaaagcaggggtggaagcccttgcccttttcctttctaccttttaaaaaccttcagctctcatttgcatatttagggccgtagaccaacttacttacttactaagggaagcagggcccttaaggaatgaacagggtacaggagcctccagcctctttctgtggtagtggtggtggtggtggtgattcccagaatatgccattgacgtgggtaaaaggttggaaatattttcagtttcccaactaagagtcaagaagcaccccaaaattaagagtcctagcttctttctttgtcttcagagataacaaagatcctaaacatagccagttaggacagtatttccggaaagctctgaaaataattaataactacccattacaaggaggcatagcactgaataacactgattggttgcagttattacttacggggagtattatttatttgaaaatgtgaacatattagttgtacttctagaaataaaggtggcacaatagattatgatcctgcaaccatttggacatcataaaggaaatgagtaggaataagtattctttcctagaatgattaattcagatgtggaaagatagatagattaactttccacaaaatgtagtaccccaagctgagaaatgcatggtacatgtgcaacaagaggaaagcaatccaaacagtttttctgagagcaattttctccatctgtgacttttcactatcaggttccccaacttgaaaactagccccccacccccttctctttatgttcagtttcttctaggtcacgtctgttcaagcctagctcaaataagaaaggtttatatgacagtcactggccaggcatcacgtttgtttcctcattctttagtctttgtctttcacccagcacacaccattcttttaagttgtccaattttgttacaacaccccctcctcactattcccgaaacagaactttctgtttttaaccactgatgccaacctaacttcccaccctactcatcttacacctgctctagacaaagttgttgaatgacttaaaaaaatactttttcaatttccctttggcataaccactgctggactgctggggtcacatggacctacgatttccttccacatgccctttattgatctggggtctggtaagttgatgctaatggcagaagcaatagaagtccaaggcactaaaatgtccagcaagcaacactgggaaacagaagtattcaagtacagtaatttatacaattttacattcacatttatttatctaatacaatggaaatacaaaggaaaaagttaaagtgtctcaataagtaaaggacagagctagctttttttggaactttttaaacgtttcatattttactcttaaaactactgttgtccaacaacattttatatatcacagtgtttccacatcaaaactgatggcaaagttacatgtccgcagggaacttaattttttttttttcctaattgctaatgctgcagtcaaagctgctaatatcttttgcttaaagcactaatgacctatcataagaaagagttgcaccccagtaccctggtatttttcactgggttctaaagagcaaagaaaaaataaaaaagagaggggtaaaaaaaagggaggagggcagggtaggagagagcccagtaggtggtttttgtcctgtggttcggattcttgagggagtgagggattcagggcatgtaccaaaagcaagagctccacccactcgaaattacagatgggtttgattttacattgagttctccagcttccttatgaacaagactttcctagccctcatcctcattactgagtatagataaacaggaaagcatggtctgaagctgccccttgacaaaaaagctgttctttccttcctctcccattccaataactggagcgggggagactctccattctgagggctcaatgcagtattaaaaacattcccctctggcaagaaataaccagttaaatgcagcactagtagttagtatataggctacttcccacccccacccaccccctcagcattccatctcctgcccccagatctattcagttaatgtctctaggtctaagtggtccgcaggttggagcctggggggttgctgatggatttctgcaaattgctgatgttgaaattctgcaaggaggcagttcccacaggttggaactggccaagtggctgtggtgctgggccacccgtcccactccattgagcgccaaatggggtagctggaaagccatactgctgtggggggcacatagacttggtgaagtgacctagagaggtagctgatgctgcagagatgggggcagagccacccaggttcgaggtcatggagatgcacagttgcccaggtgcagagaacttccttgccattccagggccctgaaaacaaaaccaccacgtgtcaagtctggtgtgggccatggtataaaatgtgtggcgctaacatatacttctagtataatcctgtaagatacagcagaacagtcttctgtagtatttattggctctttatatttaccaagtaagggtgaaaataatcctcatgagagggagggatgtcatgtgcgtgtgtgtctgtgtgtgtgtagttgaggatgacgaagg

SEQ ID NO: 9215 - protein, 418 aa, Homo sapiens; identical to SEQ ID NO: 1337

SEQ ID NO: 9216 - DNA, 6765 bp, Homo sapiens
gcggcctccatctaagatctcttccccttgtccatagcctagatcgagctccctgtgtgcaccgcgcgctgcccgaggcgcaggtcaaccagaatcaagatgtctgggactgaggaagcaattcttggaggacgtgacagccatcctgctgctggcggcggctcagtgttatgctttggacagtgccagtacacagcagaagagtaccaggccatccagaaggccctgaggcagaggctgggcccagaatacataagtagccgcatggctggcggaggccagaaggtgtgctacattgagggtcatcgggtaattaatctggccaatgagatgtttggttacaatggctgggcacactccatcacgcagcagaatgtgggtgagtatgctctccagcagtggggacttctgcactgtccagctcctgctgaaagtctgctgtgggtgaggaggtaaggtaggtggactcagctgccagcaggaggaatggttgtggcccagcggtcagtgtcctcttcaacttgctctctttcccactcctagattttgttgacctcaacaatggcaagttctacgtgggagtctgtgcatttgtgagggtccagctgaaggtgaggggatggagtagacctgctgcccggaaggatcagtgggtggtaggagaaggatggttcatatcatgaagatgttggttatggtgttagtgagggcctcaagtccaaggctttatctttggagaaggcaaggaaggaggcggtgacagacgggctgaagcgagccctcaggagttttgggaatgcacttggaaactgtattctggacaaagactacctgagatcactaaataagcttccacgccagttgcctcttgaagtggatttaactaaagcgaagagacaagatcttgaaccgtctgtggaggaggcaagatacaacagctgccgaccgaacatggccctgggacacccacagctgcagcaggtgacctccccttccagacccagccatgctgtgataccggcggaccaggactgcagctcccgccgcggctgttgctcaggagcccgtcctcgccgccgccctctcatgcagaagcctgagctcatccgccgtggagagcgaggccacgcaccagcggaagctccggcagaagcagctgcagcagcagttccgggagcggatggagaagcagcaggttcgagtctccacgccgtcagctgagaagagtgaggcagcgcctccggcccctcctgtgacgcacagcactcctgtaactgtctcagaaccactcctggagaaagacttccttgcaggagtgactcaagaattaatcaagactcttgaagacaactctgaaaagtgggctgtgactcccgatgcaggggatggtgtggtcaagccctcgtctagagcagacccagcccagacctctgacacattagccttgaacaaccagatggtgacccagaacaggactccacacagcgtttgccaccagaaaccacaagcaaaatctggatcttgggacctccaaacttatagcgctgaccaacgcacaacaggaaactgggaatctcataggaagagccaggacatgaagaaaaggaaatatgatccatcttaactgaggctcaggccacataattggactctgtcacaaagggactttggaaaactactttttggtcatgaaattgttcatcgctgctggagaatgaacgtcattgcgatttatcttgcttcattctgaaccttatcaagaggatctgactgagagcccactgcagttagagctgagcacttttgaaaagcttgtccatcactctagtagggagaggctctggacagatgaataccttttcttcggcttgtgaggcttcccactatttattactgaactattatgttaatgaagatggacattttaggaatcaccaatggctccttgccctcaagcaatataggccagacttggtcctaagcacctgcctcagcaattgtctacattcagttgttttgcataacgtctgccttctttcctttacggtccatgcctttaatgttgcccacattaagcactgtggatcacgacaggaaaaaggttggagcagtgcttttcactactttgtatcaatccaggctacaatcttcatttaatataaataatttatggatttatgacattacaatcctgcattgtttcaagactgacattttttcctaaggaaggaaataatcatctaagaccacgaaaaaaggctgttttttgtttttttttttttttttttttttgagacggggtctggctgtgttgccctgactggagttcagtggtgcaaacacagctctctccacaacctcttgggcccaagtgatactcccacctctgccttacaaaatacagggattactggtgtgagccactgtgtctggccagaaaaggcatttttgagaaagcaaatcgtataccttattaacaaaatagaatatatatatattgcttatctgaaatgcttgaaaccagaattgttttgcattttttgaatatttgtatacacataatgagaccttggggatgggacccaagtctgaacgtggaattcacctgtgtttcgtgtatatgcctcatacacataattttgtgcatgaaacagagtttttgtataagaagatacactgcagctgaagagggctgggtttttttttctcttagggtcgctgcataaactgttgtatgcctggtgctttgcgacttgtcacacgaggtcacgtgtggaattttccacttctggcatcacgtcagtgctcagaaattttctgatctcagagcatttcaattagggatgctcaaacgcaactgtttctacttccccatttcaggtgtgagatgtaacccaccttgaccataaattggcttttcatagtgctcagatgtttcataattcttcccccaaaataatgaagtttgcagtttaacaactttttttttgagagggggggtctggctctgtagcgcaggctggagtgcagcggtgccatcttgactcattgcagcctccgcctgccaggattcaagcaattctcctgcctcaggctcccgagtagctgggattacagacacccaccacgacgcccgactaatttttgtatttttagtagaggagacggggtttctccatgttggccaggctggtctcaaactgacctcaagtgatctgcccacctcggcctcccaaagtaaaaagtactagaattataggcatgagccattgcgcccagccaatttaataatttttttagacgtattattttgggctgggctgtggctaatcttgaagcagtgacttcctattttttggctcagacccatttgggaagctgtgaacctgagataaggaagtctgaaagtactagccggcagccgaccgtttctattcctttcgaagttaaggagacagcaaaggagctcccaggaattagggatccagttataaattgcacttaactcaaaatagtgccagtgagaatgtgaaggaatcttctggaaatgaaaccccacagctcaacaaaagcaagtttggtttatttgaatggtttcattaaataagtctacaaaggtaacaaactgaagcacaaagcgcaatcttacaagaagcgcaacacccagagttagtgcaaaatgtacaattaacggctgctgagaaacccccaaagtttgaatttttatttttatttttaacagtgtacattgttaaataatgtaaggaaaacatttataattcagaaagtttttaatgtggaaaaagatactcaaagtgtactattaacacaaaaataatttaaacagttcagtagcactagttcattcctctaggcttgttatttcatacacaggaggatgaaatcaacagtaaataacaccagttctgactttttttgtgtatgagtgaaaagatgtcaaaattattattaaacccaaataacaaatgataatgtgctgcatgaggctccactgctcctctggtataaagtatgtttcactcttgggtggcccctttctcagctactcagccccttgttggttctatccttactctctccacaagaaatacaagcagagaataaataaatcattttaaagcaggggtggaagcccttgcccttttcctttctaccttttaaaaaccttcagctctcatttgcatatttagggccgtagaccaacttacttacttactaagggaagcagggcccttaaggaatgaacagggtacaggagcctccagcctctttctgtggtagtggtggtggtggtggtgattcccagaatatgccattgacgtgggtaaaaggttggaaatattttcagtttcccaactaagagtcaagaagcaccccaaaattaagagtcctagcttctttctttgtcttcagagataacaaagatcctaaacatagccagttaggacagtatttccggaaagctctgaaaataattaataactacccattacaaggaggcatagcactgaataacactgattggttgcagttattacttacggggagtattatttatttgaaaatgtgaacatattagttgtacttctagaaataaaggtggcacaatagattatgatcctgcaaccatttggacatcataaaggaaatgagtaggaataagtattctttcctagaatgattaattcagatgtggaaagatagatagattaactttccacaaaatgtagtaccccaagctgagaaatgcatggtacatgtgcaacaagaggaaagcaatccaaacagtttttctgagagcaattttctccatctgtgacttttcactatcaggttccccaacttgaaaactagccccccacccccttctctttatgttcagtttcttctaggtcacgtctgttcaagcctagctcaaataagaaaggtttatatgacagtcactggccaggcatcacgtttgtttcctcattctttagtctttgtctttcacccagcacacaccattcttttaagttgtccaattttgttacaacaccccctcctcactattcccgaaacagaactttctgtttttaaccactgatgccaacctaacttcccaccctactcatcttacacctgctctagacaaagttgttgaatgacttaaaaaaatactttttcaatttccctttggcataaccactgctggactgctggggtcacatggacctacgatttccttccacatgccctttattgatctggggtctggtaagttgatgctaatggcagaagcaatagaagtccaaggcactaaaatgtccagcaagcaacactgggaaacagaagtattcaagtacagtaatttatacaattttacattcacatttatttatctaatacaatggaaatacaaaggaaaaagttaaagtgtctcaataagtaaaggacagagctagctttttttggaactttttaaacgtttcatattttactcttaaaactactgttgtccaacaacattttatatatcacagtgtttccacatcaaaactgatggcaaagttacatgtccgcagggaacttaattttttttttttcctaattgctaatgctgcagtcaaagctgctaatatcttttgcttaaagcactaatgacctatcataagaaagagttgcaccccagtaccctggtatttttcactgggttctaaagagcaaagaaaaaataaaaaagagaggggtaaaaaaaagggaggagggcagggtaggagagagcccagtaggtggtttttgtcctgtggttcggattcttgagggagtgagggattcagggcatgtaccaaaagcaagagctccacccactcgaaattacagatgggtttgattttacattgagttctccagcttccttatgaacaagactttcctagccctcatcctcattactgagtatagataaacaggaaagcatggtctgaagctgccccttgacaaaaaagctgttctttccttcctctcccattccaataactggagcgggggagactctccattctgagggctcaatgcagtattaaaaacattcccctctggcaagaaataaccagttaaatgcagcactagtagttagtatataggctacttcccacccccacccaccccctcagcattccatctcctgcccccagatctattcagttaatgtctctaggtctaagtggtccgcaggttggagcctggggggttgctgatggatttctgcaaattgctgatgttgaaattctgcaaggaggcagttcccacaggttggaactggccaagtggctgtggtgctgggccacccgtcccactccattgagcgccaaatggggtagctggaaagccatactgctgtggggggcacatagacttggtgaagtgacctagagaggtagctgatgctgcagagatgggggcagagccacccaggttcgaggtcatggagatgcacagttgcccaggtgcagagaacttccttgccattccagggccctgaaaacaaaaccaccacgtgtcaagtctggtgtgggccatggtataaaatgtgtggcgctaacatatacttctagtataatcctgtaagatacagcagaacagtcttctgtagtatttattggctctttatatttaccaagtaagggtgaaaataatcctcatgagagggagggatgtcatgtgcgtgtgtgtctgtgtgtgtgtagttgaggatgacgaagg

SEQ ID NO: 9217 - protein, 147 aa, Homo sapiens
MEKQQVRVSTPSAEKSEAAPPAPPVTHSTPVTVSEPLLEKDFLAGVTQELIKTLEDNSEKWAVTPDAGDGVVKPSSRADPAQTSDTLALNNQMVTQNRTPHSVCHQKPQAKSGSWDLQTYSADQRTTGNWESHRKSQDMKKRKYDPS

SEQ ID NO: 9218 - DNA, 6930 bp, Homo sapiens
gctcgcgcacccttcccattctcctctgcgcggcctccatctaagatctcttccccttgtccatagcctagatcgagctccctgtgtgcaccgcgcgctgcccgaggcgcaggtcaaccagaatcaagatgtctgggactgaggaagcaattcttggaggacgtgacagccatcctgctgctggcggcggctcagtgttatgctttggacagtgccagtacacagcagaagagtaccaggccatccagaaggccctgaggcagaggctgggcccagaatacataagtagccgcatggctggcggaggccagaaggtgtgctacattgagggtcatcgggtaattaatctggccaatgagatgtttggttacaatggctgggcacactccatcacgcagcagaatgtggattttgttgacctcaacaatggcaagttctacgtgggagtctgtgcatttgtgagggtccagctgaaggtgaggggatggagtagacctgctgcccggaaggatcagtgggtggtaggagaaggatggttcatatcatgaagatgttggttatggtgttagtgagggcctcaagtccaaggctttatctttggagaaggcaaggaaggaggcggtgacagacgggctgaagcgagccctcaggtgagcgcggggctgggagtctaacctgcgtcatttcagctcttgcttcagagcagatttcgattttttttggaagaggtaacacatccacatggttcaaaaatccaagcagcgtggaaggtaattctcacccctgccctggttcctgtctgccgttttcccactttcgttagtattttttcaatgtttctgtttcaggcttcccttgctgggagtaagtggtagaatcctgtactctctcttctccgtgcactcagtcatgtgtgccggaggccttcccactcctactgcgagtgcacagacagcaccctcctctccgtgctcctcagcagtcctccgctacgcacaggagttttgggaatgcacttggaaactgtattctggacaaagactacctgagatcactaaataagcttccacgccagttgcctcttgaagtggatttaactaaagcgaagagacaagatcttgaaccgtctgtggaggaggcaagatacaacagctgccgaccgaacatggccctgggacacccacagctgcagcaggtgacctccccttccagacccagccatgctgtgataccggcggaccaggactgcagctcccgaagcctgagctcatccgccgtggagagcgaggccacgcaccagcggaagctccggcagaagcagctgcagcagcagttccgggagcggatggagaagcagcaggttcgagtctccacgccgtcagctgagaagagtgaggcagcgcctccggcccctcctgtgacgcacagcactcctgtaactgtctcagaaccactcctggagaaagacttccttgcaggagtgactcaagaattaatcaagactcttgaagacaactctgaaaagtgggctgtgactcccgatgcaggggatggtgtggtcaagccctcgtctagagcagacccagcccagacctctgacacattagccttgaacaaccagatggtgacccagaacaggactccacacagcgtttgccaccagaaaccacaagcaaaatctggatcttgggacctccaaacttatagcgctgaccaacgcacaacaggaaactgggaatctcataggaagagccaggacatgaagaaaaggaaatatgatccatcttaactgaggctcaggccacataattggactctgtcacaaagggactttggaaaactactttttggtcatgaaattgttcatcgctgctggagaatgaacgtcattgcgatttatcttgcttcattctgaaccttatcaagaggatctgactgagagcccactgcagttagagctgagcacttttgaaaagcttgtccatcactctagtagggagaggctctggacagatgaataccttttcttcggcttgtgaggcttcccactatttattactgaactattatgttaatgaagatggacattttaggaatcaccaatggctccttgccctcaagcaatataggccagacttggtcctaagcacctgcctcagcaattgtctacattcagttgttttgcataacgtctgccttctttcctttacggtccatgcctttaatgttgcccacattaagcactgtggatcacgacaggaaaaaggttggagcagtgcttttcactactttgtatcaatccaggctacaatcttcatttaatataaataatttatggatttatgacattacaatcctgcattgtttcaagactgacattttttcctaaggaaggaaataatcatctaagaccacgaaaaaaggctgttttttgtttttttttttttttttttttttgagacggggtctggctgtgttgccctgactggagttcagtggtgcaaacacagctctctccacaacctcttgggcccaagtgatactcccacctctgccttacaaaatacagggattactggtgtgagccactgtgtctggccagaaaaggcatttttgagaaagcaaatcgtataccttattaacaaaatagaatatatatatattgcttatctgaaatgcttgaaaccagaattgttttgcattttttgaatatttgtatacacataatgagaccttggggatgggacccaagtctgaacgtggaattcacctgtgtttcgtgtatatgcctcatacacataattttgtgcatgaaacagagtttttgtataagaagatacactgcagctgaagagggctgggtttttttttctcttagggtcgctgcataaactgttgtatgcctggtgctttgcgacttgtcacacgaggtcacgtgtggaattttccacttctggcatcacgtcagtgctcagaaattttctgatctcagagcatttcaattagggatgctcaaacgcaactgtttctacttccccatttcaggtgtgagatgtaacccaccttgaccataaattggcttttcatagtgctcagatgtttcataattcttcccccaaaataatgaagtttgcagtttaacaactttttttttgagagggggggtctggctctgtagcgcaggctggagtgcagcggtgccatcttgactcattgcagcctccgcctgccaggattcaagcaattctcctgcctcaggctcccgagtagctgggattacagacacccaccacgacgcccgactaatttttgtatttttagtagaggagacggggtttctccatgttggccaggctggtctcaaactgacctcaagtgatctgcccacctcggcctcccaaagtaaaaagtactagaattataggcatgagccattgcgcccagccaatttaataatttttttagacgtattattttgggctgggctgtggctaatcttgaagcagtgacttcctattttttggctcagacccatttgggaagctgtgaacctgagataaggaagtctgaaagtactagccggcagccgaccgtttctattcctttcgaagttaaggagacagcaaaggagctcccaggaattagggatccagttataaattgcacttaactcaaaatagtgccagtgagaatgtgaaggaatcttctggaaatgaaaccccacagctcaacaaaagcaagtttggtttatttgaatggtttcattaaataagtctacaaaggtaacaaactgaagcacaaagcgcaatcttacaagaagcgcaacacccagagttagtgcaaaatgtacaattaacggctgctgagaaacccccaaagtttgaatttttatttttatttttaacagtgtacattgttaaataatgtaaggaaaacatttataattcagaaagtttttaatgtggaaaaagatactcaaagtgtactattaacacaaaaataatttaaacagttcagtagcactagttcattcctctaggcttgttatttcatacacaggaggatgaaatcaacagtaaataacaccagttctgactttttttgtgtatgagtgaaaagatgtcaaaattattattaaacccaaataacaaatgataatgtgctgcatgaggctccactgctcctctggtataaagtatgtttcactcttgggtggcccctttctcagctactcagccccttgttggttctatccttactctctccacaagaaatacaagcagagaataaataaatcattttaaagcaggggtggaagcccttgcccttttcctttctaccttttaaaaaccttcagctctcatttgcatatttagggccgtagaccaacttacttacttactaagggaagcagggcccttaaggaatgaacagggtacaggagcctccagcctctttctgtggtagtggtggtggtggtggtgattcccagaatatgccattgacgtgggtaaaaggttggaaatattttcagtttcccaactaagagtcaagaagcaccccaaaattaagagtcctagcttctttctttgtcttcagagataacaaagatcctaaacatagccagttaggacagtatttccggaaagctctgaaaataattaataactacccattacaaggaggcatagcactgaataacactgattggttgcagttattacttacggggagtattatttatttgaaaatgtgaacatattagttgtacttctagaaataaaggtggcacaatagattatgatcctgcaaccatttggacatcataaaggaaatgagtaggaataagtattctttcctagaatgattaattcagatgtggaaagatagatagattaactttccacaaaatgtagtaccccaagctgagaaatgcatggtacatgtgcaacaagaggaaagcaatccaaacagtttttctgagagcaattttctccatctgtgacttttcactatcaggttccccaacttgaaaactagccccccacccccttctctttatgttcagtttcttctaggtcacgtctgttcaagcctagctcaaataagaaaggtttatatgacagtcactggccaggcatcacgtttgtttcctcattctttagtctttgtctttcacccagcacacaccattcttttaagttgtccaattttgttacaacaccccctcctcactattcccgaaacagaactttctgtttttaaccactgatgccaacctaacttcccaccctactcatcttacacctgctctagacaaagttgttgaatgacttaaaaaaatactttttcaatttccctttggcataaccactgctggactgctggggtcacatggacctacgatttccttccacatgccctttattgatctggggtctggtaagttgatgctaatggcagaagcaatagaagtccaaggcactaaaatgtccagcaagcaacactgggaaacagaagtattcaagtacagtaatttatacaattttacattcacatttatttatctaatacaatggaaatacaaaggaaaaagttaaagtgtctcaataagtaaaggacagagctagctttttttggaactttttaaacgtttcatattttactcttaaaactactgttgtccaacaacattttatatatcacagtgtttccacatcaaaactgatggcaaagttacatgtccgcagggaacttaattttttttttttcctaattgctaatgctgcagtcaaagctgctaatatcttttgcttaaagcactaatgacctatcataagaaagagttgcaccccagtaccctggtatttttcactgggttctaaagagcaaagaaaaaataaaaaagagaggggtaaaaaaaagggaggagggcagggtaggagagagcccagtaggtggtttttgtcctgtggttcggattcttgagggagtgagggattcagggcatgtaccaaaagcaagagctccacccactcgaaattacagatgggtttgattttacattgagttctccagcttccttatgaacaagactttcctagccctcatcctcattactgagtatagataaacaggaaagcatggtctgaagctgccccttgacaaaaaagctgttctttccttcctctcccattccaataactggagcgggggagactctccattctgagggctcaatgcagtattaaaaacattcccctctggcaagaaataaccagttaaatgcagcactagtagttagtatataggctacttcccacccccacccaccccctcagcattccatctcctgcccccagatctattcagttaatgtctctaggtctaagtggtccgcaggttggagcctggggggttgctgatggatttctgcaaattgctgatgttgaaattctgcaaggaggcagttcccacaggttggaactggccaagtggctgtggtgctgggccacccgtcccactccattgagcgccaaatggggtagctggaaagccatactgctgtggggggcacatagacttggtgaagtgacctagagaggtagctgatgctgcagagatgggggcagagccacccaggttcgaggtcatggagatgcacagttgcccaggtgcagagaacttccttgccattccagggccctgaaaacaaaaccaccacgtgtcaagtctggtgtgggccatggtataaaatgtgtggcgctaacatatacttctagtataatcctgtaagatacagcagaacagtcttctgtagtatttattggctctttatatttaccaagtaagggtgaaaataatcctcatgagagggagggatgtcatgtgcgtgtgtgtctgtgtgtgtgtagttgaggatgacgaagg

SEQ ID NO: 9219 - protein, 207 aa, Homo sapiens
MALGHPQLQQVTSPSRPSHAVIPADQDCSSRSLSSSAVESEATHQRKLRQKQLQQQFRERMEKQQVRVSTPSAEKSEAAPPAPPVTHSTPVTVSEPLLEKDFLAGVTQELIKTLEDNSEKWAVTPDAGDGVVKPSSRADPAQTSDTLALNNQMVTQNRTPHSVCHQKPQAKSGSWDLQTYSADQRTTGNWESHRKSQDMKKRKYDPS

SEQ ID NO: 9220 - DNA, 6526 bp, Homo sapiens
gctcgcgcacccttcccattctcctctgcgcggcctccatctaagatctcttccccttgtccatagcctagatcgagctccctgtgtgcaccgcgcgctgcccgaggcgcaggtcaaccagaatcaagatgtctgggactgaggaagcaattcttggaggacgtgacagccatcctgctgctggcggcggctcagtgttatgctttggacagtgccagtacacagcagaagagtaccaggccatccagaaggccctgaggcagaggctgggcccagaatacataagtagccgcatggctggcggaggccagaaggtgtgctacattgagggtcatcgggtaattaatctggccaatgagatgtttggttacaatggctgggcacactccatcacgcagcagaatgtggattttgttgacctcaacaatggcaagttctacgtgggagtctgtgcatttgtgagggtccagctgaaggatggttcatatcatgaagatgttggttatggtgttagtgagggcctcaagtccaaggctttatctttggagaaggcaaggaaggaggcggtgacagacgggctgaagcgagccctcaggagttttgggaatgcacttggaaactgtattctggacaaagactacctgagatcactaaataagcttccacgccagttgcctcttgaagtggatttaactaaagcgaagagacaagatcttgaaccgtctgtggaggaggcaagatacaacagctgccgaccgaacatggccctgggacacccacagctgcagcaggtgacctccccttccagacccagccatgctgtgataccggcggaccaggactgcagctcccgaagcctgagctcatccgccgtggagagcgaggccacgcaccagcggaagctccggcagaagcagctgcagcagcagttccgggagcggatggagaagcagcaggttcgagtctccacgccgtcagctgagaagagtgaggcagcgcctccggcccctcctgtgacgcacagcactcctgtaactgtctcagaaccactcctggagaaagacttccttgcaggagtgactcaagaattaatcaagactcttgaagacaactctgaaaagtgggctgtgactcccgatgcaggggatggtgtggtcaagccctcgtctagagcagacccagcccagacctctgacacattagccttgaacaaccagatggtgacccagaacaggactccacacagcgtttgccaccagaaaccacaagcaaaatctggatcttgggacctccaaacttatagcgctgaccaacgcacaacaggaaactgggaatctcataggaagagccaggacatgaagaaaaggaaatatgatccatcttaactgaggctcaggccacataattggactctgtcacaaagggactttggaaaactactttttggtcatgaaattgttcatcgctgctggagaatgaacgtcattgcgatttatcttgcttcattctgaaccttatcaagaggatctgactgagagcccactgcagttagagctgagcacttttgaaaagcttgtccatcactctagtagggagaggctctggacagatgaataccttttcttcggcttgtgaggcttcccactatttattactgaactattatgttaatgaagatggacattttaggaatcaccaatggctccttgccctcaagcaatataggccagacttggtcctaagcacctgcctcagcaattgtctacattcagttgttttgcataacgtctgccttctttcctttacggtccatgcctttaatgttgcccacattaagcactgtggatcacgacaggaaaaaggttggagcagtgcttttcactactttgtatcaatccaggctacaatcttcatttaatataaataatttatggatttatgacattacaatcctgcattgtttcaagactgacattttttcctaaggaaggaaataatcatctaagaccacgaaaaaaggctgttttttgtttttttttttttttttttttttgagacggggtctggctgtgttgccctgactggagttcagtggtgcaaacacagctctctccacaacctcttgggcccaagtgatactcccacctctgccttacaaaatacagggattactggtgtgagccactgtgtctggccagaaaaggcatttttgagaaagcaaatcgtataccttattaacaaaatagaatatatatatattgcttatctgaaatgcttgaaaccagaattgttttgcattttttgaatatttgtatacacataatgagaccttggggatgggacccaagtctgaacgtggaattcacctgtgtttcgtgtatatgcctcatacacataattttgtgcatgaaacagagtttttgtataagaagatacactgcagctgaagagggctgggtttttttttctcttagggtcgctgcataaactgttgtatgcctggtgctttgcgacttgtcacacgaggtcacgtgtggaattttccacttctggcatcacgtcagtgctcagaaattttctgatctcagagcatttcaattagggatgctcaaacgcaactgtttctacttccccatttcaggtgtgagatgtaacccaccttgaccataaattggcttttcatagtgctcagatgtttcataattcttcccccaaaataatgaagtttgcagtttaacaactttttttttgagagggggggtctggctctgtagcgcaggctggagtgcagcggtgccatcttgactcattgcagcctccgcctgccaggattcaagcaattctcctgcctcaggctcccgagtagctgggattacagacacccaccacgacgcccgactaatttttgtatttttagtagaggagacggggtttctccatgttggccaggctggtctcaaactgacctcaagtgatctgcccacctcggcctcccaaagtaaaaagtactagaattataggcatgagccattgcgcccagccaatttaataatttttttagacgtattattttgggctgggctgtggctaatcttgaagcagtgacttcctattttttggctcagacccatttgggaagctgtgaacctgagataaggaagtctgaaagtactagccggcagccgaccgtttctattcctttcgaagttaaggagacagcaaaggagctcccaggaattagggatccagttataaattgcacttaactcaaaatagtgccagtgagaatgtgaaggaatcttctggaaatgaaaccccacagctcaacaaaagcaagtttggtttatttgaatggtttcattaaataagtctacaaaggtaacaaactgaagcacaaagcgcaatcttacaagaagcgcaacacccagagttagtgcaaaatgtacaattaacggctgctgagaaacccccaaagtttgaatttttatttttatttttaacagtgtacattgttaaataatgtaaggaaaacatttataattcagaaagtttttaatgtggaaaaagatactcaaagtgtactattaacacaaaaataatttaaacagttcagtagcactagttcattcctctaggcttgttatttcatacacaggaggatgaaatcaacagtaaataacaccagttctgactttttttgtgtatgagtgaaaagatgtcaaaattattattaaacccaaataacaaatgataatgtgctgcatgaggctccactgctcctctggtataaagtatgtttcactcttgggtggcccctttctcagctactcagccccttgttggttctatccttactctctccacaagaaatacaagcagagaataaataaatcattttaaagcaggggtggaagcccttgcccttttcctttctaccttttaaaaaccttcagctctcatttgcatatttagggccgtagaccaacttacttacttactaagggaagcagggcccttaaggaatgaacagggtacaggagcctccagcctctttctgtggtagtggtggtggtggtggtgattcccagaatatgccattgacgtgggtaaaaggttggaaatattttcagtttcccaactaagagtcaagaagcaccccaaaattaagagtcctagcttctttctttgtcttcagagataacaaagatcctaaacatagccagttaggacagtatttccggaaagctctgaaaataattaataactacccattacaaggaggcatagcactgaataacactgattggttgcagttattacttacggggagtattatttatttgaaaatgtgaacatattagttgtacttctagaaataaaggtggcacaatagattatgatcctgcaaccatttggacatcataaaggaaatgagtaggaataagtattctttcctagaatgattaattcagatgtggaaagatagatagattaactttccacaaaatgtagtaccccaagctgagaaatgcatggtacatgtgcaacaagaggaaagcaatccaaacagtttttctgagagcaattttctccatctgtgacttttcactatcaggttccccaacttgaaaactagccccccacccccttctctttatgttcagtttcttctaggtcacgtctgttcaagcctagctcaaataagaaaggtttatatgacagtcactggccaggcatcacgtttgtttcctcattctttagtctttgtctttcacccagcacacaccattcttttaagttgtccaattttgttacaacaccccctcctcactattcccgaaacagaactttctgtttttaaccactgatgccaacctaacttcccaccctactcatcttacacctgctctagacaaagttgttgaatgacttaaaaaaatactttttcaatttccctttggcataaccactgctggactgctggggtcacatggacctacgatttccttccacatgccctttattgatctggggtctggtaagttgatgctaatggcagaagcaatagaagtccaaggcactaaaatgtccagcaagcaacactgggaaacagaagtattcaagtacagtaatttatacaattttacattcacatttatttatctaatacaatggaaatacaaaggaaaaagttaaagtgtctcaataagtaaaggacagagctagctttttttggaactttttaaacgtttcatattttactcttaaaactactgttgtccaacaacattttatatatcacagtgtttccacatcaaaactgatggcaaagttacatgtccgcagggaacttaattttttttttttcctaattgctaatgctgcagtcaaagctgctaatatcttttgcttaaagcactaatgacctatcataagaaagagttgcaccccagtaccctggtatttttcactgggttctaaagagcaaagaaaaaataaaaaagagaggggtaaaaaaaagggaggagggcagggtaggagagagcccagtaggtggtttttgtcctgtggttcggattcttgagggagtgagggattcagggcatgtaccaaaagcaagagctccacccactcgaaattacagatgggtttgattttacattgagttctccagcttccttatgaacaagactttcctagccctcatcctcattactgagtatagataaacaggaaagcatggtctgaagctgccccttgacaaaaaagctgttctttccttcctctcccattccaataactggagcgggggagactctccattctgagggctcaatgcagtattaaaaacattcccctctggcaagaaataaccagttaaatgcagcactagtagttagtatataggctacttcccacccccacccaccccctcagcattccatctcctgcccccagatctattcagttaatgtctctaggtctaagtggtccgcaggttggagcctggggggttgctgatggatttctgcaaattgctgatgttgaaattctgcaaggaggcagttcccacaggttggaactggccaagtggctgtggtgctgggccacccgtcccactccattgagcgccaaatggggtagctggaaagccatactgctgtggggggcacatagacttggtgaagtgacctagagaggtagctgatgctgcagagatgggggcagagccacccaggttcgaggtcatggagatgcacagttgcccaggtgcagagaacttccttgccattccagggccctgaaaacaaaaccaccacgtgtcaagtctggtgtgggccatggtataaaatgtgtggcgctaacatatacttctagtataatcctgtaagatacagcagaacagtcttctgtagtatttattggctctttatatttaccaagtaagggtgaaaataatcctcatgagagggagggatgtcatgtgcgtgtgtgtctgtgtgtgtgtagttgaggatgacgaagg

SEQ ID NO: 9221 - protein, 418 aa, Homo sapiens; identical to SEQ ID NO: 1337

SEQ ID NO: 9222 - DNA, 6677 bp, Homo sapiens
gctcgcgcacccttcccattctcctctgcgcggcctccatctaagatctcttccccttgtccatagcctagatcgagctccctgtgtgcaccgcgcgctgcccgaggcgcaggtcaaccagaatcaagatgtctgggactgaggaagcaattcttggaggacgtgacagccatcctgctgctggcggcggctcagtgttatgctttggacagtgccagtacacagcagaagagtaccaggccatccagaaggccctgaggcagaggctgggcccagaatacataagtagccgcatggctggcggaggccagaaggtgtgctacattgagggtcatcgggtaattaatctggccaatgagatgtttggttacaatggctgggcacactccatcacgcagcagaatgtggattttgttgacctcaacaatggcaagttctacgtgggagtctgtgcatttgtgagggtccagctgaaggatggttcatatcatgaagatgttggttatggtgttagtgagggcctcaagtccaaggctttatctttggagaaggcaaggaaggaggcggtgacagacgggctgaagcgagccctcaggcttcccttgctgggagtaagtggtagaatcctgtactctctcttctccgtgcactcagtcatgtgtgccggaggccttcccactcctactgcgagtgcacagacagcaccctcctctccgtgctcctcagcagtcctccgctacgcacaggagttttgggaatgcacttggaaactgtattctggacaaagactacctgagatcactaaataagcttccacgccagttgcctcttgaagtggatttaactaaagcgaagagacaagatcttgaaccgtctgtggaggaggcaagatacaacagctgccgaccgaacatggccctgggacacccacagctgcagcaggtgacctccccttccagacccagccatgctgtgataccggcggaccaggactgcagctcccgaagcctgagctcatccgccgtggagagcgaggccacgcaccagcggaagctccggcagaagcagctgcagcagcagttccgggagcggatggagaagcagcaggttcgagtctccacgccgtcagctgagaagagtgaggcagcgcctccggcccctcctgtgacgcacagcactcctgtaactgtctcagaaccactcctggagaaagacttccttgcaggagtgactcaagaattaatcaagactcttgaagacaactctgaaaagtgggctgtgactcccgatgcaggggatggtgtggtcaagccctcgtctagagcagacccagcccagacctctgacacattagccttgaacaaccagatggtgacccagaacaggactccacacagcgtttgccaccagaaaccacaagcaaaatctggatcttgggacctccaaacttatagcgctgaccaacgcacaacaggaaactgggaatctcataggaagagccaggacatgaagaaaaggaaatatgatccatcttaactgaggctcaggccacataattggactctgtcacaaagggactttggaaaactactttttggtcatgaaattgttcatcgctgctggagaatgaacgtcattgcgatttatcttgcttcattctgaaccttatcaagaggatctgactgagagcccactgcagttagagctgagcacttttgaaaagcttgtccatcactctagtagggagaggctctggacagatgaataccttttcttcggcttgtgaggcttcccactatttattactgaactattatgttaatgaagatggacattttaggaatcaccaatggctccttgccctcaagcaatataggccagacttggtcctaagcacctgcctcagcaattgtctacattcagttgttttgcataacgtctgccttctttcctttacggtccatgcctttaatgttgcccacattaagcactgtggatcacgacaggaaaaaggttggagcagtgcttttcactactttgtatcaatccaggctacaatcttcatttaatataaataatttatggatttatgacattacaatcctgcattgtttcaagactgacattttttcctaaggaaggaaataatcatctaagaccacgaaaaaaggctgttttttgtttttttttttttttttttttttgagacggggtctggctgtgttgccctgactggagttcagtggtgcaaacacagctctctccacaacctcttgggcccaagtgatactcccacctctgccttacaaaatacagggattactggtgtgagccactgtgtctggccagaaaaggcatttttgagaaagcaaatcgtataccttattaacaaaatagaatatatatatattgcttatctgaaatgcttgaaaccagaattgttttgcattttttgaatatttgtatacacataatgagaccttggggatgggacccaagtctgaacgtggaattcacctgtgtttcgtgtatatgcctcatacacataattttgtgcatgaaacagagtttttgtataagaagatacactgcagctgaagagggctgggtttttttttctcttagggtcgctgcataaactgttgtatgcctggtgctttgcgacttgtcacacgaggtcacgtgtggaattttccacttctggcatcacgtcagtgctcagaaattttctgatctcagagcatttcaattagggatgctcaaacgcaactgtttctacttccccatttcaggtgtgagatgtaacccaccttgaccataaattggcttttcatagtgctcagatgtttcataattcttcccccaaaataatgaagtttgcagtttaacaactttttttttgagagggggggtctggctctgtagcgcaggctggagtgcagcggtgccatcttgactcattgcagcctccgcctgccaggattcaagcaattctcctgcctcaggctcccgagtagctgggattacagacacccaccacgacgcccgactaatttttgtatttttagtagaggagacggggtttctccatgttggccaggctggtctcaaactgacctcaagtgatctgcccacctcggcctcccaaagtaaaaagtactagaattataggcatgagccattgcgcccagccaatttaataatttttttagacgtattattttgggctgggctgtggctaatcttgaagcagtgacttcctattttttggctcagacccatttgggaagctgtgaacctgagataaggaagtctgaaagtactagccggcagccgaccgtttctattcctttcgaagttaaggagacagcaaaggagctcccaggaattagggatccagttataaattgcacttaactcaaaatagtgccagtgagaatgtgaaggaatcttctggaaatgaaaccccacagctcaacaaaagcaagtttggtttatttgaatggtttcattaaataagtctacaaaggtaacaaactgaagcacaaagcgcaatcttacaagaagcgcaacacccagagttagtgcaaaatgtacaattaacggctgctgagaaacccccaaagtttgaatttttatttttatttttaacagtgtacattgttaaataatgtaaggaaaacatttataattcagaaagtttttaatgtggaaaaagatactcaaagtgtactattaacacaaaaataatttaaacagttcagtagcactagttcattcctctaggcttgttatttcatacacaggaggatgaaatcaacagtaaataacaccagttctgactttttttgtgtatgagtgaaaagatgtcaaaattattattaaacccaaataacaaatgataatgtgctgcatgaggctccactgctcctctggtataaagtatgtttcactcttgggtggcccctttctcagctactcagccccttgttggttctatccttactctctccacaagaaatacaagcagagaataaataaatcattttaaagcaggggtggaagcccttgcccttttcctttctaccttttaaaaaccttcagctctcatttgcatatttagggccgtagaccaacttacttacttactaagggaagcagggcccttaaggaatgaacagggtacaggagcctccagcctctttctgtggtagtggtggtggtggtggtgattcccagaatatgccattgacgtgggtaaaaggttggaaatattttcagtttcccaactaagagtcaagaagcaccccaaaattaagagtcctagcttctttctttgtcttcagagataacaaagatcctaaacatagccagttaggacagtatttccggaaagctctgaaaataattaataactacccattacaaggaggcatagcactgaataacactgattggttgcagttattacttacggggagtattatttatttgaaaatgtgaacatattagttgtacttctagaaataaaggtggcacaatagattatgatcctgcaaccatttggacatcataaaggaaatgagtaggaataagtattctttcctagaatgattaattcagatgtggaaagatagatagattaactttccacaaaatgtagtaccccaagctgagaaatgcatggtacatgtgcaacaagaggaaagcaatccaaacagtttttctgagagcaattttctccatctgtgacttttcactatcaggttccccaacttgaaaactagccccccacccccttctctttatgttcagtttcttctaggtcacgtctgttcaagcctagctcaaataagaaaggtttatatgacagtcactggccaggcatcacgtttgtttcctcattctttagtctttgtctttcacccagcacacaccattcttttaagttgtccaattttgttacaacaccccctcctcactattcccgaaacagaactttctgtttttaaccactgatgccaacctaacttcccaccctactcatcttacacctgctctagacaaagttgttgaatgacttaaaaaaatactttttcaatttccctttggcataaccactgctggactgctggggtcacatggacctacgatttccttccacatgccctttattgatctggggtctggtaagttgatgctaatggcagaagcaatagaagtccaaggcactaaaatgtccagcaagcaacactgggaaacagaagtattcaagtacagtaatttatacaattttacattcacatttatttatctaatacaatggaaatacaaaggaaaaagttaaagtgtctcaataagtaaaggacagagctagctttttttggaactttttaaacgtttcatattttactcttaaaactactgttgtccaacaacattttatatatcacagtgtttccacatcaaaactgatggcaaagttacatgtccgcagggaacttaattttttttttttcctaattgctaatgctgcagtcaaagctgctaatatcttttgcttaaagcactaatgacctatcataagaaagagttgcaccccagtaccctggtatttttcactgggttctaaagagcaaagaaaaaataaaaaagagaggggtaaaaaaaagggaggagggcagggtaggagagagcccagtaggtggtttttgtcctgtggttcggattcttgagggagtgagggattcagggcatgtaccaaaagcaagagctccacccactcgaaattacagatgggtttgattttacattgagttctccagcttccttatgaacaagactttcctagccctcatcctcattactgagtatagataaacaggaaagcatggtctgaagctgccccttgacaaaaaagctgttctttccttcctctcccattccaataactggagcgggggagactctccattctgagggctcaatgcagtattaaaaacattcccctctggcaagaaataaccagttaaatgcagcactagtagttagtatataggctacttcccacccccacccaccccctcagcattccatctcctgcccccagatctattcagttaatgtctctaggtctaagtggtccgcaggttggagcctggggggttgctgatggatttctgcaaattgctgatgttgaaattctgcaaggaggcagttcccacaggttggaactggccaagtggctgtggtgctgggccacccgtcccactccattgagcgccaaatggggtagctggaaagccatactgctgtggggggcacatagacttggtgaagtgacctagagaggtagctgatgctgcagagatgggggcagagccacccaggttcgaggtcatggagatgcacagttgcccaggtgcagagaacttccttgccattccagggccctgaaaacaaaaccaccacgtgtcaagtctggtgtgggccatggtataaaatgtgtggcgctaacatatacttctagtataatcctgtaagatacagcagaacagtcttctgtagtatttattggctctttatatttaccaagtaagggtgaaaataatcctcatgagagggagggatgtcatgtgcgtgtgtgtctgtgtgtgtgtagttgaggatgacgaagg

SEQ ID NO: 9223 - protein, 226 aa, Homo sapiens
MSGTEEAILGGRDSHPAAGGGSVLCFGQCQYTAEEYQAIQKALRQRLGPEYISSRMAGGGQKVCYIEGHRVINLANEMFGYNGWAHSITQQNVDFVDLNNGKFYVGVCAFVRVQLKDGSYHEDVGYGVSEGLKSKALSLEKARKEAVTDGLKRALRLPLLGVSGRILYSLFSVHSVMCAGGLPTPTASAQTAPSSPCSSAVLRYAQEFWECTWKLYSGQRLPEITK

SEQ ID NO: 9224 - DNA, 6891 bp, Homo sapiens
ggagccatgcagagggtagctacagccattaatttaaggatgtagataagctatctctaaaccaagaaagtaagaatggtgtgaattatatttattcccagccttccagtgtttattaaaataattttcggtgtccttgagaggagttaaaagccatcattttactcctgcttacctccgccaccgtaattaaccactttatactgcctcataatcccattaacaaattgcagtcgctcctcagccttcacattcattcactcaccagtttctactgtttcatcctgcccggactcttaactgttccctcccaggatcgacatgcacttggatcattgcagtttctgggcctgctgtcatctcccccttcagtacttcccacatatgactaccaactgttagacgatgtgctgctgccagaccagcctttcatttcttggacatccggctatttacccaggaaaagtcatcctttgactatttttcatgacctttctcatctgactcgtgatctgcccatcttgttatttttatttatatagaggtcaaccagaatcaagatgtctgggactgaggaagcaattcttggaggacgtgacagccatcctgctgctggcggcggctcagtgttatgctttggacagtgccagtacacagcagaagagtaccaggccatccagaaggccctgaggcagaggctgggcccagaatacataagtagccgcatggctggcggaggccagaaggtgtgctacattgagggtcatcgggtaattaatctggccaatgagatgtttggttacaatggctgggcacactccatcacgcagcagaatgtggattttgttgacctcaacaatggcaagttctacgtgggagtctgtgcatttgtgagggtccagctgaaggatggttcatatcatgaagatgttggttatggtgttagtgagggcctcaagtccaaggctttatctttggagaaggcaaggaaggaggcggtgacagacgggctgaagcgagccctcaggagttttgggaatgcacttggaaactgtattctggacaaagactacctgagatcactaaataagcttccacgccagttgcctcttgaagtggatttaactaaagcgaagagacaagatcttgaaccgtctgtggaggaggcaagatacaacagctgccgaccgaacatggccctgggacacccacagctgcagcaggtgacctccccttccagacccagccatgctgtgataccggcggaccaggactgcagctcccgaagcctgagctcatccgccgtggagagcgaggccacgttcgagtctccacgccgtcagctgagaagagtgaggcagcgcctccggcccctcctgtgacgcacagcactcctgtaactgtctcagaaccactcctggagaaagacttccttgcaggagtgactcaagaattaatcaagactcttgaagacaactctgaaaagtgggctgtgactcccgatgcaggggatggtgtggtcaagccctcgtctagagcagacccagcccagacctctgacacattagccttgaacaaccagatggtgacccagaacaggactccacacagcgtttgccaccagaaaccacaagcaaaatctggatcttgggacctccaaacttatagcgctgaccaacgcacaacaggaaactgggaatctcataggaagagccaggacatgaagaaaaggaaatatgatccatcttaactgaggctcaggccacataattggactctgtcacaaagggactttggaaaactactttttggtcatgaaattgttcatcgctgctggagaatgaacgtcattgcgatttatcttgcttcattctgaaccttatcaagaggatctgactgagagcccactgcagttagagctgagcacttttgaaaagcttgtccatcactctagtagggagaggctctggacagatgaataccttttcttcggcttgtgaggcttcccactatttattactgaactattatgttaatgaagatggacattttaggaatcaccaatggctccttgccctcaagcaatataggccagacttggtcctaagcacctgcctcagcaattgtctacattcagttgttttgcataacgtctgccttctttcctttacggtccatgcctttaatgttgcccacattaagcactgtggatcacgacaggaaaaaggttggagcagtgcttttcactactttgtatcaatccaggctacaatcttcatttaatataaataatttatggatttatgacattacaatcctgcattgtttcaagactgacattttttcctaaggaaggaaataatcatctaagaccacgaaaaaaggctgttttttgtttttttttttttttttttttttgagacggggtctggctgtgttgccctgactggagttcagtggtgcaaacacagctctctccacaacctcttgggcccaagtgatactcccacctctgccttacaaaatacagggattactggtgtgagccactgtgtctggccagaaaaggcatttttgagaaagcaaatcgtataccttattaacaaaatagaatatatatatattgcttatctgaaatgcttgaaaccagaattgttttgcattttttgaatatttgtatacacataatgagaccttggggatgggacccaagtctgaacgtggaattcacctgtgtttcgtgtatatgcctcatacacataattttgtgcatgaaacagagtttttgtataagaagatacactgcagctgaagagggctgggtttttttttctcttagggtcgctgcataaactgttgtatgcctggtgctttgcgacttgtcacacgaggtcacgtgtggaattttccacttctggcatcacgtcagtgctcagaaattttctgatctcagagcatttcaattagggatgctcaaacgcaactgtttctacttccccatttcaggtgtgagatgtaacccaccttgaccataaattggcttttcatagtgctcagatgtttcataattcttcccccaaaataatgaagtttgcagtttaacaactttttttttgagagggggggtctggctctgtagcgcaggctggagtgcagcggtgccatcttgactcattgcagcctccgcctgccaggattcaagcaattctcctgcctcaggctcccgagtagctgggattacagacacccaccacgacgcccgactaatttttgtatttttagtagaggagacggggtttctccatgttggccaggctggtctcaaactgacctcaagtgatctgcccacctcggcctcccaaagtaaaaagtactagaattataggcatgagccattgcgcccagccaatttaataatttttttagacgtattattttgggctgggctgtggctaatcttgaagcagtgacttcctattttttggctcagacccatttgggaagctgtgaacctgagataaggaagtctgaaagtactagccggcagccgaccgtttctattcctttcgaagttaaggagacagcaaaggagctcccaggaattagggatccagttataaattgcacttaactcaaaatagtgccagtgagaatgtgaaggaatcttctggaaatgaaaccccacagctcaacaaaagcaagtttggtttatttgaatggtttcattaaataagtctacaaaggtaacaaactgaagcacaaagcgcaatcttacaagaagcgcaacacccagagttagtgcaaaatgtacaattaacggctgctgagaaacccccaaagtttgaatttttatttttatttttaacagtgtacattgttaaataatgtaaggaaaacatttataattcagaaagtttttaatgtggaaaaagatactcaaagtgtactattaacacaaaaataatttaaacagttcagtagcactagttcattcctctaggcttgttatttcatacacaggaggatgaaatcaacagtaaataacaccagttctgactttttttgtgtatgagtgaaaagatgtcaaaattattattaaacccaaataacaaatgataatgtgctgcatgaggctccactgctcctctggtataaagtatgtttcactcttgggtggcccctttctcagctactcagccccttgttggttctatccttactctctccacaagaaatacaagcagagaataaataaatcattttaaagcaggggtggaagcccttgcccttttcctttctaccttttaaaaaccttcagctctcatttgcatatttagggccgtagaccaacttacttacttactaagggaagcagggcccttaaggaatgaacagggtacaggagcctccagcctctttctgtggtagtggtggtggtggtggtgattcccagaatatgccattgacgtgggtaaaaggttggaaatattttcagtttcccaactaagagtcaagaagcaccccaaaattaagagtcctagcttctttctttgtcttcagagataacaaagatcctaaacatagccagttaggacagtatttccggaaagctctgaaaataattaataactacccattacaaggaggcatagcactgaataacactgattggttgcagttattacttacggggagtattatttatttgaaaatgtgaacatattagttgtacttctagaaataaaggtggcacaatagattatgatcctgcaaccatttggacatcataaaggaaatgagtaggaataagtattctttcctagaatgattaattcagatgtggaaagatagatagattaactttccacaaaatgtagtaccccaagctgagaaatgcatggtacatgtgcaacaagaggaaagcaatccaaacagtttttctgagagcaattttctccatctgtgacttttcactatcaggttccccaacttgaaaactagccccccacccccttctctttatgttcagtttcttctaggtcacgtctgttcaagcctagctcaaataagaaaggtttatatgacagtcactggccaggcatcacgtttgtttcctcattctttagtctttgtctttcacccagcacacaccattcttttaagttgtccaattttgttacaacaccccctcctcactattcccgaaacagaactttctgtttttaaccactgatgccaacctaacttcccaccctactcatcttacacctgctctagacaaagttgttgaatgacttaaaaaaatactttttcaatttccctttggcataaccactgctggactgctggggtcacatggacctacgatttccttccacatgccctttattgatctggggtctggtaagttgatgctaatggcagaagcaatagaagtccaaggcactaaaatgtccagcaagcaacactgggaaacagaagtattcaagtacagtaatttatacaattttacattcacatttatttatctaatacaatggaaatacaaaggaaaaagttaaagtgtctcaataagtaaaggacagagctagctttttttggaactttttaaacgtttcatattttactcttaaaactactgttgtccaacaacattttatatatcacagtgtttccacatcaaaactgatggcaaagttacatgtccgcagggaacttaattttttttttttcctaattgctaatgctgcagtcaaagctgctaatatcttttgcttaaagcactaatgacctatcataagaaagagttgcaccccagtaccctggtatttttcactgggttctaaagagcaaagaaaaaataaaaaagagaggggtaaaaaaaagggaggagggcagggtaggagagagcccagtaggtggtttttgtcctgtggttcggattcttgagggagtgagggattcagggcatgtaccaaaagcaagagctccacccactcgaaattacagatgggtttgattttacattgagttctccagcttccttatgaacaagactttcctagccctcatcctcattactgagtatagataaacaggaaagcatggtctgaagctgccccttgacaaaaaagctgttctttccttcctctcccattccaataactggagcgggggagactctccattctgagggctcaatgcagtattaaaaacattcccctctggcaagaaataaccagttaaatgcagcactagtagttagtatataggctacttcccacccccacccaccccctcagcattccatctcctgcccccagatctattcagttaatgtctctaggtctaagtggtccgcaggttggagcctggggggttgctgatggatttctgcaaattgctgatgttgaaattctgcaaggaggcagttcccacaggttggaactggccaagtggctgtggtgctgggccacccgtcccactccattgagcgccaaatggggtagctggaaagccatactgctgtggggggcacatagacttggtgaagtgacctagagaggtagctgatgctgcagagatgggggcagagccacccaggttcgaggtcatggagatgcacagttgcccaggtgcagagaacttccttgccattccagggccctgaaaacaaaaccaccacgtgtcaagtctggtgtgggccatggtataaaatgtgtggcgctaacatatacttctagtataatcctgtaagatacagcagaacagtcttctgtagtatttattggctctttatatttaccaagtaagggtgaaaataatcctcatgagagggagggatgtcatgtgcgtgtgtgtctgtgtgtgtgtagttgaggatgacgaagg

SEQ ID NO: 9225 - protein, 273 aa, Homo sapiens
MSGTEEAILGGRDSHPAAGGGSVLCFGQCQYTAEEYQAIQKALRQRLGPEYISSRMAGGGQKVCYIEGHRVINLANEMFGYNGWAHSITQQNVDFVDLNNGKFYVGVCAFVRVQLKDGSYHEDVGYGVSEGLKSKALSLEKARKEAVTDGLKRALRSFGNALGNCILDKDYLRSLNKLPRQLPLEVDLTKAKRQDLEPSVEEARYNSCRPNMALGHPQLQQVTSPSRPSHAVIPADQDCSSRSLSSSAVESEATFESPRRQLRRVRQRLRPLL

SEQ ID NO: 9226 - DNA, 1526 bp, Homo sapiens
agggccctggaatggcaaggaagttctctgcacctgggcaactgtgcatctccatgacctcgaacctgggtggctctgcccccatctctgcagcatcagctacctctctaggtcacttcaccaagtctatgtgccccccacagcagtatggctttccagctaccccatttggcgctcaatggagtgggacgggtggcccagcaccacagccacttggccagttccaacctgtgggaactgcctccttgcagaatttcaacatcagcaatttgcagaaatccatcagcaaccccccaggctccaacctgcggaccacttagacctagagacattaactgaatagatctgggggcaggagatggaatgctgagggggtgggtgggggtgggaagtagcctatatactaactactagtgctgcatttaactggttatttcttgccagaggggaatgtttttaatactgcattgagccctcagaatggagactcttgcttttggattgctttcctcttgttgcacatgtaccatgcatttctcagcttggggtactacattttgtggaaagttaatctatctatctttccacatctgaattaatcattctaggaaagaatacttattcctactcatttcctttatgatgtccaaatggttgcaggatcataatctattgtgccacctttatttctagaagtacaactaatatgttcacattttcaaataaataatactccccgtaagtaataactgcaaccaatcagtgttattcagtgctatgcctccttgtaatgggtagttattaattattttcagagctttccggaaatactgtcctaactggctatgtttaggatctttgttatctctgaagacaaagaaagaagctaggactcttaattttggggtgcttcttgactcttagttgggaaactgaaaatatttccaaccttttacccacgtcaatggcatattctgggaatcaccaccaccaccaccactaccacagaaagaggctggaggctcctgtaccctgttcattccttaagggccctgcttcccttagtaagtaagtaagttggtctacggccctaaatatgcaaatgagagctgaaggtttttaaaaggtagaaaggaaaagggcaagggcttccacccctgctttaaaatgatttatttattctctgcttgtatttcttgtggagagagtaaggatagaaccaacaaggggctgagtagctgagaaaggggccacccaagagtgaaacatactttataccagaggagcagtggagcctcatgcagcacattatcatttgttatttgggtttaataataattttgacatcttttcactcatacacaaaaaaagtcagaactggtgttatttactgttgatttcatcctcctgtgtatgaaataacaagcctagaggaatgaactagtgctactgaactgtttaaattatttttgtgttaatagtacactttgagtatctttttccacattaaaaactttctgaattat

SEQ ID NO: 9227 - protein, 37 aa, Homo sapiens [sequence omitted]

SEQ ID NO: 9228 - DNA, 1592 bp, Homo sapiens
agggccctggaatggcaaggaagttctctgcacctgggcaactgtgcatctccatgacctcgaacctgggtggctctgcccccatctctgcagcatcagctacctctctaggtcacttcaccaagtctatgtgccccccacagcagtatggctttccagctaccccatttggcgctcaatggagtgggacgggtggcccagcaccacagccacttggccagttccaacctgtgggaactgcctccttgcagaatttcaacatcagcaatttgcagaaatccatcagcaaccccccaggctccaacctgcggaccacttagacctagagacattaactgaatagatctgggggcaggagatggaatgctgagggggtgggtgggggtgggaagtagcctatatactaactactagtgctgcatttaactggttatttcttgccagaggggaatgtttttaatactgcattgagccctcagaatggagactcttgcttttggattgctttcctcttgttgcacatgtaccatgcatttctcagcttggggtactacattttgtggaaagttaatctatctatctttccacatctgaattaatcattctaggaaagaatacttattcctactcatttcctttatgatgtccaaatggttgcaggatcataatctattgtgccacctttatttctagaagtacaactaatatgttcacattttcaaataaataatactccccgtaagtaataactgcaaccaatcagtgttattcagtgctatgcctccttgtaatgggtagttattaattattttcagagctttccggaaatactgtcctaactggctatgtttaggatctttgttatctctgaagacaaagaaagaagctaggactcttaattttggggtgcttcttgactcttagttgggaaactgaaaatatttccaaccttttacccacgtcaatggcatattctgggaatcaccaccaccaccaccactaccacagaaagaggctggaggctcctgtaccctgttcattccttaagggccctgcttcccttagtaagtaagtaagttggtctacggccctaaatatgcaaatgagagctgaaggtttttaaaaggtagaaaggaaaagggcaagggcttccacccctgctttaaaatgatttatttattctctgcttgtatttcttgtggagagagtaaggatagaaccaacaaggggctgagtagctgagaaaggggccacccaagagtgaaacatactttataccagaggagcagtggagcctcatgcagcacattatcatttgttatttgggtttaataataattttgacatcttttcactcatacacaaaaaaagtcagaactggtgttatttactgttgatttcatcctcctgtgtatgaaataacaagcctagaggaatgaactagtgctactgaactgtttaaattatttttgtgttaatagtacactttgagtatctttttccacattaaaaactttctgaattataaatgttttccttacattatttaacaatgtacactgttaaaaataaaaataaaaattcaaactttg

SEQ ID NO: 9229 - protein, 37 aa, Homo sapiens [sequence omitted]

SEQ ID NO: 9230 - DNA, 1738 bp, Homo sapiens
agggccctggaatggcaaggaagttctctgcacctgggcaactgtgcatctccatgacctcgaacctgggtggctctgcccccatctctgcagcatcagctacctctctaggtcacttcaccaagtctatgtgccccccacagcagtatggctttccagctaccccatttggcgctcaatggagtgggacgggtggcccagcaccacagccacttggccagttccaacctgtgggaactgcctccttgcagaatttcaacatcagcaatttgcagaaatccatcagcaaccccccaggctccaacctgcggaccacttagacctagagacattaactgaatagatctgggggcaggagatggaatgctgagggggtgggtgggggtgggaagtagcctatatactaactactagtgctgcatttaactggttatttcttgccagaggggaatgtttttaatactgcattgagccctcagaatggagactcttgcttttggattgctttcctcttgttgcacatgtaccatgcatttctcagcttggggtactacattttgtggaaagttaatctatctatctttccacatctgaattaatcattctaggaaagaatacttattcctactcatttcctttatgatgtccaaatggttgcaggatcataatctattgtgccacctttatttctagaagtacaactaatatgttcacattttcaaataaataatactccccgtaagtaataactgcaaccaatcagtgttattcagtgctatgcctccttgtaatgggtagttattaattattttcagagctttccggaaatactgtcctaactggctatgtttaggatctttgttatctctgaagacaaagaaagaagctaggactcttaattttggggtgcttcttgactcttagttgggaaactgaaaatatttccaaccttttacccacgtcaatggcatattctgggaatcaccaccaccaccaccactaccacagaaagaggctggaggctcctgtaccctgttcattccttaagggccctgcttcccttagtaagtaagtaagttggtctacggccctaaatatgcaaatgagagctgaaggtttttaaaaggtagaaaggaaaagggcaagggcttccacccctgctttaaaatgatttatttattctctgcttgtatttcttgtggagagagtaaggatagaaccaacaaggggctgagtagctgagaaaggggccacccaagagtgaaacatactttataccagaggagcagtggagcctcatgcagcacattatcatttgttatttgggtttaataataattttgacatcttttcactcatacacaaaaaaagtcagaactggtgttatttactgttgatttcatcctcctgtgtatgaaataacaagcctagaggaatgaactagtgctactgaactgtttaaattatttttgtgttaatagtacactttgagtatctttttccacattaaaaactttctgaattataaatgttttccttacattatttaacaatgtacactgttaaaaataaaaataaaaattcaaactttgggggtttctcagcagccgttaattgtacattttgcactaactctgggtgttgcgcttcttgtaagattgcgctttgtgcttcagtttgttacctttgtagacttatttaatgaaaccattcaaataaaccaaacttgcttttgttg

SEQ ID NO: 9231 - protein, 37 aa, Homo sapiens [sequence omitted]

SEQ ID NO: 9232 - DNA, 3011 bp, Homo sapiens
agggccctggaatggcaaggaagttctctgcacctgggcaactgtgcatctccatgacctcgaacctgggtggctctgcccccatctctgcagcatcagctacctctctaggtcacttcaccaagtctatgtgccccccacagcagtatggctttccagctaccccatttggcgctcaatggagtgggacgggtggcccagcaccacagccacttggccagttccaacctgtgggaactgcctccttgcagaatttcaacatcagcaatttgcagaaatccatcagcaaccccccaggctccaacctgcggaccacttagacctagagacattaactgaatagatctgggggcaggagatggaatgctgagggggtgggtgggggtgggaagtagcctatatactaactactagtgctgcatttaactggttatttcttgccagaggggaatgtttttaatactgcattgagccctcagaatggagactcttgcttttggattgctttcctcttgttgcacatgtaccatgcatttctcagcttggggtactacattttgtggaaagttaatctatctatctttccacatctgaattaatcattctaggaaagaatacttattcctactcatttcctttatgatgtccaaatggttgcaggatcataatctattgtgccacctttatttctagaagtacaactaatatgttcacattttcaaataaataatactccccgtaagtaataactgcaaccaatcagtgttattcagtgctatgcctccttgtaatgggtagttattaattattttcagagctttccggaaatactgtcctaactggctatgtttaggatctttgttatctctgaagacaaagaaagaagctaggactcttaattttggggtgcttcttgactcttagttgggaaactgaaaatatttccaaccttttacccacgtcaatggcatattctgggaatcaccaccaccaccaccactaccacagaaagaggctggaggctcctgtaccctgttcattccttaagggccctgcttcccttagtaagtaagtaagttggtctacggccctaaatatgcaaatgagagctgaaggtttttaaaaggtagaaaggaaaagggcaagggcttccacccctgctttaaaatgatttatttattctctgcttgtatttcttgtggagagagtaaggatagaaccaacaaggggctgagtagctgagaaaggggccacccaagagtgaaacatactttataccagaggagcagtggagcctcatgcagcacattatcatttgttatttgggtttaataataattttgacatcttttcactcatacacaaaaaaagtcagaactggtgttatttactgttgatttcatcctcctgtgtatgaaataacaagcctagaggaatgaactagtgctactgaactgtttaaattatttttgtgttaatagtacactttgagtatctttttccacattaaaaactttctgaattataaatgttttccttacattatttaacaatgtacactgttaaaaataaaaataaaaattcaaactttgggggtttctcagcagccgttaattgtacattttgcactaactctgggtgttgcgcttcttgtaagattgcgctttgtgcttcagtttgttacctttgtagacttatttaatgaaaccattcaaataaaccaaacttgcttttgttgagctgtggggtttcatttccagaagattccttcacattctcactggcactattttgagttaagtgcaatttataactggatccctaattcctgggagctcctttgctgtctccttaacttcgaaaggaatagaaacggtcggctgccggctagtactttcagacttccttatctcaggttcacagcttcccaaatgggtctgagccaaaaaataggaagtcactgcttcaagattagccacagcccagcccaaaataatacgtctaaaaaaattattaaattggctgggcgcaatggctcatgcctataattctagtactttttactttgggaggccgaggtgggcagatcacttgaggtcagtttgagaccagcctggccaacatggagaaaccccgtctcctctactaaaaatacaaaaattagtcgggcgtcgtggtgggtgtctgtaatcccagctactcgggagcctgaggcaggagaattgcttgaatcctggcaggcggaggctgcaatgagtcaagatggcaccgctgcactccagcctgcgctacagagccagaccccccctctcaaaaaaaaagttgttaaactgcaaacttcattattttgggggaagaattatgaaacatctgagcactatgaaaagccaatttatggtcaaggtgggttacatctcacacctgaaatggggaagtagaaacagttgcgtttgagcatccctaattgaaatgctctgagatcagaaaatttctgagcactgacgtgatgccagaagtggaaaattccacacgtgacctcgtgtgacaagtcgcaaagcaccaggcatacaacagtttatgcagcgaccctaagagaaaaaaaaacccagccctcttcagctgcagtgtatcttcttatacaaaaactctgtttcatgcacaaaattatgtgtatgaggcatatacacgaaacacaggtgaattccacgttcagacttgggtcccatccccaaggtctcattatgtgtatacaaatattcaaaaaatgcaaaacaattctggtttcaagcatttcagataagcaatatatatatattctattttgttaataaggtatacgatttgctttctcaaaaatgccttttctggccagacacagtggctcacaccagtaatccctgtattttgtaaggcagaggtgggagtatcacttgggcccaagaggttgtggagagagctgtgtttgcaccactgaactccagtcagggcaacacagccagaccccgtctcaa

SEQ ID NO: 9233 - protein, 37 aa, Homo sapiens [sequence omitted]

SEQ ID NO: 9234 - DNA, 2209 bp, Homo sapiens
caggctccaacctgcggaccacttagacctagagacattaactgaatagatctgggggcaggagatggaatgctgagggggtgggtgggggtgggaagtagcctatatactaactactagtgctgcatttaactggttatttcttgccagaggggaatgtttttaatactgcattgagccctcagaatggagagtctcccccgctccagttattggaatgggagaggaaggaaagaacagcttttttgtcaaggggcagcttcagaccatgctttcctgtttatctatactcagtaatgaggatgagggctaggaaagtcttgttcataaggaagctggagaactcaatgtaaaatcaaacccatctgtaatttcgagtgggtggagctcttgcttttggtacatgccctgaatccctcactccctcaagaatccgaaccacaggacaaaaaccacctactgggctctctcctaccctgccctcctcccttttttttacccctctcttttttattttttctttgctctttagaacccagtgaaaaataccagggtactggggtgcaactctttcttatgataggtcattagtgctttaagcaaaagatattagcagctttgactgcagcattagcaattaggaaaaaaaaaaaattaagttccctgcggacatgtaactttgccatcagttttgatgtggaaacactgtgatatataaaatgttgttggacaacagtagttttaagagtaaaatatgaaacgtttaaaaagttccaaaaaaagctagctctgtcctttacttattgagacactttaactttttcctttgtatttccattgtattagataaataaatgtgaatgtaaaattgtataaattactgtacttgaatacttctttctgtttcgggaatagtgaggagggggtgttgtaacaaaattggacaacttaaaagaatggtgtgtgctgggtgaaagacaaagactaaagaatgaggaaacaaacgtgatgcctggccagtgactgtcatataaacctttcttatttgagctaggcttgaacagacgtgacctagaagaaactgaacataaagagaagggggtggggggctagttttcaagttggggaacctgatagtgaaaagtcacagatggagaaaattgctctcagaaaaactgtttggattgctttcctcttgttgcacatgtaccatgcatttctcagcttggggtactacattttgtggaaagttaatctatctatctttccacatctgaattaatcattctaggaaagaatacttattcctactcatttcctttatgatgtccaaatggttgcaggatcataatctattgtgccacctttatttctagaagtacaactaatatgttcacattttcaaataaataatactccccgtaagtaataactgcaaccaatcagtgttattcagtgctatgcctccttgtaatgggtagttattaattattttcagagctttccggaaatactgtcctaactggctatgtttaggatctttgttatctctgaagacaaagaaagaagctaggactcttaattttggggtgcttcttgactcttagttgggaaactgaaaatatttccaaccttttacccacgtcaatggcatattctgggaatcaccaccaccaccaccactaccacagaaagaggctggaggctcctgtaccctgttcattccttaagggccctgcttcccttagtaagtaagtaagttggtctacggccctaaatatgcaaatgagagctgaaggtttttaaaaggtagaaaggaaaagggcaagggcttccacccctgctttaaaatgatttatttattctctgcttgtatttcttgtggagagagtaaggatagaaccaacaaggggctgagtagctgagaaaggggccacccaagagtgaaacatactttataccagaggagcagtggagcctcatgcagcacattatcatttgttatttgggtttaataataattttgacatcttttcactcatacacaaaaaaagtcagaactggtgttatttactgttgatttcatcctcctgtgtatgaaataacaagcctagaggaatgaactagtgctactgaactgtttaaattatttttgtgttaatagtacactttgagtatctttttccacattaaaaactttctgaattat

SEQ ID NO: 9235 - protein, 43 aa, Homo sapiens
MEKIALRKTVWIAFLLLHMYHAFLSLGYYILWKVNLSIFPHLN

SEQ ID NO: 9236 - DNA, 2275 bp, Homo sapiens
caggctccaacctgcggaccacttagacctagagacattaactgaatagatctgggggcaggagatggaatgctgagggggtgggtgggggtgggaagtagcctatatactaactactagtgctgcatttaactggttatttcttgccagaggggaatgtttttaatactgcattgagccctcagaatggagagtctcccccgctccagttattggaatgggagaggaaggaaagaacagcttttttgtcaaggggcagcttcagaccatgctttcctgtttatctatactcagtaatgaggatgagggctaggaaagtcttgttcataaggaagctggagaactcaatgtaaaatcaaacccatctgtaatttcgagtgggtggagctcttgcttttggtacatgccctgaatccctcactccctcaagaatccgaaccacaggacaaaaaccacctactgggctctctcctaccctgccctcctcccttttttttacccctctcttttttattttttctttgctctttagaacccagtgaaaaataccagggtactggggtgcaactctttcttatgataggtcattagtgctttaagcaaaagatattagcagctttgactgcagcattagcaattaggaaaaaaaaaaaattaagttccctgcggacatgtaactttgccatcagttttgatgtggaaacactgtgatatataaaatgttgttggacaacagtagttttaagagtaaaatatgaaacgtttaaaaagttccaaaaaaagctagctctgtcctttacttattgagacactttaactttttcctttgtatttccattgtattagataaataaatgtgaatgtaaaattgtataaattactgtacttgaatacttctttctgtttcgggaatagtgaggagggggtgttgtaacaaaattggacaacttaaaagaatggtgtgtgctgggtgaaagacaaagactaaagaatgaggaaacaaacgtgatgcctggccagtgactgtcatataaacctttcttatttgagctaggcttgaacagacgtgacctagaagaaactgaacataaagagaagggggtggggggctagttttcaagttggggaacctgatagtgaaaagtcacagatggagaaaattgctctcagaaaaactgtttggattgctttcctcttgttgcacatgtaccatgcatttctcagcttggggtactacattttgtggaaagttaatctatctatctttccacatctgaattaatcattctaggaaagaatacttattcctactcatttcctttatgatgtccaaatggttgcaggatcataatctattgtgccacctttatttctagaagtacaactaatatgttcacattttcaaataaataatactccccgtaagtaataactgcaaccaatcagtgttattcagtgctatgcctccttgtaatgggtagttattaattattttcagagctttccggaaatactgtcctaactggctatgtttaggatctttgttatctctgaagacaaagaaagaagctaggactcttaattttggggtgcttcttgactcttagttgggaaactgaaaatatttccaaccttttacccacgtcaatggcatattctgggaatcaccaccaccaccaccactaccacagaaagaggctggaggctcctgtaccctgttcattccttaagggccctgcttcccttagtaagtaagtaagttggtctacggccctaaatatgcaaatgagagctgaaggtttttaaaaggtagaaaggaaaagggcaagggcttccacccctgctttaaaatgatttatttattctctgcttgtatttcttgtggagagagtaaggatagaaccaacaaggggctgagtagctgagaaaggggccacccaagagtgaaacatactttataccagaggagcagtggagcctcatgcagcacattatcatttgttatttgggtttaataataattttgacatcttttcactcatacacaaaaaaagtcagaactggtgttatttactgttgatttcatcctcctgtgtatgaaataacaagcctagaggaatgaactagtgctactgaactgtttaaattatttttgtgttaatagtacactttgagtatctttttccacattaaaaactttctgaattataaatgttttccttacattatttaacaatgtacactgttaaaaataaaaataaaaattcaaactttg

SEQ ID NO: 9237 - protein, 43 aa, Homo sapiens; identical to SEQ ID NO: 9235

SEQ ID NO: 9238 - DNA, 2421 bp, Homo sapiens
caggctccaacctgcggaccacttagacctagagacattaactgaatagatctgggggcaggagatggaatgctgagggggtgggtgggggtgggaagtagcctatatactaactactagtgctgcatttaactggttatttcttgccagaggggaatgtttttaatactgcattgagccctcagaatggagagtctcccccgctccagttattggaatgggagaggaaggaaagaacagcttttttgtcaaggggcagcttcagaccatgctttcctgtttatctatactcagtaatgaggatgagggctaggaaagtcttgttcataaggaagctggagaactcaatgtaaaatcaaacccatctgtaatttcgagtgggtggagctcttgcttttggtacatgccctgaatccctcactccctcaagaatccgaaccacaggacaaaaaccacctactgggctctctcctaccctgccctcctcccttttttttacccctctcttttttattttttctttgctctttagaacccagtgaaaaataccagggtactggggtgcaactctttcttatgataggtcattagtgctttaagcaaaagatattagcagctttgactgcagcattagcaattaggaaaaaaaaaaaattaagttccctgcggacatgtaactttgccatcagttttgatgtggaaacactgtgatatataaaatgttgttggacaacagtagttttaagagtaaaatatgaaacgtttaaaaagttccaaaaaaagctagctctgtcctttacttattgagacactttaactttttcctttgtatttccattgtattagataaataaatgtgaatgtaaaattgtataaattactgtacttgaatacttctttctgtttcgggaatagtgaggagggggtgttgtaacaaaattggacaacttaaaagaatggtgtgtgctgggtgaaagacaaagactaaagaatgaggaaacaaacgtgatgcctggccagtgactgtcatataaacctttcttatttgagctaggcttgaacagacgtgacctagaagaaactgaacataaagagaagggggtggggggctagttttcaagttggggaacctgatagtgaaaagtcacagatggagaaaattgctctcagaaaaactgtttggattgctttcctcttgttgcacatgtaccatgcatttctcagcttggggtactacattttgtggaaagttaatctatctatctttccacatctgaattaatcattctaggaaagaatacttattcctactcatttcctttatgatgtccaaatggttgcaggatcataatctattgtgccacctttatttctagaagtacaactaatatgttcacattttcaaataaataatactccccgtaagtaataactgcaaccaatcagtgttattcagtgctatgcctccttgtaatgggtagttattaattattttcagagctttccggaaatactgtcctaactggctatgtttaggatctttgttatctctgaagacaaagaaagaagctaggactcttaattttggggtgcttcttgactcttagttgggaaactgaaaatatttccaaccttttacccacgtcaatggcatattctgggaatcaccaccaccaccaccactaccacagaaagaggctggaggctcctgtaccctgttcattccttaagggccctgcttcccttagtaagtaagtaagttggtctacggccctaaatatgcaaatgagagctgaaggtttttaaaaggtagaaaggaaaagggcaagggcttccacccctgctttaaaatgatttatttattctctgcttgtatttcttgtggagagagtaaggatagaaccaacaaggggctgagtagctgagaaaggggccacccaagagtgaaacatactttataccagaggagcagtggagcctcatgcagcacattatcatttgttatttgggtttaataataattttgacatcttttcactcatacacaaaaaaagtcagaactggtgttatttactgttgatttcatcctcctgtgtatgaaataacaagcctagaggaatgaactagtgctactgaactgtttaaattatttttgtgttaatagtacactttgagtatctttttccacattaaaaactttctgaattataaatgttttccttacattatttaacaatgtacactgttaaaaataaaaataaaaattcaaactttgggggtttctcagcagccgttaattgtacattttgcactaactctgggtgttgcgcttcttgtaagattgcgctttgtgcttcagtttgttacctttgtagacttatttaatgaaaccattcaaataaaccaaacttgcttttgttg

SEQ ID NO: 9239 - protein, 57 aa, Homo sapiens; identical to SEQ ID NO: 9197

SEQ ID NO: 9240 - DNA, 3694 bp, Homo sapiens
caggctccaacctgcggaccacttagacctagagacattaactgaatagatctgggggcaggagatggaatgctgagggggtgggtgggggtgggaagtagcctatatactaactactagtgctgcatttaactggttatttcttgccagaggggaatgtttttaatactgcattgagccctcagaatggagagtctcccccgctccagttattggaatgggagaggaaggaaagaacagcttttttgtcaaggggcagcttcagaccatgctttcctgtttatctatactcagtaatgaggatgagggctaggaaagtcttgttcataaggaagctggagaactcaatgtaaaatcaaacccatctgtaatttcgagtgggtggagctcttgcttttggtacatgccctgaatccctcactccctcaagaatccgaaccacaggacaaaaaccacctactgggctctctcctaccctgccctcctcccttttttttacccctctcttttttattttttctttgctctttagaacccagtgaaaaataccagggtactggggtgcaactctttcttatgataggtcattagtgctttaagcaaaagatattagcagctttgactgcagcattagcaattaggaaaaaaaaaaaattaagttccctgcggacatgtaactttgccatcagttttgatgtggaaacactgtgatatataaaatgttgttggacaacagtagttttaagagtaaaatatgaaacgtttaaaaagttccaaaaaaagctagctctgtcctttacttattgagacactttaactttttcctttgtatttccattgtattagataaataaatgtgaatgtaaaattgtataaattactgtacttgaatacttctttctgtttcgggaatagtgaggagggggtgttgtaacaaaattggacaacttaaaagaatggtgtgtgctgggtgaaagacaaagactaaagaatgaggaaacaaacgtgatgcctggccagtgactgtcatataaacctttcttatttgagctaggcttgaacagacgtgacctagaagaaactgaacataaagagaagggggtggggggctagttttcaagttggggaacctgatagtgaaaagtcacagatggagaaaattgctctcagaaaaactgtttggattgctttcctcttgttgcacatgtaccatgcatttctcagcttggggtactacattttgtggaaagttaatctatctatctttccacatctgaattaatcattctaggaaagaatacttattcctactcatttcctttatgatgtccaaatggttgcaggatcataatctattgtgccacctttatttctagaagtacaactaatatgttcacattttcaaataaataatactccccgtaagtaataactgcaaccaatcagtgttattcagtgctatgcctccttgtaatgggtagttattaattattttcagagctttccggaaatactgtcctaactggctatgtttaggatctttgttatctctgaagacaaagaaagaagctaggactcttaattttggggtgcttcttgactcttagttgggaaactgaaaatatttccaaccttttacccacgtcaatggcatattctgggaatcaccaccaccaccaccactaccacagaaagaggctggaggctcctgtaccctgttcattccttaagggccctgcttcccttagtaagtaagtaagttggtctacggccctaaatatgcaaatgagagctgaaggtttttaaaaggtagaaaggaaaagggcaagggcttccacccctgctttaaaatgatttatttattctctgcttgtatttcttgtggagagagtaaggatagaaccaacaaggggctgagtagctgagaaaggggccacccaagagtgaaacatactttataccagaggagcagtggagcctcatgcagcacattatcatttgttatttgggtttaataataattttgacatcttttcactcatacacaaaaaaagtcagaactggtgttatttactgttgatttcatcctcctgtgtatgaaataacaagcctagaggaatgaactagtgctactgaactgtttaaattatttttgtgttaatagtacactttgagtatctttttccacattaaaaactttctgaattataaatgttttccttacattatttaacaatgtacactgttaaaaataaaaataaaaattcaaactttgggggtttctcagcagccgttaattgtacattttgcactaactctgggtgttgcgcttcttgtaagattgcgctttgtgcttcagtttgttacctttgtagacttatttaatgaaaccattcaaataaaccaaacttgcttttgttgagctgtggggtttcatttccagaagattccttcacattctcactggcactattttgagttaagtgcaatttataactggatccctaattcctgggagctcctttgctgtctccttaacttcgaaaggaatagaaacggtcggctgccggctagtactttcagacttccttatctcaggttcacagcttcccaaatgggtctgagccaaaaaataggaagtcactgcttcaagattagccacagcccagcccaaaataatacgtctaaaaaaattattaaattggctgggcgcaatggctcatgcctataattctagtactttttactttgggaggccgaggtgggcagatcacttgaggtcagtttgagaccagcctggccaacatggagaaaccccgtctcctctactaaaaatacaaaaattagtcgggcgtcgtggtgggtgtctgtaatcccagctactcgggagcctgaggcaggagaattgcttgaatcctggcaggcggaggctgcaatgagtcaagatggcaccgctgcactccagcctgcgctacagagccagaccccccctctcaaaaaaaaagttgttaaactgcaaacttcattattttgggggaagaattatgaaacatctgagcactatgaaaagccaatttatggtcaaggtgggttacatctcacacctgaaatggggaagtagaaacagttgcgtttgagcatccctaattgaaatgctctgagatcagaaaatttctgagcactgacgtgatgccagaagtggaaaattccacacgtgacctcgtgtgacaagtcgcaaagcaccaggcatacaacagtttatgcagcgaccctaagagaaaaaaaaacccagccctcttcagctgcagtgtatcttcttatacaaaaactctgtttcatgcacaaaattatgtgtatgaggcatatacacgaaacacaggtgaattccacgttcagacttgggtcccatccccaaggtctcattatgtgtatacaaatattcaaaaaatgcaaaacaattctggtttcaagcatttcagataagcaatatatatatattctattttgttaataaggtatacgatttgctttctcaaaaatgccttttctggccagacacagtggctcacaccagtaatccctgtattttgtaaggcagaggtgggagtatcacttgggcccaagaggttgtggagagagctgtgtttgcaccactgaactccagtcagggcaacacagccagaccccgtctcaa

SEQ ID NO: 9241 - protein, 63 aa, Homo sapiens; identical to SEQ ID NO: 9199

SEQ ID NO: 9242 - DNA, 1764 bp, Homo sapiens
agctttgactgcagcattagcaattaggaaaaaaaaaaaattaagttccctgcggacatgtaactttgccatcagttttgatgtggaaacactgtgatatataaaatgttgttggacaacagtagttttaagagtaaaatatgaaacgtttaaaaagttccaaaaaaagctagctctgtcctttacttattgagacactttaactttttcctttgtatttccattgtattagataaataaatgtgaatgtaaaattgtataaattactgtacttgaatacttctgtttcccagtgttgcttgctggacattttagtgccttggacttctattgcttctgccattagcatcaacttaccagaccccagatcaataaagggcatgtggaaggaaatcgtaggtccatgtgaccccagcagtccagcagtggttatgccaaagggaaattgaaaaagtatttttttaagtcattcaacaactttgtctagagcaggtgtaagatgagtagggtgggaagttaggttggcatcagtggttaaaaacagaaagttctgtttcgggaatagtgaggagggggtgttgtaacaaaattggacaacttaaaagaatggtgtgtgctgggtgaaagacaaagactaaagaatgaggaaacaaacgtgatgcctggccagtgactgtcatataaacctttcttatttgagctaggcttgaacagacgtgacctagaagaaatgtttggattgctttcctcttgttgcacatgtaccatgcatttctcagcttggggtactacattttgtggaaagttaatctatctatctttccacatctgaattaatcattctaggaaagaatacttattcctactcatttcctttatgatgtccaaatggttgcaggatcataatctattgtgccacctttatttctagaagtacaactaatatgttcacattttcaaataaataatactccccgtaagtaataactgcaaccaatcagtgttattcagtgctatgcctccttgtaatgggtagttattaattattttcagagctttccggaaatactgtcctaactggctatgtttaggatctttgttatctctgaagacaaagaaagaagctaggactcttaattttggggtgcttcttgactcttagttgggaaactgaaaatatttccaaccttttacccacgtcaatggcatattctgggaatcaccaccaccaccaccactaccacagaaagaggctggaggctcctgtaccctgttcattccttaagggccctgcttcccttagtaagtaagtaagttggtctacggccctaaatatgcaaatgagagctgaaggtttttaaaaggtagaaaggaaaagggcaagggcttccacccctgctttaaaatgatttatttattctctgcttgtatttcttgtggagagagtaaggatagaaccaacaaggggctgagtagctgagaaaggggccacccaagagtgaaacatactttataccagaggagcagtggagcctcatgcagcacattatcatttgttatttgggtttaataataattttgacatcttttcactcatacacaaaaaaagtcagaactggtgttatttactgttgatttcatcctcctgtgtatgaaataacaagcctagaggaatgaactagtgctactgaactgtttaaattatttttgtgttaatagtacactttgagtatctttttccacattaaaaactttctgaattat

SEQ ID NO: 9243 - protein, 33 aa, Homo sapiens
MFGLLSSCCTCTMHFSAWGTTFCGKLIYLSFHI

SEQ ID NO: 9244 - DNA, 1830 bp, Homo sapiens
agctttgactgcagcattagcaattaggaaaaaaaaaaaattaagttccctgcggacatgtaactttgccatcagttttgatgtggaaacactgtgatatataaaatgttgttggacaacagtagttttaagagtaaaatatgaaacgtttaaaaagttccaaaaaaagctagctctgtcctttacttattgagacactttaactttttcctttgtatttccattgtattagataaataaatgtgaatgtaaaattgtataaattactgtacttgaatacttctgtttcccagtgttgcttgctggacattttagtgccttggacttctattgcttctgccattagcatcaacttaccagaccccagatcaataaagggcatgtggaaggaaatcgtaggtccatgtgaccccagcagtccagcagtggttatgccaaagggaaattgaaaaagtatttttttaagtcattcaacaactttgtctagagcaggtgtaagatgagtagggtgggaagttaggttggcatcagtggttaaaaacagaaagttctgtttcgggaatagtgaggagggggtgttgtaacaaaattggacaacttaaaagaatggtgtgtgctgggtgaaagacaaagactaaagaatgaggaaacaaacgtgatgcctggccagtgactgtcatataaacctttcttatttgagctaggcttgaacagacgtgacctagaagaaatgtttggattgctttcctcttgttgcacatgtaccatgcatttctcagcttggggtactacattttgtggaaagttaatctatctatctttccacatctgaattaatcattctaggaaagaatacttattcctactcatttcctttatgatgtccaaatggttgcaggatcataatctattgtgccacctttatttctagaagtacaactaatatgttcacattttcaaataaataatactccccgtaagtaataactgcaaccaatcagtgttattcagtgctatgcctccttgtaatgggtagttattaattattttcagagctttccggaaatactgtcctaactggctatgtttaggatctttgttatctctgaagacaaagaaagaagctaggactcttaattttggggtgcttcttgactcttagttgggaaactgaaaatatttccaaccttttacccacgtcaatggcatattctgggaatcaccaccaccaccaccactaccacagaaagaggctggaggctcctgtaccctgttcattccttaagggccctgcttcccttagtaagtaagtaagttggtctacggccctaaatatgcaaatgagagctgaaggtttttaaaaggtagaaaggaaaagggcaagggcttccacccctgctttaaaatgatttatttattctctgcttgtatttcttgtggagagagtaaggatagaaccaacaaggggctgagtagctgagaaaggggccacccaagagtgaaacatactttataccagaggagcagtggagcctcatgcagcacattatcatttgttatttgggtttaataataattttgacatcttttcactcatacacaaaaaaagtcagaactggtgttatttactgttgatttcatcctcctgtgtatgaaataacaagcctagaggaatgaactagtgctactgaactgtttaaattatttttgtgttaatagtacactttgagtatctttttccacattaaaaactttctgaattataaatgttttccttacattatttaacaatgtacactgttaaaaataaaaataaaaattcaaactttg

SEQ ID NO: 9245 - protein, 33 aa, Homo sapiens; identical to SEQ ID NO: 9243

SEQ ID NO: 9246 - DNA, 1976 bp, Homo sapiens
agctttgactgcagcattagcaattaggaaaaaaaaaaaattaagttccctgcggacatgtaactttgccatcagttttgatgtggaaacactgtgatatataaaatgttgttggacaacagtagttttaagagtaaaatatgaaacgtttaaaaagttccaaaaaaagctagctctgtcctttacttattgagacactttaactttttcctttgtatttccattgtattagataaataaatgtgaatgtaaaattgtataaattactgtacttgaatacttctgtttcccagtgttgcttgctggacattttagtgccttggacttctattgcttctgccattagcatcaacttaccagaccccagatcaataaagggcatgtggaaggaaatcgtaggtccatgtgaccccagcagtccagcagtggttatgccaaagggaaattgaaaaagtatttttttaagtcattcaacaactttgtctagagcaggtgtaagatgagtagggtgggaagttaggttggcatcagtggttaaaaacagaaagttctgtttcgggaatagtgaggagggggtgttgtaacaaaattggacaacttaaaagaatggtgtgtgctgggtgaaagacaaagactaaagaatgaggaaacaaacgtgatgcctggccagtgactgtcatataaacctttcttatttgagctaggcttgaacagacgtgacctagaagaaatgtttggattgctttcctcttgttgcacatgtaccatgcatttctcagcttggggtactacattttgtggaaagttaatctatctatctttccacatctgaattaatcattctaggaaagaatacttattcctactcatttcctttatgatgtccaaatggttgcaggatcataatctattgtgccacctttatttctagaagtacaactaatatgttcacattttcaaataaataatactccccgtaagtaataactgcaaccaatcagtgttattcagtgctatgcctccttgtaatgggtagttattaattattttcagagctttccggaaatactgtcctaactggctatgtttaggatctttgttatctctgaagacaaagaaagaagctaggactcttaattttggggtgcttcttgactcttagttgggaaactgaaaatatttccaaccttttacccacgtcaatggcatattctgggaatcaccaccaccaccaccactaccacagaaagaggctggaggctcctgtaccctgttcattccttaagggccctgcttcccttagtaagtaagtaagttggtctacggccctaaatatgcaaatgagagctgaaggtttttaaaaggtagaaaggaaaagggcaagggcttccacccctgctttaaaatgatttatttattctctgcttgtatttcttgtggagagagtaaggatagaaccaacaaggggctgagtagctgagaaaggggccacccaagagtgaaacatactttataccagaggagcagtggagcctcatgcagcacattatcatttgttatttgggtttaataataattttgacatcttttcactcatacacaaaaaaagtcagaactggtgttatttactgttgatttcatcctcctgtgtatgaaataacaagcctagaggaatgaactagtgctactgaactgtttaaattatttttgtgttaatagtacactttgagtatctttttccacattaaaaactttctgaattataaatgttttccttacattatttaacaatgtacactgttaaaaataaaaataaaaattcaaactttgggggtttctcagcagccgttaattgtacattttgcactaactctgggtgttgcgcttcttgtaagattgcgctttgtgcttcagtttgttacctttgtagacttatttaatgaaaccattcaaataaaccaaacttgcttttgttg

SEQ ID NO: 9247 - protein, 33 aa, Homo sapiens; identical to SEQ ID NO: 9243

SEQ ID NO: 9248 - DNA, 3249 bp, Homo sapiens
agctttgactgcagcattagcaattaggaaaaaaaaaaaattaagttccctgcggacatgtaactttgccatcagttttgatgtggaaacactgtgatatataaaatgttgttggacaacagtagttttaagagtaaaatatgaaacgtttaaaaagttccaaaaaaagctagctctgtcctttacttattgagacactttaactttttcctttgtatttccattgtattagataaataaatgtgaatgtaaaattgtataaattactgtacttgaatacttctgtttcccagtgttgcttgctggacattttagtgccttggacttctattgcttctgccattagcatcaacttaccagaccccagatcaataaagggcatgtggaaggaaatcgtaggtccatgtgaccccagcagtccagcagtggttatgccaaagggaaattgaaaaagtatttttttaagtcattcaacaactttgtctagagcaggtgtaagatgagtagggtgggaagttaggttggcatcagtggttaaaaacagaaagttctgtttcgggaatagtgaggagggggtgttgtaacaaaattggacaacttaaaagaatggtgtgtgctgggtgaaagacaaagactaaagaatgaggaaacaaacgtgatgcctggccagtgactgtcatataaacctttcttatttgagctaggcttgaacagacgtgacctagaagaaatgtttggattgctttcctcttgttgcacatgtaccatgcatttctcagcttggggtactacattttgtggaaagttaatctatctatctttccacatctgaattaatcattctaggaaagaatacttattcctactcatttcctttatgatgtccaaatggttgcaggatcataatctattgtgccacctttatttctagaagtacaactaatatgttcacattttcaaataaataatactccccgtaagtaataactgcaaccaatcagtgttattcagtgctatgcctccttgtaatgggtagttattaattattttcagagctttccggaaatactgtcctaactggctatgtttaggatctttgttatctctgaagacaaagaaagaagctaggactcttaattttggggtgcttcttgactcttagttgggaaactgaaaatatttccaaccttttacccacgtcaatggcatattctgggaatcaccaccaccaccaccactaccacagaaagaggctggaggctcctgtaccctgttcattccttaagggccctgcttcccttagtaagtaagtaagttggtctacggccctaaatatgcaaatgagagctgaaggtttttaaaaggtagaaaggaaaagggcaagggcttccacccctgctttaaaatgatttatttattctctgcttgtatttcttgtggagagagtaaggatagaaccaacaaggggctgagtagctgagaaaggggccacccaagagtgaaacatactttataccagaggagcagtggagcctcatgcagcacattatcatttgttatttgggtttaataataattttgacatcttttcactcatacacaaaaaaagtcagaactggtgttatttactgttgatttcatcctcctgtgtatgaaataacaagcctagaggaatgaactagtgctactgaactgtttaaattatttttgtgttaatagtacactttgagtatctttttccacattaaaaactttctgaattataaatgttttccttacattatttaacaatgtacactgttaaaaataaaaataaaaattcaaactttgggggtttctcagcagccgttaattgtacattttgcactaactctgggtgttgcgcttcttgtaagattgcgctttgtgcttcagtttgttacctttgtagacttatttaatgaaaccattcaaataaaccaaacttgcttttgttgagctgtggggtttcatttccagaagattccttcacattctcactggcactattttgagttaagtgcaatttataactggatccctaattcctgggagctcctttgctgtctccttaacttcgaaaggaatagaaacggtcggctgccggctagtactttcagacttccttatctcaggttcacagcttcccaaatgggtctgagccaaaaaataggaagtcactgcttcaagattagccacagcccagcccaaaataatacgtctaaaaaaattattaaattggctgggcgcaatggctcatgcctataattctagtactttttactttgggaggccgaggtgggcagatcacttgaggtcagtttgagaccagcctggccaacatggagaaaccccgtctcctctactaaaaatacaaaaattagtcgggcgtcgtggtgggtgtctgtaatcccagctactcgggagcctgaggcaggagaattgcttgaatcctggcaggcggaggctgcaatgagtcaagatggcaccgctgcactccagcctgcgctacagagccagaccccccctctcaaaaaaaaagttgttaaactgcaaacttcattattttgggggaagaattatgaaacatctgagcactatgaaaagccaatttatggtcaaggtgggttacatctcacacctgaaatggggaagtagaaacagttgcgtttgagcatccctaattgaaatgctctgagatcagaaaatttctgagcactgacgtgatgccagaagtggaaaattccacacgtgacctcgtgtgacaagtcgcaaagcaccaggcatacaacagtttatgcagcgaccctaagagaaaaaaaaacccagccctcttcagctgcagtgtatcttcttatacaaaaactctgtttcatgcacaaaattatgtgtatgaggcatatacacgaaacacaggtgaattccacgttcagacttgggtcccatccccaaggtctcattatgtgtatacaaatattcaaaaaatgcaaaacaattctggtttcaagcatttcagataagcaatatatatatattctattttgttaataaggtatacgatttgctttctcaaaaatgccttttctggccagacacagtggctcacaccagtaatccctgtattttgtaaggcagaggtgggagtatcacttgggcccaagaggttgtggagagagctgtgtttgcaccactgaactccagtcagggcaacacagccagaccccgtctcaa

SEQ ID NO: 9249 - protein, 33 aa, Homo sapiens; identical to SEQ ID NO: 9243

SEQ ID NO: 9250 - DNA, 1626 bp, Homo sapiens
ttctgtttcccagtgttgcttgctggacattttagtgccttggacttctattgcttctgccattagcatcaacttaccagaccccagatcaataaagggcatgtggaaggaaatcgtaggtccatgtgaccccagcagtccagcagtggttatgccaaagggaaattgaaaaagtatttttttaagtcattcaacaactttgtctagagcaggtgtaagatgagtagggtgggaagttaggttggcatcagtggttaaaaacagaaagttctgtttcgggaatagtgaggagggggtgttgtaacaaaattggacaacttaaaagaatggtgtgtgctgggtgaaagacaaagactaaagaatgaggaaacaaacgtgatgcctggccagtgactgtcatataaacctttcttatttgagctaggcttgaacagacgtgacctagaagaaactgaacataaagagaagggggtggggggctagttttcaagttggggaacctgatagtgaaaagtcacagatggagaaaattgctctcagaaaaactgtttggattgctttcctcttgttgcacatgtaccatgcatttctcagcttggggtactacattttgtggaaagttaatctatctatctttccacatctgaattaatcattctaggaaagaatacttattcctactcatttcctttatgatgtccaaatggttgcaggatcataatctattgtgccacctttatttctagaagtacaactaatatgttcacattttcaaataaataatactccccgtaagtaataactgcaaccaatcagtgttattcagtgatttccaaccttttacccacgtcaatggcatattctgggaatcaccaccaccaccaccactaccacagaaagaggctggaggctcctgtaccctgttcattccttaagggccctgcttcccttagtaagtaagtaagttggtctacggccctaaatatgcaaatgagagctgaaggtttttaaaaggtagaaaggaaaagggcaagggcttccacccctgctttaaaatgatttatttattctctgcttgtatttcttgtggagagagtaaggatagaaccaacaaggggctgagtagctgagaaaggggccacccaagagtgaaacatactttataccagaggagcagtggagcctcatgcagcacattatcatttgttatttgggtttaataataattttgacatcttttcactcatacacaaaaaaagtcagaactggtgttatttactgttgatttcatcctcctgtgtatgaaataacaagcctagaggaatgaactagtgctactgaactgtttaaattatttttgtgttaatagtacactttgagtatctttttccacattaaaaactttctgaattataaatgttttccttacattatttaacaatgtacactgttaaaaataaaaataaaaattcaaactttgggggtttctcagcagccgttaattgtacattttgcactaactctgggtgttgcgcttcttgtaagattgcgctttgtgcttcagtttgttacctttgtagacttatttaatgaaaccattcaaataaaccaaacttgcttttgttg

SEQ ID NO: 9251 - protein, 57 aa, Homo sapiens; identical to SEQ ID NO: 9197

SEQ ID NO: 9252 - DNA, 2899 bp, Homo sapiens
ttctgtttcccagtgttgcttgctggacattttagtgccttggacttctattgcttctgccattagcatcaacttaccagaccccagatcaataaagggcatgtggaaggaaatcgtaggtccatgtgaccccagcagtccagcagtggttatgccaaagggaaattgaaaaagtatttttttaagtcattcaacaactttgtctagagcaggtgtaagatgagtagggtgggaagttaggttggcatcagtggttaaaaacagaaagttctgtttcgggaatagtgaggagggggtgttgtaacaaaattggacaacttaaaagaatggtgtgtgctgggtgaaagacaaagactaaagaatgaggaaacaaacgtgatgcctggccagtgactgtcatataaacctttcttatttgagctaggcttgaacagacgtgacctagaagaaactgaacataaagagaagggggtggggggctagttttcaagttggggaacctgatagtgaaaagtcacagatggagaaaattgctctcagaaaaactgtttggattgctttcctcttgttgcacatgtaccatgcatttctcagcttggggtactacattttgtggaaagttaatctatctatctttccacatctgaattaatcattctaggaaagaatacttattcctactcatttcctttatgatgtccaaatggttgcaggatcataatctattgtgccacctttatttctagaagtacaactaatatgttcacattttcaaataaataatactccccgtaagtaataactgcaaccaatcagtgttattcagtgatttccaaccttttacccacgtcaatggcatattctgggaatcaccaccaccaccaccactaccacagaaagaggctggaggctcctgtaccctgttcattccttaagggccctgcttcccttagtaagtaagtaagttggtctacggccctaaatatgcaaatgagagctgaaggtttttaaaaggtagaaaggaaaagggcaagggcttccacccctgctttaaaatgatttatttattctctgcttgtatttcttgtggagagagtaaggatagaaccaacaaggggctgagtagctgagaaaggggccacccaagagtgaaacatactttataccagaggagcagtggagcctcatgcagcacattatcatttgttatttgggtttaataataattttgacatcttttcactcatacacaaaaaaagtcagaactggtgttatttactgttgatttcatcctcctgtgtatgaaataacaagcctagaggaatgaactagtgctactgaactgtttaaattatttttgtgttaatagtacactttgagtatctttttccacattaaaaactttctgaattataaatgttttccttacattatttaacaatgtacactgttaaaaataaaaataaaaattcaaactttgggggtttctcagcagccgttaattgtacattttgcactaactctgggtgttgcgcttcttgtaagattgcgctttgtgcttcagtttgttacctttgtagacttatttaatgaaaccattcaaataaaccaaacttgcttttgttgagctgtggggtttcatttccagaagattccttcacattctcactggcactattttgagttaagtgcaatttataactggatccctaattcctgggagctcctttgctgtctccttaacttcgaaaggaatagaaacggtcggctgccggctagtactttcagacttccttatctcaggttcacagcttcccaaatgggtctgagccaaaaaataggaagtcactgcttcaagattagccacagcccagcccaaaataatacgtctaaaaaaattattaaattggctgggcgcaatggctcatgcctataattctagtactttttactttgggaggccgaggtgggcagatcacttgaggtcagtttgagaccagcctggccaacatggagaaaccccgtctcctctactaaaaatacaaaaattagtcgggcgtcgtggtgggtgtctgtaatcccagctactcgggagcctgaggcaggagaattgcttgaatcctggcaggcggaggctgcaatgagtcaagatggcaccgctgcactccagcctgcgctacagagccagaccccccctctcaaaaaaaaagttgttaaactgcaaacttcattattttgggggaagaattatgaaacatctgagcactatgaaaagccaatttatggtcaaggtgggttacatctcacacctgaaatggggaagtagaaacagttgcgtttgagcatccctaattgaaatgctctgagatcagaaaatttctgagcactgacgtgatgccagaagtggaaaattccacacgtgacctcgtgtgacaagtcgcaaagcaccaggcatacaacagtttatgcagcgaccctaagagaaaaaaaaacccagccctcttcagctgcagtgtatcttcttatacaaaaactctgtttcatgcacaaaattatgtgtatgaggcatatacacgaaacacaggtgaattccacgttcagacttgggtcccatccccaaggtctcattatgtgtatacaaatattcaaaaaatgcaaaacaattctggtttcaagcatttcagataagcaatatatatatattctattttgttaataaggtatacgatttgctttctcaaaaatgccttttctggccagacacagtggctcacaccagtaatccctgtattttgtaaggcagaggtgggagtatcacttgggcccaagaggttgtggagagagctgtgtttgcaccactgaactccagtcagggcaacacagccagaccccgtctcaa

SEQ ID NO: 9253 - protein, 63 aa, Homo sapiens; identical to SEQ ID NO: 9199

SEQ ID NO: 9254 - DNA, 1486 bp, Homo sapiens
attttagtgccttggacttctattgcttctgccattagcatcaacttaccagaccccagatcaataaagggcatgtggaaggaaatcgtaggtccatgtgaccccagcagtccagcagtggttatgccaaagggaaattgaaaaagtatttttttaagtcattcaacaactttgtctagagcaggtgtaagatgagtagggtgggaagttaggttggcatcagtggttaaaaacagaaagttctgtttcgggaatagtgaggagggggtgttgtaacaaaattggacaacttaaaagaatggtgtgtgctgggtgaaagacaaagactaaagaatgaggaaacaaacgtgatgcctggccagtgactgtcatataaacctttcttatttgagctaggcttgaacagacgtgacctagaagaaactgaacataaagagaagggggtggggggctagttttcaagttggggaacctgatagtgaaaagtcacagatggagaaaattgctctcagaaaaactgtttggattgctttcctcttgttgcacatgtaccatgcatttctcagcttggggtactacattttgtggaaagttaatctatctatctttccacatctgaattaatcattctaggaaagaatacttattcctactcatttcctttatgatgtccaaatggttgcaggatcataatctattgtgccacctttatttctagaagtacaactaatatgttcacattttcaaataaataatactccccgtaagtaataactgcaaccaatcagtgttattcagtgctatgcctccttgtaatgggtagttattaattattttcagagctttccggaaatactgtcctaactggctatgtttaggatctttgttatctctgaagacaaagaaagaagctaggactcttaattttggggtgcttcttgactcttagttgggaaactgaaaatatttccaaccttttacccacgtcaatggcatattctgggaatcaccaccaccaccaccactaccacagaaagaggctggaggctcctgtaccctgttcattccttaagggccctgcttcccttagtaagtaagtaagttggtctacggccccctgctttaaaatgatttatttattctctgcttgtatttcttgtggagagagtaaggatagaaccaacaaggggctgagtagctgagaaaggggccacccaagagtgaaacatactttataccagaggagcagtggagcctcatgcagcacattatcatttgttatttgggtttaataataattttgacatcttttcactcatacacaaaaaaagtcagaactggtgttatttactgttgatttcatcctcctgtgtatgaaataacaagcctagaggaatgaactagtgctactgaactgtttaaattatttttgtgttaatagtacactttgagtatctttttccacattaaaaactttctgaattat

SEQ ID NO: 9255 - protein, 43 aa, Homo sapiens; identical to SEQ ID NO: 9235

SEQ ID NO: 9256 - DNA, 1552 bp, Homo sapiens
attttagtgccttggacttctattgcttctgccattagcatcaacttaccagaccccagatcaataaagggcatgtggaaggaaatcgtaggtccatgtgaccccagcagtccagcagtggttatgccaaagggaaattgaaaaagtatttttttaagtcattcaacaactttgtctagagcaggtgtaagatgagtagggtgggaagttaggttggcatcagtggttaaaaacagaaagttctgtttcgggaatagtgaggagggggtgttgtaacaaaattggacaacttaaaagaatggtgtgtgctgggtgaaagacaaagactaaagaatgaggaaacaaacgtgatgcctggccagtgactgtcatataaacctttcttatttgagctaggcttgaacagacgtgacctagaagaaactgaacataaagagaagggggtggggggctagttttcaagttggggaacctgatagtgaaaagtcacagatggagaaaattgctctcagaaaaactgtttggattgctttcctcttgttgcacatgtaccatgcatttctcagcttggggtactacattttgtggaaagttaatctatctatctttccacatctgaattaatcattctaggaaagaatacttattcctactcatttcctttatgatgtccaaatggttgcaggatcataatctattgtgccacctttatttctagaagtacaactaatatgttcacattttcaaataaataatactccccgtaagtaataactgcaaccaatcagtgttattcagtgctatgcctccttgtaatgggtagttattaattattttcagagctttccggaaatactgtcctaactggctatgtttaggatctttgttatctctgaagacaaagaaagaagctaggactcttaattttggggtgcttcttgactcttagttgggaaactgaaaatatttccaaccttttacccacgtcaatggcatattctgggaatcaccaccaccaccaccactaccacagaaagaggctggaggctcctgtaccctgttcattccttaagggccctgcttcccttagtaagtaagtaagttggtctacggccccctgctttaaaatgatttatttattctctgcttgtatttcttgtggagagagtaaggatagaaccaacaaggggctgagtagctgagaaaggggccacccaagagtgaaacatactttataccagaggagcagtggagcctcatgcagcacattatcatttgttatttgggtttaataataattttgacatcttttcactcatacacaaaaaaagtcagaactggtgttatttactgttgatttcatcctcctgtgtatgaaataacaagcctagaggaatgaactagtgctactgaactgtttaaattatttttgtgttaatagtacactttgagtatctttttccacattaaaaactttctgaattataaatgttttccttacattatttaacaatgtacactgttaaaaataaaaataaaaattcaaactttg

SEQ ID NO: 9257 - protein, 43 aa, Homo sapiens; identical to SEQ ID NO: 9235

SEQ ID NO: 9258 - DNA, 1698 bp, Homo sapiens
attttagtgccttggacttctattgcttctgccattagcatcaacttaccagaccccagatcaataaagggcatgtggaaggaaatcgtaggtccatgtgaccccagcagtccagcagtggttatgccaaagggaaattgaaaaagtatttttttaagtcattcaacaactttgtctagagcaggtgtaagatgagtagggtgggaagttaggttggcatcagtggttaaaaacagaaagttctgtttcgggaatagtgaggagggggtgttgtaacaaaattggacaacttaaaagaatggtgtgtgctgggtgaaagacaaagactaaagaatgaggaaacaaacgtgatgcctggccagtgactgtcatataaacctttcttatttgagctaggcttgaacagacgtgacctagaagaaactgaacataaagagaagggggtggggggctagttttcaagttggggaacctgatagtgaaaagtcacagatggagaaaattgctctcagaaaaactgtttggattgctttcctcttgttgcacatgtaccatgcatttctcagcttggggtactacattttgtggaaagttaatctatctatctttccacatctgaattaatcattctaggaaagaatacttattcctactcatttcctttatgatgtccaaatggttgcaggatcataatctattgtgccacctttatttctagaagtacaactaatatgttcacattttcaaataaataatactccccgtaagtaataactgcaaccaatcagtgttattcagtgctatgcctccttgtaatgggtagttattaattattttcagagctttccggaaatactgtcctaactggctatgtttaggatctttgttatctctgaagacaaagaaagaagctaggactcttaattttggggtgcttcttgactcttagttgggaaactgaaaatatttccaaccttttacccacgtcaatggcatattctgggaatcaccaccaccaccaccactaccacagaaagaggctggaggctcctgtaccctgttcattccttaagggccctgcttcccttagtaagtaagtaagttggtctacggccccctgctttaaaatgatttatttattctctgcttgtatttcttgtggagagagtaaggatagaaccaacaaggggctgagtagctgagaaaggggccacccaagagtgaaacatactttataccagaggagcagtggagcctcatgcagcacattatcatttgttatttgggtttaataataattttgacatcttttcactcatacacaaaaaaagtcagaactggtgttatttactgttgatttcatcctcctgtgtatgaaataacaagcctagaggaatgaactagtgctactgaactgtttaaattatttttgtgttaatagtacactttgagtatctttttccacattaaaaactttctgaattataaatgttttccttacattatttaacaatgtacactgttaaaaataaaaataaaaattcaaactttgggggtttctcagcagccgttaattgtacattttgcactaactctgggtgttgcgcttcttgtaagattgcgctttgtgcttcagtttgttacctttgtagacttatttaatgaaaccattcaaataaaccaaacttgcttttgttg

SEQ ID NO: 9259 - protein, 57 aa, Homo sapiens; identical to SEQ ID NO: 9197

SEQ ID NO: 9260 - DNA, 2971 bp, Homo sapiens
attttagtgccttggacttctattgcttctgccattagcatcaacttaccagaccccagatcaataaagggcatgtggaaggaaatcgtaggtccatgtgaccccagcagtccagcagtggttatgccaaagggaaattgaaaaagtatttttttaagtcattcaacaactttgtctagagcaggtgtaagatgagtagggtgggaagttaggttggcatcagtggttaaaaacagaaagttctgtttcgggaatagtgaggagggggtgttgtaacaaaattggacaacttaaaagaatggtgtgtgctgggtgaaagacaaagactaaagaatgaggaaacaaacgtgatgcctggccagtgactgtcatataaacctttcttatttgagctaggcttgaacagacgtgacctagaagaaactgaacataaagagaagggggtggggggctagttttcaagttggggaacctgatagtgaaaagtcacagatggagaaaattgctctcagaaaaactgtttggattgctttcctcttgttgcacatgtaccatgcatttctcagcttggggtactacattttgtggaaagttaatctatctatctttccacatctgaattaatcattctaggaaagaatacttattcctactcatttcctttatgatgtccaaatggttgcaggatcataatctattgtgccacctttatttctagaagtacaactaatatgttcacattttcaaataaataatactccccgtaagtaataactgcaaccaatcagtgttattcagtgctatgcctccttgtaatgggtagttattaattattttcagagctttccggaaatactgtcctaactggctatgtttaggatctttgttatctctgaagacaaagaaagaagctaggactcttaattttggggtgcttcttgactcttagttgggaaactgaaaatatttccaaccttttacccacgtcaatggcatattctgggaatcaccaccaccaccaccactaccacagaaagaggctggaggctcctgtaccctgttcattccttaagggccctgcttcccttagtaagtaagtaagttggtctacggccccctgctttaaaatgatttatttattctctgcttgtatttcttgtggagagagtaaggatagaaccaacaaggggctgagtagctgagaaaggggccacccaagagtgaaacatactttataccagaggagcagtggagcctcatgcagcacattatcatttgttatttgggtttaataataattttgacatcttttcactcatacacaaaaaaagtcagaactggtgttatttactgttgatttcatcctcctgtgtatgaaataacaagcctagaggaatgaactagtgctactgaactgtttaaattatttttgtgttaatagtacactttgagtatctttttccacattaaaaactttctgaattataaatgttttccttacattatttaacaatgtacactgttaaaaataaaaataaaaattcaaactttgggggtttctcagcagccgttaattgtacattttgcactaactctgggtgttgcgcttcttgtaagattgcgctttgtgcttcagtttgttacctttgtagacttatttaatgaaaccattcaaataaaccaaacttgcttttgttgagctgtggggtttcatttccagaagattccttcacattctcactggcactattttgagttaagtgcaatttataactggatccctaattcctgggagctcctttgctgtctccttaacttcgaaaggaatagaaacggtcggctgccggctagtactttcagacttccttatctcaggttcacagcttcccaaatgggtctgagccaaaaaataggaagtcactgcttcaagattagccacagcccagcccaaaataatacgtctaaaaaaattattaaattggctgggcgcaatggctcatgcctataattctagtactttttactttgggaggccgaggtgggcagatcacttgaggtcagtttgagaccagcctggccaacatggagaaaccccgtctcctctactaaaaatacaaaaattagtcgggcgtcgtggtgggtgtctgtaatcccagctactcgggagcctgaggcaggagaattgcttgaatcctggcaggcggaggctgcaatgagtcaagatggcaccgctgcactccagcctgcgctacagagccagaccccccctctcaaaaaaaaagttgttaaactgcaaacttcattattttgggggaagaattatgaaacatctgagcactatgaaaagccaatttatggtcaaggtgggttacatctcacacctgaaatggggaagtagaaacagttgcgtttgagcatccctaattgaaatgctctgagatcagaaaatttctgagcactgacgtgatgccagaagtggaaaattccacacgtgacctcgtgtgacaagtcgcaaagcaccaggcatacaacagtttatgcagcgaccctaagagaaaaaaaaacccagccctcttcagctgcagtgtatcttcttatacaaaaactctgtttcatgcacaaaattatgtgtatgaggcatatacacgaaacacaggtgaattccacgttcagacttgggtcccatccccaaggtctcattatgtgtatacaaatattcaaaaaatgcaaaacaattctggtttcaagcatttcagataagcaatatatatatattctattttgttaataaggtatacgatttgctttctcaaaaatgccttttctggccagacacagtggctcacaccagtaatccctgtattttgtaaggcagaggtgggagtatcacttgggcccaagaggttgtggagagagctgtgtttgcaccactgaactccagtcagggcaacacagccagaccccgtctcaa

SEQ ID NO: 9261 - protein, 63 aa, Homo sapiens; identical to SEQ ID NO: 9199

SEQ ID NO: 9262 - DNA, 2547 bp, Homo sapiens
ggagggggtgttgtaacaaaattggacaacttaaaagaatggtgtgtgctgggtgaaagacaaagactaaagaatgaggaaacaaacgtgatgcctggccagtgactgtcatataaacctttcttatttgagctaggcttgaacagacgtgacctagaagaaactgaacataaagagaagggggtggggggctagttttcaagttggggaacctgatagtgaaaagtcacagatggagaaaattgctctcagaaaaactgtttggattgctttcctcttgttgcacatgtaccatgcatttctcagcttggggtactacattttgtggaaagttaatctatctatctttccacatctgaattaatcattctaggaaagaatacttattcctactcatttcctttatgatgtccaaatggttgcaggatcataatctattgtgccacctttatttctagaagtacaactaatatgttcacattttcaaataaataatactccccgtaagtaataactgcaaccaatcagtgttattcagtgctatgcctccttgtaatgggtagttattaattattttcagagctttccggaaatactgtcctaactggctatgtttaggatctttgttatctctgaagacaaagaaagaagctaggactcttaattttggggtgcttcttgactcttagttgggaaactgaaaatatttccaaccttttacccacgtcaatggcatattctgggaatcaccaccaccaccaccactaccacagaaagaggctggaggctcctgtaccctgttcattctttataccagaggagcagtggagcctcatgcagcacattatcatttgttatttgggtttaataataattttgacatcttttcactcatacacaaaaaaagtcagaactggtgttatttactgttgatttcatcctcctgtgtatgaaataacaagcctagaggaatgaactagtgctactgaactgtttaaattatttttgtgttaatagtacactttgagtatctttttccacattaaaaactttctgaattataaatgttttccttacattatttaacaatgtacactgttaaaaataaaaataaaaattcaaactttgggggtttctcagcagccgttaattgtacattttgcactaactctgggtgttgcgcttcttgtaagattgcgctttgtgcttcagtttgttacctttgtagacttatttaatgaaaccattcaaataaaccaaacttgcttttgttgagctgtggggtttcatttccagaagattccttcacattctcactggcactattttgagttaagtgcaatttataactggatccctaattcctgggagctcctttgctgtctccttaacttcgaaaggaatagaaacggtcggctgccggctagtactttcagacttccttatctcaggttcacagcttcccaaatgggtctgagccaaaaaataggaagtcactgcttcaagattagccacagcccagcccaaaataatacgtctaaaaaaattattaaattggctgggcgcaatggctcatgcctataattctagtactttttactttgggaggccgaggtgggcagatcacttgaggtcagtttgagaccagcctggccaacatggagaaaccccgtctcctctactaaaaatacaaaaattagtcgggcgtcgtggtgggtgtctgtaatcccagctactcgggagcctgaggcaggagaattgcttgaatcctggcaggcggaggctgcaatgagtcaagatggcaccgctgcactccagcctgcgctacagagccagaccccccctctcaaaaaaaaagttgttaaactgcaaacttcattattttgggggaagaattatgaaacatctgagcactatgaaaagccaatttatggtcaaggtgggttacatctcacacctgaaatggggaagtagaaacagttgcgtttgagcatccctaattgaaatgctctgagatcagaaaatttctgagcactgacgtgatgccagaagtggaaaattccacacgtgacctcgtgtgacaagtcgcaaagcaccaggcatacaacagtttatgcagcgaccctaagagaaaaaaaaacccagccctcttcagctgcagtgtatcttcttatacaaaaactctgtttcatgcacaaaattatgtgtatgaggcatatacacgaaacacaggtgaattccacgttcagacttgggtcccatccccaaggtctcattatgtgtatacaaatattcaaaaaatgcaaaacaattctggtttcaagcatttcagataagcaatatatatatattctattttgttaataaggtatacgatttgctttctcaaaaatgccttttctggccagacacagtggctcacaccagtaatccctgtattttgtaaggcagaggtgggagtatcacttgggcccaagaggttgtggagagagctgtgtttgcaccactgaactccagtcagggcaacacagccagaccccgtctcaa

SEQ ID NO: 9263 - protein, 67 aa, Homo sapiens
MAYSGNHHHHHHYHRKRLEAPVPCSFFIPEEQWSLMQHIIICYLGLIIILTSFHSYTKKVRTGVIYC

SEQ ID NO: 9264 - DNA, 1155 bp, Homo sapiens
tgaggaaacaaacgtgatgcctggccagtgactgtcatataaacctttcttatttgagctaggcttgaacagacgtgacctagaagaaactgaacataaagagaagggggtggggggctagttttcaagttggggaacctgatagtgaaaagtcacagatggagaaaattgctctcagaaaaactgtttggattgctttcctcttgttgcacatgtaccatgcatttctcagcttggggtactacattttgtggaaagttaatctatctatctttccacatctgaattaatcattctaggaaagaatacttattcctactcatttcctttatgatgtccaaatggttgcaggatcataatctattgtgccacctttatttctagaagtacaactaatatgttcacattttcaaataaataatactccccgtaagtaataactgcaaccaatcagtgttattcagtgctatgcctccttgtaatgggtagttattaattattttcagagctttccggaaatactgtcctaactggctatgtttaggatctttgttatctctgaagacaaagaaagaagctaggactcttaattttggggtgcttcttgactcttagttgggaaactgaaaatatttccaaccttttacccacgtcaatggcatattctgggaataagagtgaaacatactttataccagaggagcagtggagcctcatgcagcacattatcatttgttatttgggtttaataataattttgacatcttttcactcatacacaaaaaaagtcagaactggtgttatttactgttgatttcatcctcctgtgtatgaaataacaagcctagaggaatgaactagtgctactgaactgtttaaattatttttgtgttaatagtacactttgagtatctttttccacattaaaaactttctgaattataaatgttttccttacattatttaacaatgtacactgttaaaaataaaaataaaaattcaaactttgggggtttctcagcagccgttaattgtacattttgcactaactctgggtgttgcgcttcttgtaagattgcgctttgtgcttcagtttgttacctttgtagacttatttaatgaaaccattcaaataaaccaaacttgcttttgttg

SEQ ID NO: 9265 - protein, 52 aa, Homo sapiens
MAYSGNKSETYFIPEEQWSLMQHIIICYLGLIIILTSFHSYTKKVRTGVIYC

SEQ ID NO: 9266 - DNA, 2497 bp, Homo sapiens
gatcgagctccctgtgtgcaccgcgcgctgcccgaggcgccccagtgacagctggagtggacaaagtgaccaagggcctcaaggacacacaaggccaagaagatttgaagtgctgtaggtcaaccagaatcaagatgtctgggactgaggaagcaattcttggaggacgtgacagccatcctgctgctggcggcggctcagtgttatgctttggacagtgccagtacacagcagaagagtaccaggccatccagaaggccctgaggcagaggctgggcccagaatacataagtagccgcatggctggcggaggccagaaggtgtgctacattgagggtcatcgggtaattaatctggccaatgagatgtttggttacaatggctgggcacactccatcacgcagcagaatgtggattttgttgacctcaacaatggcaagttctacgtgggagtctgtgcatttgtgagggtccagctgaaggtgaggggatggagtagacctgctgcccggaaggatcagtgggtggtaggagaaggatggttcatatcatgaagatgttggttatggtgttagtgagggcctcaagtccaaggctttatctttggagaaggcaaggaaggaggcggtgacagacgggctgaagcgagccctcaggcttcccttgctgggagtaagtggtagaatcctgtactctctcttctccgtgcactcagtcatgtgtgccggaggccttcccactcctactgcgagtgcacagacagcaccctcctctccgtgctcctcagcagtcctccgctacgcacaggagttttgggaatgcacttggaaactgtattctggacaaagactacctgagatcactaaataagcttccacgccagttgcctcttgaagtggatttaactaaagcgaagagacaagatcttgaaccgtctgtggaggaggcaagatacaacagctgccgaccgaacatggccctgggacacccacagctgcagcaggtgacctccccttccagacccagccatgctgtgataccggcggaccaggactgcagctcccgaagcctgagctcatccgccgtggagagcgaggccacgcaccagcggaagctccggcagaagcagctgcagcagcagttccgggagcggatggagaagcagcaggttcgagtctccacgccgtcagctgagaagagtgaggcagcgcctccggcccctcctgtgacgcacagcactcctgtaactgtctcagaaccactcctggagaaagacttccttgcaggagtgactcaagaattaatcaagactcttgaagacaactctgaaaagtgggctgtgactcccgatgcaggggatggtgtggtcaagccctcgtctagagcagacccagcccagacctctgacacattagccttgaacaaccagatggtgacccagaacaggactccacacagcgtttgccaccagaaaccacaagcaaaatctggatcttgggacctccaaacttatagcgctgaccaacgcacaacaggaaactgggaatctcataggaagagccaggacatgaagaaaaggaaatatgatccatcttaactgaggctcaggccacataattggactctgtcacaaagggactttggaaaactactttttggtcatgaaattgttcatcgctgctggagaatgaacgtcattgcgatttatcttgcttcattctgaaccttatcaagaggatctgactgagagcccactgcagttagagctgagcacttttgaaaagcttgtccatcactctagtagggagaggctctggacagatgaataccttttcttcggcttgtgaggcttcccactatttattactgaactattatgttaatgaagatggacattttaggaatcaccaatggctccttgccctcaagcaatataggccagacttggtcctaagcacctgcctcagcaattgtctacattcagttgttttgcataacgtctgccttctttcctttacggtccatgcctttaatgttgcccacattaagcactgtggatcacgacaggaaaaaggttggagcagtgcttttcactactttgtatcaatccaggctacaatcttcatttaatataaataatttatggatttatgacattacaatcctgcattgtttcaagactgacattttttcctaaggaaggaaataatcatctaagaccacgaaaaaaggctgttttttgtttttttttttttttttttttttgagacggggtctggctgtgttgccctgactggagttcagtggtgcaaacacagctctctccacaacctcttgggcccaagtgatactcccacctctgccttacaaaatacagggattactggtgtgagccactgtgtctggccagaaaaggcatttttgagaaagcaaatcgtataccttattaacaaaatagaatatatatatattgcttatctgaaatgcttgaaaccag

SEQ ID NO: 9267 - protein, 207 aa, Homo sapiens; identical to SEQ ID NO: 9219

SEQ ID NO: 9268 - DNA, 2436 bp, Homo sapiens
aggtcaaccagaatcaagatgtctgggactgaggaagcaattcttggaggacgtgacagccatcctgctgctggcggcggctcagtgttatgctttggacagtgccagtacacagcagaagagtaccaggccatccagaaggccctgaggcagaggctgggcccagaatacataagtagccgcatggctggcggaggccagaaggtgtgctacattgagggtcatcgggtaattaatctggccaatgagatgtttggttacaatggctgggcacactccatcacgcagcagaatgtgggtgagtatgctctccagcagtggggacttctgcactgtccagctcctgctgaaagtctgctgtgggtgaggaggtaaggtaggtggactcagctgccagcaggaggaatggttgtggcccagcggtcagtgtcctcttcaacttgctctctttcccactcctagattttgttgacctcaacaatggcaagttctacgtgggagtctgtgcatttgtgagggtccagctgaaggtgaggggatggagtagacctgctgcccggaaggatcagtgggtggtaggagaaggatggttcatatcatgaagatgttggttatggtgttagtgagggcctcaagtccaaggctttatctttggagaaggcaaggaaggaggcggtgacagacgggctgaagcgagccctcaggagttttgggaatgcacttggaaactgtattctggacaaagactacctgagatcactaaataagcttccacgccagttgcctcttgaagtggatttaactaaagcgaagagacaagatcttgaaccgtctgtggaggaggcaagatacaacagctgccgaccgaacatggccctgggacacccacagctgcagcaggtgacctccccttccagacccagccatgctgtgataccggcggaccaggactgcagctcccgccgcggctgttgctcaggagcccgtcctcgccgccgccctctcatgcagaagcctgagctcatccgccgtggagagcgaggccacgcaccagcggaagctccggcagaagcagctgcagcagcagttccgggagcggatggagaagcagcaggttcgagtctccacgccgtcagctgagaagagtgaggcagcgcctccggcccctcctgtgacgcacagcactcctgtaactgtctcagaaccactcctggagaaagacttccttgcaggagtgactcaagaattaatcaagactcttgaagacaactctgaaaagtgggctgtgactcccgatgcaggggatggtgtggtcaagccctcgtctagagcagacccagcccagacctctgacacattagccttgaacaaccagatggtgacccagaacaggactccacacagcgtttgccaccagaaaccacaagcaaaatctggatcttgggacctccaaacttatagcgctgaccaacgcacaacaggaaactgggaatctcataggaagagccaggacatgaagaaaaggaaatatgatccatcttaactgaggctcaggccacataattggactctgtcacaaagggactttggaaaactactttttggtcatgaaattgttcatcgctgctggagaatgaacgtcattgcgatttatcttgcttcattctgaaccttatcaagaggatctgactgagagcccactgcagttagagctgagcacttttgaaaagcttgtccatcactctagtagggagaggctctggacagatgaataccttttcttcggcttgtgaggcttcccactatttattactgaactattatgttaatgaagatggacattttaggaatcaccaatggctccttgccctcaagcaatataggccagacttggtcctaagcacctgcctcagcaattgtctacattcagttgttttgcataacgtctgccttctttcctttacggtccatgcctttaatgttgcccacattaagcactgtggatcacgacaggaaaaaggttggagcagtgcttttcactactttgtatcaatccaggctacaatcttcatttaatataaataatttatggatttatgacattacaatcctgcattgtttcaagactgacattttttcctaaggaaggaaataatcatctaagaccacgaaaaaaggctgttttttgtttttttttttttttttttttttgagacggggtctggctgtgttgccctgactggagttcagtggtgcaaacacagctctctccacaacctcttgggcccaagtgatactcccacctctgccttacaaaatacagggattactggtgtgagccactgtgtctggccagaaaaggcatttttgagaaagcaaatcgtataccttattaacaaaatagaatatatatatattgcttatctgaaatgcttg

SEQ ID NO: 9269 - protein, 147 aa, Homo sapiens; identical to SEQ ID NO: 9217

SEQ ID NO: 9270 - DNA, 1254 bp, Homo sapiens
agggccagtttttccagtgctttctgtgagaatacttcattatttgctgatgacgcacttttccttgacctctgtagagactcttgaagacaactctgaaaagtgggctgtgactcccgatgcaggggatggtgtggtcaagccctcgtctagagcagacccagcccagacctctgacacattagccttgaacaaccagatggtgacccagaacaggactccacacagcgtttgccaccagaaaccacaagcaaaatctggatcttgggacctccaaacttatagcgctgaccaacgcacaacaggaaactgggaatctcataggaagagccaggacatgaagaaaaggaaatatgatccatcttaactgaggctcaggccacataattggactctgtcacaaagggactttggaaaactactttttggtcatgaaattgttcatcgctgctggagaatgaacgtcattgcgatttatcttgcttcattctgaaccttatcaagaggatctgactgagagcccactgcagttagagctgagcacttttgaaaagcttgtccatcactctagtagggagaggctctggacagatgaataccttttcttcggcttgtgaggcttcccactatttattactgaactattatgttaatgaagatggacattttaggaatcaccaatggctccttgccctcaagcaatataggccagacttggtcctaagcacctgcctcagcaattgtctacattcagttgttttgcataacgtctgccttctttcctttacggtccatgcctttaatgttgcccacattaagcactgtggatcacgacaggaaaaaggttggagcagtgcttttcactactttgtatcaatccaggctacaatcttcatttaatataaataatttatggatttatgacattacaatcctgcattgtttcaagactgacattttttcctaaggaaggaaataatcatctaagaccacgaaaaaaggctgttttttgtttttttttttttttttttttttgagacggggtctggctgtgttgccctgactggagttcagtggtgcaaacacagctctctccacaacctcttgggcccaagtgatactcccacctctgccttacaaaatacagggattactggtgtgagccactgtgtctggccagaaaaggcatttttgagaaagcaaatcgtataccttattaacaaaatagaatatatatatattgcttatctgaaa

SEQ ID NO: 9271 - protein, 105 aa, Homo sapiens [sequence omitted]

SEQ ID NO: 9272 - DNA, 2637 bp, Homo sapiens
ggagccatgcagagggtagctacagccattaatttaaggatgtagataagctatctctaaaccaagaaagtaagaatggtgtgaattatatttattcccagccttccagtgtttattaaaataattttcggtgtccttgagaggagttaaaagccatcattttactcctgcttacctccgccaccgtaattaaccactttatactgcctcataatcccattaacaaattgcagtcgctcctcagccttcacattcattcactcaccagtttctactgtttcatcctgcccggactcttaactgttccctcccaggatcgacatgcacttggatcattgcagtttctgggcctgctgtcatctcccccttcagtacttcccacatatgactaccaactgttagacgatgtgctgctgccagaccagcctttcatttcttggacatccggctatttacccaggaaaagtcatcctttgactatttttcatgacctttctcatctgactcgtgatctgcccatcttgttatttttatttatatagaggtcaaccagaatcaagatgtctgggactgaggaagcaattcttggaggacgtgacagccatcctgctgctggcggcggctcagtgttatgctttggacagtgccagtacacagcagaagagtaccaggccatccagaaggccctgaggcagaggctgggcccagaatacataagtagccgcatggctggcggaggccagaaggtgtgctacattgagggtcatcgggtaattaatctggccaatgagatgtttggttacaatggctgggcacactccatcacgcagcagaatgtggattttgttgacctcaacaatggcaagttctacgtgggagtctgtgcatttgtgagggtccagctgaaggatggttcatatcatgaagatgttggttatggtgttagtgagggcctcaagtccaaggctttatctttggagaaggcaaggaaggaggcggtgacagacgggctgaagcgagccctcaggagttttgggaatgcacttggaaactgtattctggacaaagactacctgagatcactaaataagcttccacgccagttgcctcttgaagtggatttaactaaagcgaagagacaagatcttgaaccgtctgtggaggaggcaagatacaacagctgccgaccgaacatggccctgggacacccacagctgcagcaggtgacctccccttccagacccagccatgctgtgataccggcggaccaggactgcagctcccgaagcctgagctcatccgccgtggagagcgaggccacgttcgagtctccacgccgtcagctgagaagagtgaggcagcgcctccggcccctcctgtgacgcacagcactcctgtaactgtctcagaaccactcctggagaaagacttccttgcaggagtgactcaagaattaatcaagactcttgaagacaactctgaaaagtgggctgtgactcccgatgcaggggatggtgtggtcaagccctcgtctagagcagacccagcccagacctctgacacattagccttgaacaaccagatggtgacccagaacaggactccacacagcgtttgccaccagaaaccacaagcaaaatctggatcttgggacctccaaacttatagcgctgaccaacgcacaacaggaaactgggaatctcataggaagagccaggacatgaagaaaaggaaatatgatccatcttaactgaggctcaggccacataattggactctgtcacaaagggactttggaaaactactttttggtcatgaaattgttcatcgctgctggagaatgaacgtcattgcgatttatcttgcttcattctgaaccttatcaagaggatctgactgagagcccactgcagttagagctgagcacttttgaaaagcttgtccatcactctagtagggagaggctctggacagatgaataccttttcttcggcttgtgaggcttcccactatttattactgaactattatgttaatgaagatggacattttaggaatcaccaatggctccttgccctcaagcaatataggccagacttggtcctaagcacctgcctcagcaattgtctacattcagttgttttgcataacgtctgccttctttcctttacggtccatgcctttaatgttgcccacattaagcactgtggatcacgacaggaaaaaggttggagcagtgcttttcactactttgtatcaatccaggctacaatcttcatttaatataaataatttatggatttatgacattacaatcctgcattgtttcaagactgacattttttcctaaggaaggaaataatcatctaagaccacgaaaaaaggctgttttttgtttttttttttttttttttttttgagacggggtctggctgtgttgccctgactggagttcagtggtgcaaacacagctctctccacaacctcttgggcccaagtgatactcccacctctgccttacaaaatacagggattactggtgtgagccactgtgtctggccagaaaaggcatttttgagaaagcaaatcgtataccttattaacaaaatagaatatatatatattgcttatctgaaa

SEQ ID NO: 9273 - protein, 273 aa, Homo sapiens; identical to SEQ ID NO: 9225

SEQ ID NO: 9274 - DNA, 994 bp, Homo sapiens
agggccagtttttccagtgctttctgtgagaatacttcattatttgctgatgacgcacttttccttgacctctgtagagactcttgaagacaactctgaaaagtgggctgtgactcccgatgcaggggatggtgtggtcaagccctcgtctagagcagacccagcccagacctctgacacattagccttgaacaaccagatggtgacccagaacaggactccacacagcgtttgccaccagaaaccacaagcaaaatctggatcttgggacctccaaacttatagcgctgaccaacgcacaacaggaaactgggaatctcataggaagagccaggacatgaagaaaaggaaatatgatccatcttaactgaggctcaggccacataattggactctgtcacaaagggactttggaaaactactttttggtcatgaaattgttcatcgctgctggagaatgaacgtcattgcgatttatcttgcttcattctgaaccttatcaagaggatctgactgagagcccactgcagttagagctgagcacttttgaaaagcttgtccatcactctagtagggagaggctctggacagatgaataccttttcttcggcttgtgaggcttcccactatttattactgaactattatgttaatgaagatggacattttaggaatcaccaatggctccttgccctcaagcaatataggccagacttggtcctaagcacctgcctcagcaattgtctacattcagttgttttgcataacgtctgccttctttcctttacggtccatgcctttaatgttgcccacattaagcactgtggatcacgacaggaaaaaggttggagcagtgcttttcactactttgtatcaatccaggctacaatcttcatttaatataaataatttatggatttatgacattacaatcctgcattgtttcaagactgacattttttcctaaggaaggaaataatcatctaagaccacg

SEQ ID NO: 9275 - protein, 105 aa, Homo sapiens [sequence omitted]

SEQ ID NO: 9276 - DNA, 2416 bp, Homo sapiens
gctcgcgcacccttcccattctcctctgcgcggcctccatctaagatctcttccccttgtccatagcctagatcgagctccctgtgtgcaccgcgcgctgcccgaggcgcaggtcaaccagaatcaagatgtctgggactgaggaagcaattcttggaggacgtgacagccatcctgctgctggcggcggctcagtgttatgctttggacagtgccagtacacagcagaagagtaccaggccatccagaaggccctgaggcagaggctgggcccagaatacataagtagccgcatggctggcggaggccagaaggtgtgctacattgagggtcatcgggtaattaatctggccaatgagatgtttggttacaatggctgggcacactccatcacgcagcagaatgtggattttgttgacctcaacaatggcaagttctacgtgggagtctgtgcatttgtgagggtccagctgaaggtgaggggatggagtagacctgctgcccggaaggatcagtgggtggtaggagaaggatggttcatatcatgaagatgttggttatggtgttagtgagggcctcaagtccaaggctttatctttggagaaggcaaggaaggaggcggtgacagacgggctgaagcgagccctcaggtgagcgcggggctgggagtctaacctgcgtcatttcagctcttgcttcagagcagatttcgattttttttggaagaggtaacacatccacatggttcaaaaatccaagcagcgtggaaggtaattctcacccctgccctggttcctgtctgccgttttcccactttcgttagtattttttcaatgtttctgtttcaggcttcccttgctgggagtaagtggtagaatcctgtactctctcttctccgtgcactcagtcatgtgtgccggaggccttcccactcctactgcgagtgcacagacagcaccctcctctccgtgctcctcagcagtcctccgctacgcacaggagttttgggaatgcacttggaaactgtattctggacaaagactacctgagatcactaaataagcttccacgccagttgcctcttgaagtggatttaactaaagcgaagagacaagatcttgaaccgtctgtggaggaggcaagatacaacagctgccgaccgaacatggccctgggacacccacagctgcagcaggtgacctccccttccagacccagccatgctgtgataccggcggaccaggactgcagctcccgaagcctgagctcatccgccgtggagagcgaggccacgcaccagcggaagctccggcagaagcagctgcagcagcagttccgggagcggatggagaagcagcaggttcgagtctccacgccgtcagctgagaagagtgaggcagcgcctccggcccctcctgtgacgcacagcactcctgtaactgtctcagaaccactcctggagaaagacttccttgcaggagtgactcaagaattaatcaagactcttgaagacaactctgaaaagtgggctgtgactcccgatgcaggggatggtgtggtcaagccctcgtctagagcagacccagcccagacctctgacacattagccttgaacaaccagatggtgacccagaacaggactccacacagcgtttgccaccagaaaccacaagcaaaatctggatcttgggacctccaaacttatagcgctgaccaacgcacaacaggaaactgggaatctcataggaagagccaggacatgaagaaaaggaaatatgatccatcttaactgaggctcaggccacataattggactctgtcacaaagggactttggaaaactactttttggtcatgaaattgttcatcgctgctggagaatgaacgtcattgcgatttatcttgcttcattctgaaccttatcaagaggatctgactgagagcccactgcagttagagctgagcacttttgaaaagcttgtccatcactctagtagggagaggctctggacagatgaataccttttcttcggcttgtgaggcttcccactatttattactgaactattatgttaatgaagatggacattttaggaatcaccaatggctccttgccctcaagcaatataggccagacttggtcctaagcacctgcctcagcaattgtctacattcagttgttttgcataacgtctgccttctttcctttacggtccatgcctttaatgttgcccacattaagcactgtggatcacgacaggaaaaaggttggagcagtgcttttcactactttgtatcaatccaggctacaatcttcatttaatataaataatttatggatttatgacattacaatcctgcattgtttcaagactgacattttttcctaaggaaggaaataatcatctaagaccacg

SEQ ID NO: 9277 - protein, 207 aa, Homo sapiens; identical to SEQ ID NO: 9219

SEQ ID NO: 9278 - DNA, 930 bp, Homo sapiens
agggccagtttttccagtgctttctgtgagaatacttcattatttgctgatgacgcacttttccttgacctctgtagagactcttgaagacaactctgaaaagtgggctgtgactcccgatgcaggggatggtgtggtcaagccctcgtctagagcagacccagcccagacctctgacacattagccttgaacaaccagatggtgacccagaacaggactccacacagcgtttgccaccagaaaccacaagcaaaatctggatcttgggacctccaaacttatagcgctgaccaacgcacaacaggaaactgggaatctcataggaagagccaggacatgaagaaaaggaaatatgatccatcttaactgaggctcaggccacataattggactctgtcacaaagggactttggaaaactactttttggtcatgaaattgttcatcgctgctggagaatgaacgtcattgcgatttatcttgcttcattctgaaccttatcaagaggatctgactgagagcccactgcagttagagctgagcacttttgaaaagcttgtccatcactctagtagggagaggctctggacagatgaataccttttcttcggcttgtgaggcttcccactatttattactgaactattatgttaatgaagatggacattttaggaatcaccaatggctccttgccctcaagcaatataggccagacttggtcctaagcacctgcctcagcaattgtctacattcagttgttttgcataacgtctgccttctttcctttacggtccatgcctttaatgttgcccacattaagcactgtggatcacgacaggaaaaaggttggagcagtgcttttcactactttgtatcaatccaggctacaatcttcatttaatataaataatttatggatttatgacattac

SEQ ID NO: 9279 - protein, 105 aa, Homo sapiens [sequence omitted]

SEQ ID NO: 9280 - DNA, 853 bp, Homo sapiens
cccagtgacagctggagtggacaaagtgaccaagggcctcaaggacacacaaggccaagaagatttgaagtgctgtaggtcaaccagaatcaagatgtctgggactgaggaagcaattcttggaggacgtgacagccatcctgctgctggcggcggctcagtgttatgctttggacagtgccagtacacagcagaagagtaccaggccatccagaaggccctgaggcagaggctgggcccagaatacataagtagccgcatggctggcggaggccagaaggtgtgctacattgagggtcatcgggtaattaatctggccaatgagatgtttggttacaatggctgggcacactccatcacgcagcagaatgtggattttgttgacctcaacaatggcaagttctacgtgggagtctgtgcatttgtgagggtccagctgaaggatggttcatatcatgaagatgttggttatggtgttagtgagggcctcaagtccaaggctttatctttggagaaggcaaggaaggaggcggtgacagacgggctgaagcgagccctcaggagttttgggaatgcacttggaaactgtattctggacaaagactacctgagatcactaaataagcttccacgccagttgcctcttgaagtggatttaactaaagcgaagagacaagatcttgaaccgtctgtggaggaggcaagatacaacagctgccgaccgaacatggccctgggacacccacagctgcagcaggtgacctccccttccagacccagccatgctgtgataccggcggaccaggactgcagctcccgaagcctgagctcatccgccgtggagagcgaggcc

SEQ ID NO: 9281 - protein, 252 aa, Homo sapiens
MSGTEEAILGGRDSHPAAGGGSVLCFGQCQYTAEEYQAIQKALRQRLGPEYISSRMAGGGQKVCYIEGHRVINLANEMFGYNGWAHSITQQNVDFVDLNNGKFYVGVCAFVRVQLKDGSYHEDVGYGVSEGLKSKALSLEKARKEAVTDGLKRALRSFGNALGNCILDKDYLRSLNKLPRQLPLEVDLTKAKRQDLEPSVEEARYNSCRPNMALGHPQLQQVTSPSRPSHAVIPADQDCSSRSLSSSAVESE

SEQ ID NO: 9282 - DNA, 596 bp, Homo sapiens
gctcgcgcacccttcccattctcctctgcgcggcctccatctaagatctcttccccttgtccatagcctagatcgagctccctgtgtgcaccgcgcgctgcccgaggcgcaggtcaaccagaatcaagatgtctgggactgaggaagcaattcttggaggacgtgacagccatcctgctgctggcggcggctcagtgttatgctttggacagtgccagtacacagcagaagagtaccaggccatccagaaggccctgaggcagaggctgggcccagaatacataagtagccgcatggctggcggaggccagaaggtgtgctacattgagggtcatcgggtaattaatctggccaatgagatgtttggttacaatggctgggcacactccatcacgcagcagaatgtggattttgttgacctcaacaatggcaagttctacgtgggagtctgtgcatttgtgagggtccagctgaaggatggttcatatcatgaagatgttggttatggtgttagtgagggcctcaagtccaaggctttatctttggagaaggcaaggaaggaggcggtgacagacgggctgaagcgagccctcagg

SEQ ID NO: 9283 - protein, 155 aa, Homo sapiens
MSGTEEAILGGRDSHPAAGGGSVLCFGQCQYTAEEYQAIQKALRQRLGPEYISSRMAGGGQKVCYIEGHRVINLANEMFGYNGWAHSITQQNVDFVDLNNGKFYVGVCAFVRVQLKDGSYHEDVGYGVSEGLKSKALSLEKARKEAVTDGLKRAL

SEQ ID NO: 9284 - DNA, 529 bp, Homo sapiens
aggtcaaccagaatcaagatgtctgggactgaggaagcaattcttggaggacgtgacagccatcctgctgctggcggcggctcagtgttatgctttggacagtgccagtacacagcagaagagtaccaggccatccagaaggccctgaggcagaggctgggcccagaatacataagtagccgcatggctggcggaggccagaaggtgtgctacattgagggtcatcgggtaattaatctggccaatgagatgtttggttacaatggctgggcacactccatcacgcagcagaatgtgggtgagtatgctctccagcagtggggacttctgcactgtccagctcctgctgaaagtctgctgtgggtgaggaggtaagattttgttgacctcaacaatggcaagttctacgtgggagtctgtgcatttgtgagggtccagctgaaggtgaggggatggagtagacctgctgcccggaaggatcagtgggtggtaggagaaggatggttcatatcatgaagatgttggttat

SEQ ID NO: 9285 - protein, 118 aa, Homo sapiens
MSGTEEAILGGRDSHPAAGGGSVLCFGQCQYTAEEYQAIQKALRQRLGPEYISSRMAGGGQKVCYIEGHRVINLANEMFGYNGWAHSITQQNVGEYALQQWGLLHCPAPAESLLWVRR

SEQ ID NO: 9286 - DNA, 578 bp, Homo sapiens
ctcctctgcgcggcctccatctaagatctcttccccttgtccatagcctagatcgagctccctgtgtgcaccgcgcgctgcccgaggcgccccagtgacagctggagtggacaaagtgaccaagggcctcaaggacacacaaggccaagaagatttgaagtgctgtaggtcaaccagaatcaagatgtctgggactgaggaagcaattcttggaggacgtgacagccatcctgctgctggcggcggctcagtgttatgctttggacagtgccagtacacagcagaagagtaccaggccatccagaaggccctgaggcagaggctgggcccagaatacataagtagccgcatggctggcggaggccagaaggtgtgctacattgagggtcatcgggtaattaatctggccaatgagatgtttggttacaatggctgggcacactccatcacgcagcagaatgtgggtgagtatgctctccagcagtggggacttctgcactgtccagctcctgctgaaagtctgctgtgggtgaggaggtaaggtaggtggactcagctgccagcaggaggaatggttg

SEQ ID NO: 9287 - protein, 118 aa, Homo sapiens; identical to SEQ ID NO: 9285

SEQ ID NO: 9288 - DNA, 722 bp, Homo sapiens
ctcttggcaaatagatcccactctctgagggttgtgttggggctcagaaaatactaccccgaagtatgacactttggcatgctgaatactttgaactaaaagagattggaaggcctcagaagcagcctcggaagcagtctctccctctgatctcctgcccttctgtctcctgcccatctttcgtcccagaagtgagtcacagaaaccagaattcttccccaagcgcagcttaacttggactcaccacctatcaagtgctcgacagccacgtgtgcagtggttcctacgtggagcagcatacatccagagatgcaaatattaatgaggacagtgctagtaacagagttgctgagcaatctatgtccccttgtaagaaccagtgccccaggggaagaaacagaactccacaaggtagcagtgtgggtgtagtacccgcatgtgcccatgttatgggaatgtagatggggagtgaccaccgccaacagaagtgtggccatcttgcccgagatgcctgaggacctcctatttttagatgctgctgcccaaggcctgtatttcatgctatggcttttgtcatttgaattatcagtagctgtctcggagctattacgcttcactgggccctggaggatattgtcttatacagtccactgggttttggatatgcagtctgtgcctttcattgccttcctggaaaataataactaaactcttcctcacca

SEQ ID NO: 9289 - protein, 55 aa, Homo sapiens
MTLWHAEYFELKEIGRPQKQPRKQSLPLISCPSVSCPSFVPEVSHRNQNSSPSAA

SEQ ID NO: 9290 - DNA, 609 bp, Homo sapiens
actgaaataataacctcaaagatgccttccaatcagaagatttggtgattctttctgagttatcaaactgccttcctttgaccttgctcacatgtagaaatccaagtcagcgcagcttaacttggactcaccacctatcaagtgctcgacagccacgtgtgcagtggttcctacgtggagcagcatacatccagagatgcaaatattaatgaggacagtgctagtaacagagttgctgagcaatctatgtccccttgtaagaaccagtgccccaggggaagaaacagaactccacaaggtagcagtgtgggtgtagtacccgcatgtgcccatgttatgggaatgtagatggggagtgaccaccgccaacagaagtgtggccatcttgcccgagatgcctgaggacctcctatttttagatgctgctgcccaaggcctgtatttcatgctatggcttttgtcatttgaattatcagtagctgtctcggagctattacgcttcactgggccctggaggatattgtcttatacagtccactgggttttggatatgcagtctgtgcctttcattgccttcctggaaaataataactaaactcttcctcacca

SEQ ID NO: 9291 - protein, 87 aa, Homo sapiens [sequence omitted]

SEQ ID NO: 9292 - DNA, 661 bp, Homo sapiens
tcctaaagaatcacaaaaagaaagaccctagctgtctgaatgatctgagctaagtccccagacgtgcaagtgtggccatcctagaccactgagctccagccaagccagcttgcatcagaagaactgtccagaaaactcacagaatcataagaaataatgcagcgcagcttaacttggactcaccacctatcaagtgctcgacagccacgtgtgcagtggttcctacgtggagcagcatacatccagagatgcaaatattaatgaggacagtgctagtaacagagttgctgagcaatctatgtccccttgtaagaaccagtgccccaggggaagaaacagaactccacaaggtagcagtgtgggtgtagtacccgcatgtgcccatgttatgggaatgtagatggggagtgaccaccgccaacagaagtgtggccatcttgcccgagatgcctgaggacctcctatttttagatgctgctgcccaaggcctgtatttcatgctatggcttttgtcatttgaattatcagtagctgtctcggagctattacgcttcactgggccctggaggatattgtcttatacagtccactgggttttggatatgcagtctgtgcctttcattgccttcctggaaaataataactaaactcttcctcacca

SEQ ID NO: 9293 - protein, 34 aa, Homo sapiens
MQRSLTWTHHLSSARQPRVQWFLRGAAYIQRCKY

SEQ ID NO: 9294 - DNA, 3018 bp, Homo sapiens; identical to SEQ ID NO: 1338

SEQ ID NO: 9295 - protein, 251 aa, Homo sapiens; identical to SEQ ID NO: 1339

SEQ ID NO: 9296 - DNA, 1312 bp, Homo sapiens
cagcttagcagccgtagtcagccgggagtgctgtcgtgggggattgtgggaaaagatggcggctgccgcacaatcccgggttgtccgggtcctgtcaatgtcacgttctgccattactgcaatagccacatctgtgtgtcacggcccaccctgtcgccagcttcatcatgccctcatgcctcatgggaaaggtggacgttcctcagtcagtgggattgtggccactgtgtttggagcaacaggattcctggggcgatatgttgtcaaccaccttggacgcatggggtcacaggtaatcataccctatcggtgtgataaatatgacatcatgcaccttcgtcccatgggtgacctgggccagcttctgtttctggaatgggacgcgagagataaagattctatccgacgagtagtacaacacagcaatgtggtcatcaatcttattggacgagactgggaaaccaaaaactttgattttgaggatgtttttgtgaagattccccaagcaattgctcaactgtccaaggaagctggagttgaaaaattcattcatgtttcacatctgaatgcgaatattaaaagctcttctagatatttgagaaataaggctgttggagagaaagtagtgagagatgcatttccggaagccattatcgtaaagccgtcggacatctttggaagagaggatagattccttaattcttttgcaagtatgcatcggtttggtcctataccccttggttccttgggctggaagacagttaaacaaccagtatatgtcgtagatgtatccaaaggaattgttaatgcagttaaggatcctgatgccaatgggaaatcctttgctttcgttggtcccagtcggtacctccttttccacctggtgaagtacatctttgctgtggctcacagattgttcctcccattccccttgccgctttttgcctatcgatgggtagcaagagtctttgaaataagcccatttgagccctggataacaagggataaagtggagcggatgcacatcacagacatgaaattgcctcacctgcctggcttagaagaccttggtattcaggcaacaccactggaactcaaggccattgaggtgctgcggcgtcatcgcacttaccgctggctgtctgctgaaattgaggatgtgaagccggccaagaccgtcaacatttagtgcctcctgagcagctcttggttttggcgtcttttgggtcggcccatgtggtttgagcacccagccaggcggtctctttagaggatcctgtacacagttccactattaaaacatttcaggttg

SEQ ID NO: 9297 - protein, 377 aa, Homo sapiens; identical to SEQ ID NO: 1341

SEQ ID NO: 9298 - DNA, 1590 bp, Homo sapiens
cagcttagcagccgtagtcagccgggagtgctgtcgtgggggattgtgggaaaagatggcggctgccgcacaatcccgggttgtccgggtcctgtcaatgtcacgttctgccattactgcaatagccacatctgtgtgtcacggcccaccctgtcgccagcttcatcatgccctcatgcctcatgggaaaggtggacgttcctcagtcagtgggattgtggccactgtgtttggagcaacaggattcctggggcgatatgttgtcaaccaccttggacgcatggggtcacaggtaatcataccctatcggtgtgataaatatgacatcatgcaccttcgtcccatgggtgacctgggccagcttctgtttctggaatgggacgcgagagataaagattctatccgacgagtagtacaacacagcaatgtggtcatcaatcttattggacgagactgggaaaccaaaaactttgattttgaggatgtttttgtgaagattccccaagcaattgctcaactgtccaaggaagctggagttgaaaaattcattcatgtttcacatctgaatgcgaatattaaaagctcttctagatatttgagaaataaggctgttggagagaaagtagtgagagatgcatttccggaagccattatcgtaaagccgtcggacatctttggaagagaggatagattccttaattcttttgcaagtatgcatcggtttggtcctataccccttggttccttgggctggaagacagttaaacaaccagtatatgtcgtagatgtatccaaaggaattgttaatgcagttaaggatcctgatgccaatgggaaatcctttgctttcgttggtcccagtcggtacctccttttccacctggtgaagtacatctttgctgtggctcacagattgttcctcccattccccttgccgctttttgcctatcgatgggtagcaagagtctttgaaataagcccatttgagccctggataacaagggataaagtggagcggatgcacatcacagacatgaaattgcctcacctgcctggcttagaagaccttggtattcaggcaacaccactggaactcaaggccattgaggtgctgcggcgtcatcgcacttaccgctggctgtctgctgaaattgaggatgtgaagccggccaagaccgtcaacatttagtgcctcctgagcagctcttggttttggcgtcttttgggtcggcccatgtggtttgagcacccagccaggcggtctctttagaggatcctgtacacagttccactattaaaacatttcaggttgaattctgcagtattttcttccttgatttacaaaatgagaaatgtagtcacttagaacttgagcatgatttttgttaaacatatttaataatgatatatatactatttattctctgaaatgccagagagtttgaattttcctatgacaaaccacttctagcatacgttctagaagacaaggaccctttttaatgtcaaagtattgtaaagaccccaagtgatatgtgattgttttttaatttccattaaatgagagagcatacagtatcccctaacctg

SEQ ID NO: 9299 - protein, 377 aa, Homo sapiens; identical to SEQ ID NO: 1341

SEQ ID NO: 9300 - DNA, 2103 bp, Homo sapiens
cagcttagcagccgtagtcagccgggagtgctgtcgtgggggattgtgggaaaagatggcggctgccgcacaatcccgggttgtccgggtcctgtcaatgtcacgttctgccattactgcaatagccacatctgtgtgtcacggcccaccctgtcgccagcttcatcatgccctcatgcctcatgggaaaggtggacgttcctcagtcagtgggattgtggccactgtgtttggagcaacaggattcctggggcgatatgttgtcaaccaccttggacgcatggggtcacaggtaatcataccctatcggtgtgataaatatgacatcatgcaccttcgtcccatgggtgacctgggccagcttctgtttctggaatgggacgcgagagataaagattctatccgacgagtagtacaacacagcaatgtggtcatcaatcttattggacgagactgggaaaccaaaaactttgattttgaggatgtttttgtgaagattccccaagcaattgctcaactgtccaaggaagctggagttgaaaaattcattcatgtttcacatctgaatgcgaatattaaaagctcttctagatatttgagaaataaggctgttggagagaaagtagtgagagatgcatttccggaagccattatcgtaaagccgtcggacatctttggaagagaggatagattccttaattcttttgcaagtatgcatcggtttggtcctataccccttggttccttgggctggaagacagttaaacaaccagtatatgtcgtagatgtatccaaaggaattgttaatgcagttaaggatcctgatgccaatgggaaatcctttgctttcgttggtcccagtcggtacctccttttccacctggtgaagtacatctttgctgtggctcacagattgttcctcccattccccttgccgctttttgcctatcgatgggtagcaagagtctttgaaataagcccatttgagccctggataacaagggataaagtggagcggatgcacatcacagacatgaaattgcctcacctgcctggcttagaagaccttggtattcaggcaacaccactggaactcaaggccattgaggtgctgcggcgtcatcgcacttaccgctggctgtctgctgaaattgaggatgtgaagccggccaagaccgtcaacatttagtgcctcctgagcagctcttggttttggcgtcttttgggtcggcccatgtggtttgagcacccagccaggcggtctctttagaggatcctgtacacagttccactattaaaacatttcaggttgaattctgcagtattttcttccttgatttacaaaatgagaaatgtagtcacttagaacttgagcatgatttttgttaaacatatttaataatgatatatatactatttattctctgaaatgccagagagtttgaattttcctatgacaaaccacttctagcatacgttctagaagacaaggaccctttttaatgtcaaagtattgtaaagaccccaagtgatatgtgattgttttttaatttccattaaatgagagagcatacagtatcccctaacctgaatgtgtttacactgaaggtgtttttaaaatttattttaataatgtccatatgccttttaaaaatagtagtacatatatagaaaaacattgtccatagattctcaaaccccttgcagtaattccacagtcttcttggatctgagctatctgaggccagcccgatgcccttagtaccacatctggattatttcagacacataggtggagatagattctcttcacatgcaaaggagatgcttcagcttctatgccagcagtgccagcacttaggaattatgaccttctaatgaagttcttaaaattgcagccaagacccagatgaacatttggtttagtgttggcaaatcccaccagtacagtgtgatttaaaactcccacaatttgtggtgaagccaacataccaccatcctaggtgacccagggttggtcattgtgtttcactggacttcagcctcctgatctatatttgggacagggatgtcagtaaaaacgctgtttgatgagggaatgcc

SEQ ID NO: 9301 - protein, 377 aa, Homo sapiens; identical to SEQ ID NO: 1341

SEQ ID NO: 9302 - DNA, 1203 bp, Homo sapiens
ggccccccaggactctgtggggccccagcaaattcctagtgttcctcagatgctagttgaaaacccactgctactgggcacagtggtgtacacctgtagtcccagctacttgggaggctgaagtgggaggatcacttgagcctgggagtgtgagtccggcctggacaacatagtgagaccctgtctgtggaacaaaaacaaggaaagaaaagaaaaagtcactgccctgaggtaactgatgatgggagctcaagtggcacgtaaggagcccttcaattttcattagcagtgaagagatggcagtaatgaagataggtggccttttccgttttgggttttatattgtcgtcctgatttgaaccgtagattttagccttctccttgcttttggatttttttttttttcctcaagggccccagctttcaggggttacgttgtatattttacacaccattcagcttgccctgcttctgtaaaggcagcatatttgaatatctgaggtttagattaaattgaatttcacagacttgattaaatactggagtttttctgtttgctttgttgtttgttggttttatttcattttaagtttaagatctgttgtttctttggaggagaacaaagtgtaccagcagttacagcagccgactgggttggcttgagaggagatggaccaaaaagcagaggtagcctcacaggtcgaggtggttattttcttaaaaaaaaaaaatcagttcagactgctctacagcggtctgtcttcctgcagttctcataggctagcttacatcttgggcagagagatgcttatcacatgtgctatatgtatttctctttccagatgggtagcaagagtctttgaaataagcccatttgagccctggataacaagggataaagtggagcggatgcacatcacagacatgaaattgcctcacctgcctggcttagaagaccttggtattcaggcaacaccactggaactcaaggccattgaggtgctgcggcgtcatcgcacttaccgctggctgtctgctgaaattgaggatgtgaagccggccaagaccgtcaacatttagtgcctcctgagcagctcttggttttggcgtcttttgggtcggcccatgtggtttgagcacccagccaggcggtctctttagaggatcctgtacacagttccactattaaaacatttcaggttg

SEQ ID NO: 9303 - protein, 136 aa, Homo sapiens
MDQKAEVASQVEVVIFLKKKNQFRLLYSGLSSCSSHRLAYILGREMLITCAICISLSRWVARVFEISPFEPWITRDKVERMHITDMKLPHLPGLEDLGIQATPLELKAIEVLRRHRTYRWLSAEIEDVKPAKTVNI

SEQ ID NO: 9304 - DNA, 1248 bp, Homo sapiens
tgccttttaaacgcttgttctgtctctttctaactcctttgtctccgccggactcggggtatccgctgggtggtgtggggctggtttccccaacagctttctctccacccagcttcatagatgacaccctgcctgctaggccagatgttctccggccaagaacactattatagctgcctggcttctccctgagcagcgtcaggtgtgaggagtgcgcatggcagctgcccagtgacagatggaatctccctctctcacccaggctggagtgcaatggcacaatcagctcactgcaacctccacctcccgggttcaagtgattcttctgcctcagcctcccgagtagctgggactacagccttcatttcagtcaacaaccacataacagatcatcaaaatacataaagcaaaaactgacagaactaaagttaaatatacatatctacaattatgtagagaataacaaacaaaaaaatagaacaaaaatgttccacgccttggtcaatggtaccaccagccagcgaggttcccaagccaagaacttcggaagcatccgtgattcttcatcttccacatccactttatcaccggaagcacgcattcaactttctaaacatccctcagactgacccacatctttctatccacttttcacatcttgcttgaatgacttccccaggcccagccagtctcccgcctccagctccgcccccttctgactccctttatgtggtacaatcagagagcccttcccaaagcacaaatctgctttcactgctttgcttcaagccctttcgtggctcctatttccagctggatgaggtccaagcctcttaacgtgctgtacgtgtacatgcctgacccccgctacttgaccagccaagtttcttcatagcgctgtgtctttgttcctcctgcctagaatgtccttccccttttctctcgcttcatggtgtgccaaactcctatcctgtgagatccagcttacacgtcagcttccccgtgatgcttttcctaactccctattcagccagtgaagtgctccctgcgttcccatgtggcttgtatctctgtaaaagctccacagagctgttttaatttatccgttaatgtacatgtcttccccactagacttttgctccttaaagtatctccttcatctctgctttgcataacctaacagagttcaacacataggagtgtcttaataaatgctgaataaaataattaataaacaaatgaaacaat

SEQ ID NO: 9305 - protein, 47 aa, Homo sapiens
MFHALVNGTTSQRGSQAKNFGSIRDSSSSTSTLSPEARIQLSKHPSD

SEQ ID NO: 9306 - DNA, 2380 bp, Homo sapiens
gggagtgggtttcaggaggagccaagatgtttgattatactcctctgcttcaagggagtgttatctccctgagcaacctgtggaaagccgctgagcaacctgtggaaagccgctgagcggttatcctctcggggcataaagacaaagaaggcaataaggagactttgctcctcagaggccacccgtggcttcccatgggtgtctcacacaggggagaccaactcaactggcacctagaactctctttcccacaaaagctaggctggttctgattcttaacctgctccagcagtgacacactcagtcccacagggagtggacgacccccaggaagaagatgatgttttggaggaaactccccaaagccctcttcattgggctgactctggccattgctgtcaatctccttctggtattttctagcaaggggactttacaaaacctgtttacgggtggtctccacagggagcttcctttacatctgaataaacgctacggggcagtgataaagagactctcccacttggaggtggaattgcaggatctgaaagaaagtatgaaattagctctgaggcaacaagaaaatgtgaacagcacactgaagagggcgaaagatgaagtacgccctcttctaaaggcaatggaaaccaaggtgaatgagacaaagaagcacaaaacccaaatgaaactcttcccacactcacagcttttcaggcaatggggcgaggatctttctgaggcccagcagaaggcggcccaggacctcttccggaagtttggttacaacgcgtacctcagcaaccagctgcctctcaatcgcaccatccccgacacgcgagactacagatgtcttcggaagacatatccttcccaactcccatccctcagtgtcattctcatattcgtgaatgaagctctgtccattatacaacgggccatcaccagtatcatcaaccggacgccctctcgattgttgaaggaaatcatcttggtggatgatttcagctcaaatggagaactaaaggtacacttggatgagaagattaagctttacaaccagaagtatccaggactactgaaaataatacggcatcctgaaaggaaaggtcttgctcaagcccgcaacactggctgggaagctgccacagcagacgtggtcgccatcttggatgctcacattgaagtcaatgttgggtgggcagagccaatcttggctcggattcaggaggaccgcactgtgattgtgtctcctgtgtttgacaacattcgttttgacaccttcaaactggataagtatgaactggcagttgatgggtttaactgggaactctggtgccgctacgatgcactgccacaagcctggattgatctgcatgatgtcactgccccagtgaagagtccttcaatcatgggcatcctggctgctaacaggcacttcctgggagagatcgggtctctggatggtggaatgctcatctatggaggagagaacgtggagcttagcctgagggtgtggcagtgtggagggaaggtcgagattttgccctgttcccggattgcccacctagagagacaccacaagccctacgccttggatctcaccgctgccttgaagcgcaatgctctgcgagtggccgaaatctggatggatgagcacaaacacatggtctacttggcctggaacatacctctccagaactctggaatagattttggagacgtttcttccagaatggcactccgggaaaaactgaaatgtaaaacttttgactggtacctgaaaaatgtttatccactcttgaagccactccacaccatcgtgggctatggaagaatgaaaaacctattggatgaaaatgtctgcttggatcagggacccgttccaggcaacacccccatcatgtattactgccatgaattcagctcacagaatgtctactatcacctaactggggagctctatgtgggacaactgattgcagaggccagtgctagtgatcgctgcctgacagaccctggcaaggcggagaagcccaccttagaaccatgctccaaggcagctaagaatagactgcatatatattgggattttaaaccgggaggagctgtcataaacagagataccaagcggtgtctggagatgaagaaggatcttttgggtagccacgtgcttgtgctccagacctgtagcacgcaagtgtgggaaatccagcacactgtcagagactggggtcagaccaacagccagtgatcctcagatggtgctggatctgggtcatcaattcttgcaagtggaatggcttctactcctaacactcccagcttctttctcaatgagaaagaaagcatgtgtatgtctgtttatggcgacttcaggtgg

SEQ ID NO: 9307 - protein, 637 aa, Homo sapiens; identical to SEQ ID NO: 1343

SEQ ID NO: 9308 - DNA, 3247 bp, Homo sapiens
cataagctggagtggtgaccatatctgtcttcttcaacatcacatccccagctacctagcagagtgccttgggctggtacacgcttaactacgtacatgaatgaatggagcagggctcaaaacatcaatgcctaccagagcctgccaggcctagggtgtggaggagccttgccatcgggcttcctgtctctcttcatttaagcacgactctgcagaaggaacaaagcaccctccccactgggctcctggttgcagagctccaagtcctcacacagatacgcctgtttgagaagcagcgggcaagaaagacgcaagcccagaggccctgccatttctgtgggctcaggtccctactggctcaggcccctgcctccctcggcaaggccacaatgaaccggggagtcccttttaggcacttgcttctggtgctgcaactggcgctcctcccagcagccactcagggaaagaaagtggtgctgggcaaaaaaggggatacagtggaactgacctgtacagcttcccagaagaagagcatacaattccactggaaaaactccaaccagataaagattctgggaaatcagggctccttcttaactaaaggtccatccaagctgaatgatcgcgctgactcaagaagaagcctttgggaccaaggaaactttcccctgatcatcaagaatcttaagatagaagactcagatacttacatctgtgaagtggaggaccagaaggaggaggtgcaattgctagtgttcggattgactgccaactctgacacccacctgcttcaggggcagagcctgaccctgaccttggagagcccccctggtagtagcccctcagtgcaatgtaggagtccaaggggtaaaaacatacagggggggaagaccctctccgtgtctcagctggagctccaggatagtggcacctggacatgcactgtcttgcagaaccagaagaaggtggagttcaaaatagacatcgtggtgctagctttccagaaggcctccagcatagtctataagaaagagggggaacaggtggagttctccttcccactcgcctttacagttgaaaagctgacgggcagtggcgagctgtggtggcaggcggagagggcttcctcctccaagtcttggatcacctttgacctgaagaacaaggaagtgtctgtaaaacgggttacccaggaccctaagctccagatgggcaagaagctcccgctccacctcaccctgccccaggccttgcctcagtatgctggctctggaaacctcaccctggcccttgaagcgaaaacaggaaagttgcatcaggaagtgaacctggtggtgatgagagccactcagctccagaaaaatttgacctgtgaggtgtggggacccacctcccctaagctgatgctgagtttgaaactggagaacaaggaggcaaaggtctcgaagcgggagaaggcggtgtgggtgctgaaccctgaggcggggatgtggcagtgtctgctgagtgactcgggacaggtcctgctggaatccaacatcaaggttctgcccacatggtccaccccggtgcagccaatggccctgattgtgctggggggcgtcgccggcctcctgcttttcattgggctaggcatcttcttctgtgtcaggtgccggcaccgaaggcgccaagcagagcggatgtctcagatcaagagactcctcagtgagaagaagacctgccagtgtcctcaccggtttcagaagacatgtagccccatttgaggcacgaggccaggcagatcccacttgcagcctccccaggtgtctgccccgcgtttcctgcctgcggaccagatgaatgtagcagatccccagcctctggcctcctgttcgcctcctctacaatttgccattgtttctcctgggttaggccccggcttcactggttgagtgttgctctctagtttccagaggcttaatcacaccgtcctccacgccatttccttttccttcaagcctagcccttctctcattatttctctctgaccctctccccactgctcatttggatcccaggggagtgttcagggccagccctggctggcatggagggtgaggctgggtgtctggaagcatggagcatgggactgttcttttacaagacaggaccctgggaccacagagggcaggaacttgcacaaaatcacacagccaagccagtcaaggatggatgcagatccagaggtttctggcagccagtacctcctgccccatgctgcccgcttctcaccctatgtgggtgggaccacagactcacatcctgaccttgcacaaacagcccctctggacacagccccatgtacacggcctcaagggatgtctcacatcctctgtctatttgagacttagaaaaatcctacaaggctggcagtgacagaactaagatgatcatctccagtttatagaccagaaccagagctcagagaggctagatgattgattaccaagtgccggactagcaagtgctggagtcgggactaacccaggtcccttgtcccaagttccactgctgcctcttgaatgcagggacaaatgccacacggctctcaccagtggctagtggtgggtactcaatgtgtacttttgggttcacagaagcacagcacccatgggaagggtccatctcagagaatttacgagcagggatgaaggcctccctgtctaaaatccctccttcatcccccgctggtggcagaatctgttaccagaggacaaagcctttggctcttctaatcagagcgcaagctgggagcacaggcactgcaggagagaatgcccagtgaccagtcactgaccctgtgcagaacctcctggaagcgagctttgctgggagagggggtagctagcctgagagggaaccctctaagggacctcaaaggtgattgtgccaggctctgcgcctgccccacaccctcccttaccctcctccagaccattcaggacacagggaaatcagggttacaaatcttcttgatccacttctctcaggatcccctctcttcctacccttcctcaccacttccctcagtcccaactccttttccctatttccttctcctcctgtctttaaagcctgcctcttccaggaagacccccctattgctgctggggctccccatttgcttactttgcatttgtgcccactctccacccctgctcccctgagctgaaataaaaatacaataaacttactataaagatgc

SEQ ID NO: 9309 - protein, 553 aa, Homo sapiens
MEQGSKHQCLPEPARPRVWRSLAIGLPVSLHLSTTLQKEQSTLPTGLLVAELQVLTQIRLFEKQRARKTQAQRPCHFCGLRSLLAQAPASLGKATMNRGVPFRHLLLVLQLALLPAATQGKKVVLGKKGDTVELTCTASQKKSIQFHWKNSNQIKILGNQGSFLTKGPSKLNDRADSRRSLWDQGNFPLIIKNLKIEDSDTYICEVEDQKEEVQLLVFGLTANSDTHLLQGQSLTLTLESPPGSSPSVQCRSPRGKNIQGGKTLSVSQLELQDSGTWTCTVLQNQKKVEFKIDIVVLAFQKASSIVYKKEGEQVEFSFPLAFTVEKLTGSGELWWQAERASSSKSWITFDLKNKEVSVKRVTQDPKLQMGKKLPLHLTLPQALPQYAGSGNLTLALEAKTGKLHQEVNLVVMRATQLQKNLTCEVWGPTSPKLMLSLKLENKEAKVSKREKAVWVLNPEAGMWQCLLSDSGQVLLESNIKVLPTWSTPVQPMALIVLGGVAGLLLFIGLGIFFCVRCRHRRRQAERMSQIKRLLSEKKTCQCPHRFQKTCSPI

SEQ ID NO: 9310 - DNA, 734 bp, Homo sapiens
gtctctcttcatttaagcacgactctgcagaaggaacaaagcaccctccccactgggctcctggttgcagagctccaagtcctcacacagatacgcctgtttgagaagcagcgggcaagaaagacgcaagcccagaggtccatccaagctgaatgatcgcgctgactcaagaagaagcctttgggaccaaggaaactttcccctgatcatcaagaatcttaagatagaagactcagatacttacatctgtgaagtggaggaccagaaggaggaggtgcaattgctagtgttcggattgactgccaactctgacacccacctgcttcaggggcagagcctgaccctgaccttggagagcccccctggtagtagcccctcagtgcaatgtaggagtccaaggggtaaaaacatacagggggggaagaccctctccgtgtctcagctggagctccaggatagtggcacctggacatgcactgtcttgcagaaccagaagaaggtggagttcaaaatagacatcgtggtgctagggtgatgaatacgcctctaaggagtggaggccaaatggcttctgtggtccaggaatcctaaggacagcaaggatcccctgtggctgggctgctctgtgatggcttccgggaggagggaggtggcctgctgtaggaaaatgctgggtggaagaagggagagaaggctggagaggtaggaaggaactgaagtatctgaagtgacaa

SEQ ID NO: 9311 - protein, 39 aa, Homo sapiens
MHCLAEPEEGGVQNRHRGARVMNTPLRSGGQMASVVQES

SEQ ID NO: 9312 - DNA, 981 bp, Homo sapiens
tctcttcatttaagcacgactctgcagaaggaacaaagcaccctccccactgggctcctggttgcagagctccaagtcctcacacagatacgcctgtttgagaagcagcgggcaagaaagacgcaagcccagaggtccatccaagctgaatgatcgcgctgactcaagaagaagcctttgggaccaaggaaactttcccctgatcatcaagaatcttaagatagaagactcagatacttacatctgtgaagtggaggaccagaaggaggaggtgcaattgctagtgttcggatgtgagtggggcaggtggggatgaggatacctcctgcctggttcccttccccactactcccacccctgcaccaaatccagcctgagctggtgataccgcagcagccccaagaggaccaggctgtcaaactggcctccaaatgtcttaaaacccttcttgatcagtgactgccaactctgacacccacctgcttcaggggcagagcctgaccctgaccttggagagcccccctggtagtagcccctcagtgcaatgtaggagtccaaggggtaaaaacatacagggggggaagaccctctccgtgtctcagctggagctccaggatagtggcacctggacatgcactgtcttgcagaaccagaagaaggtggagttcaaaatagacatcgtggtgctagctttccagaaggcctccagcatagtctataagaaagagggggaacaggtggagttctccttcccactcgcctttacagttgaaaagctgacgggcagtggcgagctgtggtggcaggcggagagggcttcctcctccaagtcttggatcacctttgacctgaagaacaaggaagtgtctgtaaaacgggttacccaggaccctaagctccagatgggcaagaagctcccgctccacctcaccctgccccaggccttgcctcagtatgctggctctggaaacctcaccctgg

SEQ ID NO: 9313 - protein, 48 aa, Homo sapiens
MRIPPAWFPSPLLPPLHQIQPELVIPQQPQEDQAVKLASKCLKTLLDQ

SEQ ID NO: 9314 - DNA, 1863 bp, Homo sapiens
atttaagcacgactctgcagaaggaacaaagcaccctccccactgggctcctggttgcagagctccaagtcctcacacagatacgcctgtttgagaagcagcgggcaagaaagacgcaagcccagaggccctgccatttctgtgggctcaggtccctactggctcaggcccctgcctccctcggcaaggccacaatgaaccggggagtcccttttaggcacttgcttctggtgctgcaactggcgctcctcccagcagccactcagggaaagaaagtggtgctgggcaaaaaaggggatacagtggaactgacctgtacagcttcccagaaaagacctgccagtgtcctcaccggtttcagaagacatgtagccccatttgaggcacgaggccaggcagatcccacttgcagcctccccaggtgtctgccccgcgtttcctgcctgcggaccagatgaatgtagcagatccccagcctctggcctcctgttcgcctcctctacaatttgccattgtttctcctgggttaggccccggcttcactggttgagtgttgctctctagtttccagaggcttaatcacaccgtcctccacgccatttccttttccttcaagcctagcccttctctcattatttctctctgaccctctccccactgctcatttggatcccaggggagtgttcagggccagccctggctggcatggagggtgaggctgggtgtctggaagcatggagcatgggactgttcttttacaagacaggaccctgggaccacagagggcaggaacttgcacaaaatcacacagccaagccagtcaaggatggatgcagatccagaggtttctggcagccagtacctcctgccccatgctgcccgcttctcaccctatgtgggtgggaccacagactcacatcctgaccttgcacaaacagcccctctggacacagccccatgtacacggcctcaagggatgtctcacatcctctgtctatttgagacttagaaaaatcctacaaggctggcagtgacagaactaagatgatcatctccagtttatagaccagaaccagagctcagagaggctagatgattgattaccaagtgccggactagcaagtgctggagtcgggactaacccaggtcccttgtcccaagttccactgctgcctcttgaatgcagggacaaatgccacacggctctcaccagtggctagtggtgggtactcaatgtgtacttttgggttcacagaagcacagcacccatgggaagggtccatctcagagaatttacgagcagggatgaaggcctccctgtctaaaatccctccttcatcccccgctggtggcagaatctgttaccagaggacaaagcctttggctcttctaatcagagcgcaagctgggagcacaggcactgcaggagagaatgcccagtgaccagtcactgaccctgtgcagaacctcctggaagcgagctttgctgggagagggggtagctagcctgagagggaaccctctaagggacctcaaaggtgattgtgccaggctctgcgcctgccccacaccctcccttaccctcctccagaccattcaggacacagggaaatcagggttacaaatcttcttgatccacttctctcaggatcccctctcttcctacccttcctcaccacttccctcagtcccaactccttttccctatttccttctcctcctgtctttaaagcctgcctcttccaggaagacccccctattgctgctggggctccccatttgcttactttgcatttgtgcccactctccacccctgctcccctgagctgaaataaaaatacaataaacttactataaagatgc

SEQ ID NO: 9315 - protein, 87 aa, Homo sapiens
MNRGVPFRHLLLVLQLALLPAATQGKKVVLGKKGDTVELTCTASQKRPASVLTGFRRHVAPFEARGQADPTCSLPRCLPRVSCLRTR

SEQ ID NO: 9316 - DNA, 547 bp, Homo sapiens
aagcacgactctgcagaaggaacaaagcaccctccccactgggctcctggttgcagagctccaagtcctcacacagatacgcctgtttgagaagcagcgggcaagaaagacgcaagcccagaggtccatccaagctgaatgatcgcgctgactcaagaagaagcctttgggaccaaggaaactttcccctgatcatcaagaatcttaagatagaagactcagatacttacatctgtgaagtggaggaccagaaggaggaggtgcaattgctagtgttcggattgactgccaactctgacacccacctgcttcaggggcagagcctgaccctctccgtgtctcagctggagctccaggatagtggcacctggacatgcactgtcttgcagaaccagaagaaggtggagttcaaaatagacatcgtggtgctagggtgatgaatacgcctctaaggagtggaggccaaatggcttctgtggtccaggaatcctaaggacagcaaggatcccctgtggctgggctgctctgtgatggcttccgggaggag

SEQ ID NO: 9317 - protein, 39 aa, Homo sapiens; identical to SEQ ID NO: 9311

SEQ ID NO: 9318 - DNA, 1676 bp, Homo sapiens
acacctggtccccacaaggccctcaaacccctgagtcctctaccaggagatcctgtatatgggaactgattttggcccagctccctctgcccactccgccaagcagagcggatgtctcagatcaagagactcctcagtgagaagaagacctgccagtgtcctcaccggtttcagaagacatgtagccccatttgaggcacgaggccaggcagatcccacttgcagcctccccaggtgtctgccccgcgtttcctgcctgcggaccagatgaatgtagcagatccccagcctctggcctcctgttcgcctcctctacaatttgccattgtttctcctgggttaggccccggcttcactggttgagtgttgctctctagtttccagaggcttaatcacaccgtcctccacgccatttccttttccttcaagcctagcccttctctcattatttctctctgaccctctccccactgctcatttggatcccaggggagtgttcagggccagccctggctggcatggagggtgaggctgggtgtctggaagcatggagcatgggactgttcttttacaagacaggaccctgggaccacagagggcaggaacttgcacaaaatcacacagccaagccagtcaaggatggatgcagatccagaggtttctggcagccagtacctcctgccccatgctgcccgcttctcaccctatgtgggtgggaccacagactcacatcctgaccttgcacaaacagcccctctggacacagccccatgtacacggcctcaagggatgtctcacatcctctgtctatttgagacttagaaaaatcctacaaggctggcagtgacagaactaagatgatcatctccagtttatagaccagaaccagagctcagagaggctagatgattgattaccaagtgccggactagcaagtgctggagtcgggactaacccaggtcccttgtcccaagttccactgctgcctcttgaatgcagggacaaatgccacacggctctcaccagtggctagtggtgggtactcaatgtgtacttttgggttcacagaagcacagcacccatgggaagggtccatctcagagaatttacgagcagggatgaaggcctccctgtctaaaatccctccttcatcccccgctggtggcagaatctgttaccagaggacaaagcctttggctcttctaatcagagcgcaagctgggagcacaggcactgcaggagagaatgcccagtgaccagtcactgaccctgtgcagaacctcctggaagcgagctttgctgggagagggggtagctagcctgagagggaaccctctaagggacctcaaaggtgattgtgccaggctctgcgcctgccccacaccctcccttaccctcctccagaccattcaggacacagggaaatcagggttacaaatcttcttgatccacttctctcaggatcccctctcttcctacccttcctcaccacttccctcagtcccaactccttttccctatttccttctcctcctgtctttaaagcctgcctcttccaggaagacccccctattgctgctggggctccccatttgcttactttgcatttgtgcccactctccacccctgctcccctgagctgaaataaaaatacaataaacttactataaagatgc

SEQ ID NO: 9319 - protein, 70 aa, Homo sapiens
MGTDFGPAPSAHSAKQSGCLRSRDSSVRRRPASVLTGFRRHVAPFEARGQADPTCSLPRCLPRVSCLRTR

SEQ ID NO: 9320 - DNA, 1628 bp, Homo sapiens
gagctagaaggaggcagaagtgggaggatggagctgaaggagcagcaggccaggaaaggccctgctggaaagccactggagctgtgctgcgctggaaaggccattggaggtgctagaacgcaaaggggttgcagtggggacagacctgctccccttcttctttgttcctgcagccggtttcagaagacatgtagccccatttgaggcacgaggccaggcagatcccacttgcagcctccccaggtgtctgccccgcgtttcctgcctgcggaccagatgaatgtagcagatccccagcctctggcctcctgttcgcctcctctacaatttgccattgtttctcctgggttaggccccggcttcactggttgagtgttgctctctagtttccagaggcttaatcacaccgtcctccacgccatttccttttccttcaagcctagcccttctctcattatttctctctgaccctctccccactgctcatttggatcccaggggagtgttcagggccagccctggctggcatggagggtgaggctgggtgtctggaagcatggagcatgggactgttcttttacaagacaggaccctgggaccacagagggcaggaacttgcacaaaatcacacagccaagccagtcaaggatggatgcagatccagaggtttctggcagccagtacctcctgccccatgctgcccgcttctcaccctatgtgggtgggaccacagactcacatcctgaccttgcacaaacagcccctctggacacagccccatgtacacggcctcaagggatgtctcacatcctctgtctatttgagacttagaaaaatcctacaaggctggcagtgacagaactaagatgatcatctccagtttatagaccagaaccagagctcagagaggctagatgattgattaccaagtgccggactagcaagtgctggagtcgggactaacccaggtcccttgtcccaagttccactgctgcctcttgaatgcagggacaaatgccacacggctctcaccagtggctagtggtgggtactcaatgtgtacttttgggttcacagaagcacagcacccatgggaagggtccatctcagagaatttacgagcagggatgaaggcctccctgtctaaaatccctccttcatcccccgctggtggcagaatctgttaccagaggacaaagcctttggctcttctaatcagagcgcaagctgggagcacaggcactgcaggagagaatgcccagtgaccagtcactgaccctgtgcagaacctcctggaagcgagctttgctgggagagggggtagctagcctgagagggaaccctctaagggacctcaaaggtgattgtgccaggctctgcgcctgccccacaccctcccttaccttctctcaggatcccctctcttcctacccttcctcaccacttccctcagtcccaactccttttccctatttccttctcctcctgtctttaaagcctgcctcttccaggaagacccccctattgctgctggggctccccatttgcttactttgcatttgtgcccactctccacccctgctcccctgagctgaaataaaaatacaataaacttactataaagatgc

SEQ ID NO: 9321 - protein, 111 aa, Homo sapiens
MPSDQSLTLCRTSWKRALLGEGVASLRGNPLRDLKGDCARLCACPTPSLTFSQDPLSSYPSSPLPSVPTPFPYFLLLLSLKPASSRKTPLLLLGLPICLLCICAHSPPLLP

SEQ ID NO: 9322 - DNA, 472 bp, Homo sapiens
cagatcccacttgcagcctccccaggtgtctgccccgcgtttcctgcctgcggaccagatgaatgtagcagatccccagcctctggcctcctgttcgcctcctctacaatttgccattgtttctcctgggttaggccccggcttcactggttgagtgttgctctctagtttccagaggcttaatcacaccgtcctccacgccatttccttttccttcaagcctagcccttctctcattatttctctctgaccctctccccactgctcatttggatcccaggggagtgttcagggccagccctggctggcatggagggtgaggctgggtgtctggaagcatggagcatgggactgttcttttacaagacaggaccccccctattgctgctggggctccccatttgcttactttgcatttgtgcccactctccacccctgctcccctgagctgaaataaaaatacaataaactt

SEQ ID NO: 9323 - protein, 45 aa, Homo sapiens
MEGEAGCLEAWSMGLFFYKTGPPLLLLGLPICLLCICAHSPPLLP

SEQ ID NO: 9324 - DNA, 687 bp, Homo sapiens
ttccttgcccctcctccccgagtcaccaccgtccagttccccaccctgcactcgtttcccgcccccccccgccccccacaaagctgtcctgccttccctctggcctgggctcactggcaggacgaccccgggagagagggtcctggagagtgagaggggcagagaccgagtgagccgtgggctgagcctgggaggccgggactgagggggaggagggaggcccgggggaagggagggagggagagagggaaggagggaggagggcgggcgagctggagccggcaggcagcgggagcccgagagagccgcgtcgggagtgcggtctccatggcagtgctgggcgcagccggagagagcctgtccagggggctgagccccacccccaaatccctggggcatccagaagattcctgactggtcaagaaccagaggcaaaagagacctggaagtcccagcatggggaccagaaccccccagccagcctcatagttgggaaagtagccagcttgcctgccccatcaattgcagggatgcttaaggaaggccccgcccagtatgaaagctgaggattgcctctgctgaccctcagtctcctcccctgccctctacatctgccctcagctgggtccatcatgcaatgctgagcactgggctgcgtcgtcaggcttcctccgactatgactggaa

SEQ ID NO: 9325 - protein, 55 aa, Homo sapiens
GGGGRPGGREGGREGRREEGGRAGAGRQREPERAASGVRSPWQCWAQPERACPGG

SEQ ID NO: 9326 - DNA, 2690 bp, Homo sapiens
ttccttgcccctcctccccgagtcaccaccgtccagttccccaccctgcactcgtttcccgcccccccccgccccccacaaagctgtcctgccttccctctggcctgggctcactggcaggacgaccccgggagagagggtcctggagagtgagaggggcagagaccgagtgagccgtgggctgagcctgggaggccgggactgagggggaggagggaggcccgggggaagggagggagggagagagggaaggagggaggagggcgggcgagctggagccggcaggcagcgggagcccgagagagccgcgtcgggagtgcggtctccatggcagtgctgggcgcagccggagagagcctgtccagggggctgagccccacccccaaatccctggggcatccagaagattcctgactggtcaagaaccagaggcaaaagagacctggaagtcccagcatggggaccagaaccccccagccagcctcatagttgggaaagtagccagcttgcctgccccatcaattgcagggatgcttaaggaaggccccgcccagtatgaaagctgaggattgcctctgctgaccctcagtctcctcccctgccctctacatctgccctcagctgggtccatcatgcaatgctgagcactgggcatctcggccaagcagcagaagcacaagccactggagctgctgctctgcttcctagcgggcacacacatactcatggcagctgtgcccctcaccacctttgccgtggtgcagctgcgtcgtcaggcttcctccgactatgactggaacgagagtatctgcaaggtcttcgtgtccacctactacaccctggcgctggccacctgcttcacggtcgcctccctctcctaccatcgcatgtggatggtgcgctggcccgtcaactaccgcctcagcaacgccaagaagcaggcactgcatgccgtcatgggcatctggatggtcagcttcatcctctccacactgccctccattggctggcacaacaacggcgagcgctactatgcccgcggctgccagttcatagtctccaagatcggcctcggctttggcgtttgcttcagcctcttgctacttgggggaattgtcatgggtctggtctgtgtggccatcaccttctaccagacactgtgggcccggccccggagggctcggcaggcccggagagtggggggtggtggggggaccaaagcgggtgggccaggggccttgggtacccggccagcttttgaggtaccagccattgtggtggaggatgcccgagggaagcggcggtcctcgctggatggctcggagtctgccaagacatccctgcaggtcaccaacttggtcagcgccatcgtctttctctatgactcactcacaggggtgcccatcttggtgagatcggggtcctccccacctgttctccccaatatccaggccccagcatcatcacctgacctccaacttcatcagccatacagcagctccgtcatctctcctccagttccatcatccatcttcctctcctctgtccatcccccactccatttgtggcccccatcttgatcatctgtcttttagttcccactaccctgtttaccccagctccagcatctgcttcagttcccactcctcagctccatcaccgtccttcagttccacgacctgtcctccagctccgtcatccatcctgcagctccacggttcagccgcagacctctcatccagccgctgggctccactctccattccctccttccctcgggctgccacatggtctctgagcactcttggctggaaatcccacagggctcaccccaccaccccatctagtcactgttcctgggttcctgtctgtctctacggttcctggtccacctctgttcctctccctcctgaccgcagggctttgtctccagcactctccccgaccttcctctgagtcagtcccttccctctgttcactccatctccacctccgcttcgcctctgttggagcacagggatcaggcattacttctgacgtcttgcccaccagctgcactaggatatggggttcaggtgggctcctcagctctggccctgacccagcccgctcccacccttccccaggtggtgagcttcttctccctcaagtcggactcggcgcccccctggatggtgctggctgtgctgtggtgctccatggcacagacgctgctgctgccctccttcatctggtcctgcgagcgctaccgcgccgacgtgcgcacagtgtgggagcaatgcgtggccatcatgtctgaggaggatggagatgacggtcagaggaggggctgggctttggctttcctggacatctgtctattcccttttctgccgctccttctcagccagaggatgggctgccctggagtgccccctactggacagaatctgcaccaccctgggctcccctttccctaagcaggcaccctgctgtccactcactgcttcccgcagcactcagggctcccttcactgggcctaggctcccctccagaaacccacactgcccagctctggcactatggggaacctgagcttcccgagagaggccccccagctatagggacggctcttgggggagtgcaggcaattgtttcaataacttcatctatatgtatgaagcactccactcaggatttagcactgaac

SEQ ID NO: 9327 - protein, 51 aa, Homo sapiens
MLSTGHLGQAAEAQATGAAALLPSGHTHTHGSCAPHHLCRGAAASSGFLRL

SEQ ID NO: 9328 - DNA, 1769 bp, Homo sapiens
ttccttgcccctcctccccgagtcaccaccgtccagttccccaccctgcactcgtttcccgcccccccccgccccccacaaagctgtcctgccttccctctggcctgggctcactggcaggacgaccccgggagagagggtcctggagagtgagaggggcagagaccgagtgagccgtgggctgagcctgggaggccgggactgagggggaggagggaggcccgggggaagggagggagggagagagggaaggagggaggagggcgggcgagctggagccggcaggcagcgggagcccgagagagccgcgtcgggagtgcggtctccatggcagtgctgggcgcagccggagagagcctgtccagggggctgagccccacccccaaatccctggggcatccagaagattcctgactggtcaagaaccagaggcaaaagagacctggaagtcccagcatggggaccagaaccccccagccagcctcatagttgggaaagtagccagcttgcctgccccatcaattgcagggatgcttaaggaaggccccgcccagtatgaaagctgaggattgcctctgctgaccctcagtctcctcccctgccctctacatctgccctcagctgggtccatcatgcaatgctgagcactggggtggtgagcttcttctccctcaagtcggactcggcgcccccctggatggtgctggctgtgctgtggtgctccatggcacagacgctgctgctgccctccttcatctggtcctgcgagcgctaccgcgccgacgtgcgcacagtgtgggagcaatgcgtggccatcatgtctgaggaggatggagatgacgatgggggctgtgacgactatgcagagggccgagtttgcaaagttcgctttgatgctaacggagccacaggaccagggagccgggaccccgcccaggtgaagctgctgcctggaaggcacatgctcttccctcctcttgagagagtccactacttacaggtccccctatcccggcgtctgtcccatgatgagacaaacatcttctctacccctcgggaaccaggctccttcctgcacaagtggtcatcctctgatgacatccgggtcctcccagcccagagccgggccctcgggggtcctcctgagtacctgggacaaagacacaggttggaggacgaggaggacgaggaagaggctgaaggtggggggctggccagccttcgccaattcttggagagtggggttctggggtcaggtgggggacccccacggggtcctggcttcttccgggaggagatcaccaccttcatcgatgagacacctctgccttctccgactgcctcaccagggcactctcctcgtcggccccggccactgggcctctcaccccgccgactctcccttgggtcccctgagagcagagccgttggacttcctttgggactaagcgcagggagacgctgctccctgacggggggtgaagaaagtgcaagggcttggggaggatcctggggcccaggcaaccccatctttccccagctgaccctgtgagcccaagcaggcctgctgaactcagaggagaaagcctgagtgagtaacacctcattctggccgagagtagggcagctgcctccagactctggggagacgggcgctagatttggggctcagaaggccctgctctctcccatccaagtgaccagatgccctactcagcttccatcacccctagcaatatgtattaaagtctgaagtgttgccatggaaa

SEQ ID NO: 9329 - protein, 304 aa, Homo sapiens; identical to SEQ ID NO: 1347

SEQ ID NO: 9330 - DNA, 2208 bp, Homo sapiens
acaaagctgtcctgccttccctctggcctgggctcactggcaggacgaccccgggagagagggtcctggagagtgagaggggcagaggaggcctccctgcgctccaacgcattgtcctggctggcctgtgggctcctggcgctgctggccaatgcctggatcatcctcagcatctcggccaagcagcagaagcacaagccactggagctgctgctctgcttcctagcgggcacacacatactcatggcagctgtgcccctcaccacctttgccgtggtgcagctgcgtcgtcaggcttcctccgactatgactggaacgagagtatctgcaaggtcttcgtgtccacctactacaccctggcgctggccacctgcttcacggtcgcctccctctcctaccatcgcatgtggatggtgcgctggcccgtcaactaccgcctcagcaacgccaagaagcaggcactgcatgccgtcatgggcatctggatggtcagcttcatcctctccacactgccctccattggctggcacaacaacggcgagcgctactatgcccgcggctgccagttcatagtctccaagatcggcctcggctttggcgtttgcttcagcctcttgctacttgggggaattgtcatgggtctggtctgtgtggccatcaccttctaccagacactgtgggcccggccccggagggctcggcaggcccggagagtggggggtggtggggggaccaaagcgggtgggccaggggccttgggtacccggccagcttttgaggtaccagccattgtggtggaggatgcccgagggaagcggcggtcctcgctggatggctcggagtctgccaagacatccctgcaggtcaccaacttggtcagcgccatcgtctttctctatgactcactcacaggggtgcccatcttggtgagatcggggtcctccccacctgttctccccaatatccaggccccagcatcatcacctgacctccaacttcatcagccatacagcagctccgtcatctctcctccagttccatcatccatcttcctctcctctgtccatcccccactccatttgtggcccccatcttgatcatctgtcttttagttcccactaccctgtttaccccagctccagcatctgcttcagttcccactcctcagctccatcaccgtccttcagttccacgacctgtcctccagctccgtcatccatcctgcagctccacggttcagccgcagacctctcatccagccgctgggctccactctccattccctccttccctcgggctgccacatggtctctgagcactcttggctggaaatcccacagggctcaccccaccaccccatctagtcactgttcctgggttcctgtctgtctctacggttcctggtccacctctgttcctctccctcctgaccgcagggctttgtctccagcactctccccgaccttcctctgagtcagtcccttccctctgttcactccatctccacctccgcttcgcctctgttggagcacagggatcaggcattacttctgacgtcttgcccaccagctgcactaggatatggggttcaggtgggctcctcagctctggccctgacccagcccgctcccacccttccccaggtggtgagcttcttctccctcaagtcggactcggcgcccccctggatggtgctggctgtgctgtggtgctccatggcacagacgctgctgctgccctccttcatctggtcctgcgagcgctaccgcgccgacgtgcgcacagtgtgggagcaatgcgtggccatcatgtctgaggaggatggagatgacggtcagaggaggggctgggctttggctttcctggacatctgtctattcccttttctgccgctccttctcagccagaggatgggctgccctggagtgccccctactggacagaatctgcaccaccctgggctcccctttccctaagcaggcaccctgctgtccactcactgcttcccgcagcactcagggctcccttcactgggcctaggctcccctccagaaacccacactgcccagctctggcactatggggaacctgagcttcccgagagaggccccccagctatagggacggctcttgggggagtgcaggcaattgtttcaataacttcatctatatgtatgaagcactccactcaggatttagcactgaac

SEQ ID NO: 9331 - protein, 284 aa, Homo sapiens [sequence omitted]

SEQ ID NO: 9332 - DNA, 2522 bp, Homo sapiens
aaggagggaggagggcgggcgagctggagccggcaggcagcgggagcccgagagagccgcgtcgggagtgcggtctccatggcagtgctgggcgcagccggagagagcctgtccagggggctgagccccacccccaaatccctggggcatccagaagattcctgactggtcaagaaccagaggcaaaagagacctggaagtcccagcatggggaccagaaccccccagccagcctcatagttgggaaagtagccagcttgcctgccccatcaattgcagggatgcttaaggaaggccccgcccagtatgaaagctgaggattgcctctgctgaccctcagtctcctcccctgccctctacatctgccctcagctgggtccatcatgcaatgctgagcactggggtgagcctgggggcagcctgcctgctgacagggcgaggattgtggggatcatgggagtgtttgtgagtggggctcctgggtgagacctagcccccacccccacagagctcaagggggtggggggctgaggataggatggctcggggcggggcgggggcagaggaggcctccctgcgctccaacgcattgtcctggctggcctgtgggctcctggcgctgctggccaatgcctggatcatcctcagcatctcggccaagcagcagaagcacaagccactggagctgctgctctgcttcctagcgggcacacacatactcatggcagctgtgcccctcaccacctttgccgtggtgcagctgcgtcgtcaggcttcctccgactatgactggaacgagagtatctgcaaggtcttcgtgtccacctactacaccctggcgctggccacctgcttcacggtcgcctccctctcctaccatcgcatgtggatggtgcgctggcccgtcaactaccgcctcagcaacgccaagaagcaggcactgcatgccgtcatgggcatctggatggtcagcttcatcctctccacactgccctccattggctggcacaacaacggcgagcgctactatgcccgcggctgccagttcatagtctccaagatcggcctcggctttggcgtttgcttcagcctcttgctacttgggggaattgtcatgggtctggtctgtgtggccatcaccttctaccagacactgtgggcccggccccggagggctcggcaggcccggagagtggggggtggtggggggaccaaagcgggtgggccaggggccttgggtacccggccagcttttgaggtaccagccattgtggtggaggatgcccgagggaagcggcggtcctcgctggatggctcggagtctgccaagacatccctgcaggtcaccaacttggtcagcgccatcgtctttctctatgactcactcacaggggtgcccatcttggtggtgagcttcttctccctcaagtcggactcggcgcccccctggatggtgctggctgtgctgtggtgctccatggcacagacgctgctgctgccctccttcatctggtcctgcgagcgctaccgcgccgacgtgcgcacagtgtgggagcaatgcgtggccatcatgtctgaggaggatggagatgacgatgggggctgtgacgactatgcagagggccgagtttgcaaagttcgctttgatgctaacggagccacaggaccagggagccgggaccccgcccaggtgaagctgctgcctggaaggcacatgctcttccctcctcttgagagagtccactacttacaggtccccctatcccggcgtctgtcccatgatgagacaaacatcttctctacccctcgggaaccaggctccttcctgcacaagtggtcatcctctgatgacatccgggtcctcccagcccagagccgggccctcgggggtcctcctgagtacctgggacaaagacacaggttggaggacgaggaggacgaggaagaggctgaaggtggggggctggccagccttcgccaattcttggagagtggggttctggggtcaggtgggggacccccacggggtcctggcttcttccgggaggagatcaccaccttcatcgatgagacacctctgccttctccgactgcctcaccagggcactctcctcgtcggccccggccactgggcctctcaccccgccgactctcccttgggtcccctgagagcagagccgttggacttcctttgggactaagcgcagggagacgctgctccctgacggggggtgaagaaagtgcaagggcttggggaggatcctggggcccaggcaaccccatctttccccagctgaccctgtgagcccaagcaggcctgctgaactcagaggagaaagcctgagtgagtaacacctcattctggccgagagtagggcagctgcctccagactctggggagacgggcgctagatttggggctcagaaggccctgctctctcccatccaagtgaccagatgccctactcagcttccatcacccctagcaatatgtattaaagtctgaagtgttgccatggaaa

SEQ ID NO: 9333 - protein, 588 aa, Homo sapiens; identical to SEQ ID NO: 1349

SEQ ID NO: 9334 - DNA, 1150 bp, Homo sapiens
ctccatggcagtgctgggcgcagccggagagaggtggtgagcttcttctccctcaagtcggactcggcgcccccctggatggtgctggctgtgctgtggtgctccatggcacagacgctgctgctgccctccttcatctggtcctgcgagcgctaccgcgccgacgtgcgcacagtgtgggagcaatgcgtggccatcatgtctgaggaggatggagatgacgatgggggctgtgacgactatgcagagggccgagtttgcaaagttcgctttgatgctaacggagccacaggaccagggagccgggaccccgcccaggtgaagctgctgcctggaaggcacatgctcttccctcctcttgagagagtccactacttacaggtccccctatcccggcgtctgtcccatgatgagacaaacatcttctctacccctcgggaaccaggctccttcctgcacaagtggtcatcctctgatgacatccgggtcctcccagcccagagccgggccctcgggggtcctcctgagtacctgggacaaagacacaggttggaggacgaggaggacgaggaagaggctgaaggtggggggctggccagccttcgccaattcttggagagtggggttctggggtcaggtgggggacccccacggggtcctggcttcttccgggaggagatcaccaccttcatcgatgagacacctctgccttctccgactgcctcaccagggcactctcctcgtcggccccggccactgggcctctcaccccgccgactctcccttgggtcccctgagagcagagccgttggacttcctttgggactaagcgcagggagacgctgctccctgacggggggtgaagaaagtgcaagggcttggggaggatcctggggcccaggcaaccccatctttccccagctgaccctgtgagcccaagcaggcctgctgaactcagaggagaaagcctgagtgagtaacacctcattctggccgagagtagggcagctgcctccagactctggggagacgggcgctagatttggggctcagaaggccctgctctctcccatccaagtgaccagatgccctactcagcttccatcacccctagcaatatgtattaaagtctgaagtgttgccatggaaa

SEQ ID NO: 9335 - protein, 284 aa, Homo sapiens
MVLAVLWCSMAQTLLLPSFIWSCERYRADVRTVWEQCVAIMSEEDGDDDGGCDDYAEGRVCKVRFDANGATGPGSRDPAQVKLLPGRHMLFPPLERVHYLQVPLSRRLSHDETNIFSTPREPGSFLHKWSSSDDIRVLPAQSRALGGPPEYLGQRHRLEDEEDEEEAEGGGLASLRQFLESGVLGSGGGPPRGPGFFREEITTFIDETPLPSPTASPGHSPRRPRPLGLSPRRLSLGSPESRAVGLPLGLSAGRRCSLTGGEESARAWGGSWGPGNPIFPQLTL

SEQ ID NO: 9336 - DNA, 1133 bp, Homo sapiens
agctgctgctctgcttcctagcgggcacacacatactcatggcagctgtgcccctcaccacctttgccgtggtgcagctgcgtcgtcaggcttcctccgactatgactggaacgagagtatctgcaaggtcttcgtgtccacctactacaccctggcgctggccacctgcttcacggtcgcctccctctcctaccatcgcatgtggatggtgcgctggcccgtcaactaccgcctcagcaacgccaagaagcaggcactgcatgccgtcatgggcatctggatggtcagcttcatcctctccacactgccctccattggctggcacaacaacggcgagcgctactatgcccgcggctgccagttcatagtctccaagatcggcctcggctttggcgtttgcttcagcctcttgctacttgggggaattgtcatgggtctggtctgtgtggccatcaccttctaccagacactgtgggcccggccccggagggctcggcaggcccggagagtggggggtggtggggggaccaaagcgggtgggccaggggccttgggtacccggccagcttttgaggtaccagccattgtggtggaggatgcccgagggaagcggcggtcctcgctggatggctcggagtctgccaagacatccctgcaggtcaccaacttggtggtgagcttcttctccctcaagtcggactcggcgcccccctggatggtgctggctgtgctgtggtgctccatggcacagacgctgctgctgccctccttcatctggtcctgcgagcgctaccgcgccgacgtgcgcacagtgtgggagcaatgcgtggccatcatgtctgaggaggatggagatgacgatgggggctgtgacgactatgcagagggccgagtttgcaaagttcgctttgatgctaacggagccacaggaccagggagccgggaccccgcccaggtgaagctgctgcctggaaggcacatgctcttccctcctcttgagagagtccactacttacagttgaagaagctggatctggcagctgcggcagcacacaccttctttgtagcaaaccccatgcacctgcagatgcgggaggacatggctaagtacagacgaatgtcgggagttcgg

SEQ ID NO: 9337 - protein, 364 aa, Homo sapiens
MAAVPLTTFAVVQLRRQASSDYDWNESICKVFVSTYYTLALATCFTVASLSYHRMWMVRWPVNYRLSNAKKQALHAVMGIWMVSFILSTLPSIGWHNNGERYYARGCQFIVSKIGLGFGVCFSLLLLGGIVMGLVCVAITFYQTLWARPRRARQARRVGGGGGTKAGGPGALGTRPAFEVPAIVVEDARGKRRSSLDGSESAKTSLQVTNLVVSFFSLKSDSAPPWMVLAVLWCSMAQTLLLPSFIWSCERYRADVRTVWEQCVAIMSEEDGDDDGGCDDYAEGRVCKVRFDANGATGPGSRDPAQVKLLPGRHMLFPPLERVHYLQLKKLDLAAAAAHTFFVANPMHLQMREDMAKYRRMSGV

SEQ ID NO: 9338 - DNA, 625 bp, Homo sapiens
caggtccccctatcccggcgtctgtcccatgatgagacaaacatcttctctacccctcgggaaccaggctccttcctgcacaagtggtcatcctctgatgacatccgggtcctcccagcccagagccgggccctcgggggtcctcctgagtacctgggacaaagacacaggttggaggacgaggaggacgaggaagaggctgaagggcactctcctcgtcggccccggccactgggcctctcaccccgccgactctcccttgggtcccctgagagcagagccgttggacttcctttgggactaagcgcagggagacgctgctccctgacggggggtgaagaaagtgcaagggcttggggaggatcctggggcccaggcaaccccatctttccccagctgaccctgtgagcccaagcaggcctgctgaactcagaggagaaagcctgagtgagtaacacctcattctggccgagagtagggcagctgcctccagactctggggagacgggcgctagatttggggctcagaaggccctgctctctcccatccaagtgaccagatgccctactcagcttccatcacccctagcaatatgtattaaagtctgaagtgttgccatggaaa

SEQ ID NO: 9339 - protein, 91 aa, Homo sapiens
MMRQTSSLPLGNQAPSCTSGHPLMTSGSSQPRAGPSGVLLSTWDKDTGWRTRRTRKRLKGTLLVGPGHWASHPADSPLGPLRAEPLDFLWD

SEQ ID NO: 9340 - DNA, 550 bp, Homo sapiens
cacaagtggtcatcctctgatgacatccgggtcctcccagcccagagccgggccctcgggggtcctcctgagtacctgggacaaagacacaggttggaggacgaggaggacgaggaagaggctgaaggtggggggctggccagccttcgccaattcttggagagtggggttctggggtcaggtgggggacccccacggggtcctggcttcttccgggaggagatcaccaccttcatcgatgagacacctctgccttctccgactgcctcaccagggcactctcctcgtcggccccggccactgggcctctcaccccgccgactctcccttgggtcccctgagagcagagccgttggacttcctttgggactaagcgcagggagacgctgctccctgacggggggtgaagaaagtgcaagggcttggggaggatcctggggcccaggcaaccccatctttccccagctgaccctgtgagcccaagcaggcctgctgaatcagcttccatcacccctagcaatatgtattaaagtctgaagtgttgccatgg

SEQ ID NO: 9341 - protein, 117 aa, Homo sapiens
MTSGSSQPRAGPSGVLLSTWDKDTGWRTRRTRKRLKVGGWPAFANSWRVGFWGQVGDPHGVLASSGRRSPPSSMRHLCLLRLPHQGTLLVGPGHWASHPADSPLGPLRAEPLDFLWD

SEQ ID NO: 9342 - DNA, 2137 bp, Homo sapiens
ttgaggacacacatcttcgttggttgggttgaagaagctggatctggcagctgcggcagcacacaccttctttgtagcaaaccccatgcacctgcagatgcgggaggacatggctaagtacagacgaatgtcgggagttcggccccagagcttccgggacctggagacgcccccacactgggcagcctatgacactggcctggagctactggggcgccaggaggcaggactggcactgcccaggctagaggaggctcttcaggggagcctggcccagatggagagctgccgtgctgactgtgaggggcctgaggagcagcagggggctgaagaagaggaggatggggctgcgagccaggggggcctctatgaggccattgcaggacactggattcaggtcctgcagtgccggcaacgctgtgtgggggaaacagccacacgccctggtcgcagcttccctgtcccagacttccttcccaaccagctgaggcggctacatgaggcccatgctcaggtgggcaatctgtcccaggctatagaaaatgtcctgagtgtcctgctcttctacccggaggatgaggctgccaagagggctctgaaccagtaccaggcccagctgggagagccgagacctggcctcggacccagagaggacatccagcgcttcatcctccgatccctgggggagaagaggcagctctactatgccatggagcacctggggaccagcttcaaggatcctgacccctggacccctgcagctctcatccctgaggcacttagagaaaagctcagagaggatcaagagaagaggccttgggaccatgagcccgtgaagccaaagcccttgacctactggaaggatgtccttctcctggagggtgtgaccttgacccaggattccaggcagctgaatgggtcggagcgggcggtgttggatgggctgctcaccccagccgagtgtggggtgctgctgcagctggctaaggatgcagctggggctggagccaggtctggctatcgtggtcgccgctcccctcacaccccccatgaacgcttcgaggggctcacggtgcttaaggctgcgcagctggcccgggctgggacagtgggcagtcagggtgctaagctgcttctggaggtgagcgagcgggtgcggaccttgacccaggcctacttctccccggaacggcccctgcatctgtccttcacccacctggtgtgccgcagcgccatagaaggagagcaagagcagcgcatggacctgagtcacccagtgcacgcagacaactgcgtcctggaccctgacacgggagagtgctggcgggagcccccagcctacacctatcgggactacagcggactcctctacctcaacgatgacttccagggtggggacctgttcttcacggagcccaacgccctcactgtcacggctcgggtgcgtcctcgctgtgggcgccttgtggccttcagctccggtgtcgagaatccccatggggtgtgggccgtgactcggggacggcgctgtgccctggcactgtggcacacgtgggcacctgagcacagggagcaggagtggatagaagccaaagaactgctgcaggagtcacaggaggaggaggaagaggaagaggaagaaatgcccagcaaagacccttccccagagccccctagccgcaggcaccagagggtccaagacaagactggaagggcacctcgggttcgggaggagctgtgagtggctgagccagctccttgaggatgtggccacttgacttgtggaaggccatcttgatgccaggacacacaggaagcccctgtgtgacatcaggagcagaacagcaagctctctgtccctgcacccccaccatcttggggacctacaagggcctggactcagaggacagtgcacaggctagcctggagctcaccaggcctggggagctgggacggggccccgctgccggacctgcagccctggacagatggggaacactgtgcctccctgaacagaaatggcaggggaggaggctgatgctttaaatgaagaggatggtggggttgggaggtataaccctgctcctctctcccagtctgtgcaataaaggtcgtgaagatctctcagccaggggcc

SEQ ID NO: 9343 - protein, 551 aa, Homo sapiens
MHLQMREDMAKYRRMSGVRPQSFRDLETPPHWAAYDTGLELLGRQEAGLALPRLEEALQGSLAQMESCRADCEGPEEQQGAEEEEDGAASQGGLYEAIAGHWIQVLQCRQRCVGETATRPGRSFPVPDFLPNQLRRLHEAHAQVGNLSQAIENVLSVLLFYPEDEAAKRALNQYQAQLGEPRPGLGPREDIQRFILRSLGEKRQLYYAMEHLGTSFKDPDPWTPAALIPEALREKLREDQEKRPWDHEPVKPKPLTYWKDVLLLEGVTLTQDSRQLNGSERAVLDGLLTPAECGVLLQLAKDAAGAGARSGYRGRRSPHTPHERFEGLTVLKAAQLARAGTVGSQGAKLLLEVSERVRTLTQAYFSPERPLHLSFTHLVCRSAIEGEQEQRMDLSHPVHADNCVLDPDTGECWREPPAYTYRDYSGLLYLNDDFQGGDLFFTEPNALTVTARVRPRCGRLVAFSSGVENPHGVWAVTRGRRCALALWHTWAPEHREQEWIEAKELLQESQEEEEEEEEEMPSKDPSPEPPSRRHQRVQDKTGRAPRVREEL

SEQ ID NO: 9344 - DNA, 2879 bp, Homo sapiens
acccagaagcgtgtgtgtggagggaacacagccccagtagttacccccagacctcaggggctgaagtcaccgctggggctgaagtcatccttcatggatgcccaggcctgctccagttcccgccttttgccctcctcctcccagtttctccctcttattccacactagaccagctttgtccactcagcactcttctctctccatcttttcacatgggcctctcccaccatcgggttcccgcatttcccctcggctgccggcggctccgacatcatgctccggctcctccggccgctgctgctactgctgctgctgcctcccccggggtcccctgagccccccggcctgacccagctgtccccgggggcgcccccgcaggcccccgacttgctctacgctgacgggctgcgcgcctacgcggccggggcttgggcgccggccgtggcgctgctgcgggaggcgctgcggagccaggcggcgctgggccgggtgcggctggattgcggggcgagctgcgcggccgatccgggcgccgcgctccccgccgtgcttctcggggccccggagcccgactccgggccgggacccacgcaggggtcctgggagcgacagcttctccgtgcagcgctccgccgcgcagactgcctgacccagtgcgcagcacggaggctgggccccgggggcgcggcgcgcttcgcgtggggagcgcgctccgggacgccttccgccgtcgggagccctacaactacctgcagagggcctattaccagttgaagaagctggatctggcagctgcggcagcacacaccttctttgtagcaaaccccatgcacctgcagatgcgggaggacatggctaagtacagacgaatgtcgggagttcggccccagagcttccgggacctggagacgcccccacactgggcagcctatgacactggcctggagctactggggcgccaggaggcaggactggcactgcccaggctagaggaggctcttcaggggagcctggcccagatggagagctgccgtgctgactgtgaggggcctgaggagcagcagggggctgaagaagaggaggatggggctgcgagccaggggggcctctatgaggccattgcaggacactggattcaggtcctgcagtgccggcaacgctgtgtgggggaaacagccacacgccctggtcgcagcttccctgtcccagacttccttcccaaccagctgaggcggctacatgaggcccatgctcaggtgggcaatctgtcccaggctatagaaaatgtcctgagtgtcctgctcttctacccggaggatgaggctgccaagagggctctgaaccagtaccaggcccagctgggagagccgagacctggcctcggacccagagaggacatccagcgcttcatcctccgatccctgggggagaagaggcagctctactatgccatggagcacctggggaccagcttcaaggatcctgacccctggacccctgcagctctcatccctgaggcacttagagaaaagctcagagaggatcaagagaagaggccttgggaccatgagcccgtgaagccaaagcccttgacctactggaaggatgtccttctcctggagggtgtgaccttgacccaggattccaggcagctgaatgggtcggagcgggcggtgttggatgggctgctcaccccagccgagtgtggggtgctgctgcagctggctaaggatgcagctggggctggagccaggtctggctatcgtggtcgccgctcccctcacaccccccatgaacgcttcgaggggctcacggtgcttaaggctgcgcagctggcccgggctgggacagtgggcagtcagggtgctaagctgcttctggaggtgagcgagcgggtgcggaccttgacccaggcctacttctccccggaacggcccctgcatctgtccttcacccacctggtgtgccgcagcgccatagaaggagagcaagagcagcgcatggacctgagtcacccagtgcacgcagacaactgcgtcctggaccctgacacgggagagtgctggcgggagcccccagcctacacctatcgggactacagcggactcctctacctcaacgatgacttccagggtggggacctgttcttcacggagcccaacgccctcactgtcacggctcgggtgcgtcctcgctgtgggcgccttgtggccttcagctccggtgtcgagaatccccatggggtgtgggccgtgactcggggacggcgctgtgccctggcactgtggcacacgtgggcacctgagcacagggagcaggagtggatagaagccaaagaactgctgcaggagtcacaggaggaggaggaagaggaagaggaagaaatgcccagcaaagacccttccccagagccccctagccgcaggcaccagagggtccaagacaagactggaagggcacctcgggttcgggaggagctgtgagtggctgagccagctccttgaggatgtggccacttgacttgtggaaggccatcttgatgccaggacacacaggaagcccctgtgtgacatcaggagcagaacagcaagctctctgtccctgcacccccaccatcttggggacctacaagggcctggactcagaggacagtgcacaggctagcctggagctcaccaggcctggggagctgggacggggccccgctgccggacctgcagccctggacagatggggaacactgtgcctccctgaacagaaatggcaggggaggaggctgatgctttaaatgaagaggatggtggggttgggaggtataaccctgctcctctctcccagtctgtgcaataaaggtcgtgaagatctctcagccaggggcc

SEQ ID NO: 9345 - protein, 551 aa, Homo sapiens; identical to SEQ ID NO: 9343

SEQ ID NO: 9346 - DNA, 3800 bp, Homo sapiens
ctgctgctactgctgctgctgcctcccccggggtcccctgagccccccggcctgacccagctgtccccgggggcgcccccgcaggcccccgacttgctctacgctgacgggctgcgcgcctacgcggccggggcttgggcgccggccgtggcgctgctgcgggaggcgctgcggagccaggcggcgctgggccgggtgcggctggattgcggggcgagctgcgcggccgatccgggcgccgcgctccccgccgtgcttctcggggccccggagcccgactccgggccgggacccacgcaggggtcctgggagcgacagcttctccgtgcagcgctccgccgcgcagactgcctgacccagtgcgcagcacggaggctgggccccgggggcgcggcgcgcttcgcgtggggagcgcgctccgggacgccttccgccgtcgggagccctacaactacctgcagagggcctattaccaggtggggagcgggccgggcagctccgagggtcccagccctcaccacgacgctgtcctactttgcgttgcccaggagtaggcggaatgctgttgcccgggccccgcacggggctggggagcgtaccgcgggcctctgcgtaggagctggctaagcgaccgcgaggacctcttgagatcgcagaggagcagccgagggggagtgcgagcagaatgggaatggggcggggaggtcgtgaggtgggacgggagcagatcgaagatggagggacagggccgcctcttcctaggaatgaagcggaggcggtgggggcgaaaccggctctcggacgggaagtgtgcgtgggtgtgtgtgtgtgtcgggggtggtggtgagtgtgaaccttcgcttggggcaggaggtagcttcggaaaggaaggagcagacggaggcaaggttggggtcctccgaggccagacctctgcgggcggggaggggacagcacgccgcagccgccggtaccgcagcagttgcctacgtggctggggaagcggggcgccggttgtactcacctcagctcagggtcctagagacctgcgggttttgctggtcgctgaggtctcccccacttccccacctcacttaagccatcacttccacctggtctcccaaattgaggtcctgaagtcctgagacccatgtcccacccaactccgacgtctttagatcccctttccctcggtgccagccttctgagagtcccaacgttctggcctctaggggatctgcagttcgggcggtgggcggttctgattggccagtcttccatgaggctctggggcacccagagtgtgtgtctggggtagggtggggaggctggccagggggcagaggtctgccccccgtcccagggctctgatgccctcctcccttcgcctcctcagttgaagaagctggatctggcagctgcggcagcacacaccttctttgtagcaaaccccatgcacctgcagatgcgggaggacatggctaagtacagacgaatgtcgggagttcggccccagagcttccgggacctggagacgcccccacactgggcagcctatgacactggcctggagctactggggcgccaggaggcaggactggcactgcccaggctagaggaggctcttcaggggagcctggcccagatggagagctgccgtgctgactgtgaggggcctgaggagcagcagggggctgaagaagaggaggatggggctgcgagccaggggggcctctatgaggccattgcaggacactggattcaggtcctgcagtgccggcaacgctgtgtgggggaaacagccacacgccctggtcgcagcttccctgtcccagacttccttcccaaccagctgaggcggctacatgaggcccatgctcaggtttcactgtcagggctgcatgggaaccatcacttcacaaggactctaatttgccctcctttggcgcctgtgacaagctcaggagatgggcttccttctgccttgctgcttctcaccttcctttattttcccccctcttgctcttctttgaactctccagctaagtgggcaatctgtcccaggctatagaaaatgtcctgagtgtcctgctcttctacccggaggatgaggctgccaagagggctctgaaccagtaccaggcccagctgggagagccgagacctggcctcggacccagagaggacatccagcgcttcatcctccgatccctgggggagaagaggcagctctactatgccatggagcacctggggaccagcttcaaggatcctgacccctggacccctgcagctctcatccctgaggcacttagagaaaagctcagagaggatcaagagaagaggccttgggaccatgagcccgtgaagccaaagcccttgacctactggaaggatgtccttctcctggagggtgtgaccttgacccaggattccaggcagctgaatgggtcggagcgggcggtgttggatgggctgctcaccccagccgagtgtggggtgctgctgcagctggctaaggtactcgggaggctgaggcaggagaagcgcctgaacccgggaggcggaggttgtggtgagctgatctcgtgccattgcactccagcgtgggcaacaagagcgaaactccatctcaaaaaaaaaaaaaaaaagatgcagctggggctggagccaggtctggctatcgtggtcgccgctcccctcacaccccccatgaacgcttcgaggggctcacggtgcttaaggctgcgcagctggcccgggctgggacagtgggcagtcagggtgctaagctgcttctggaggtgagcgagcgggtgcggaccttgacccaggcctacttctccccggaacggcccctgcatctgtccttcacccacctggtgtgccgcagcgccatagaaggagagcaagagcagcgcatggacctgagtcacccagtgcacgcagacaactgcgtcctggaccctgacacgggagagtgctggcgggagcccccagcctacacctatcgggactacagcggactcctctacctcaacgatgacttccagggtggggacctgttcttcacggagcccaacgccctcactgtcacggctcgggtgcgtcctcgctgtgggcgccttgtggccttcagctccggtgtcgagaatccccatggggtgtgggccgtgactcggggacggcgctgtgccctggcactgtggcacacgtgggcacctgagcacagggagcaggagtggatagaagccaaagaactgctgcaggagtcacaggaggaggaggaagaggaagaggaagaaatgcccagcaaagacccttccccagagccccctagccgcaggcaccagagggtccaagacaagactggaagggcacctcgggttcgggaggagctgtgagtggctgagccagctccttgaggatgtggccacttgacttgtggaaggccatcttgatgccaggacacacaggaagcccctgtgtgacatcaggagcagaacagcaagctctctgtccctgcacccccaccatcttggggacctacaagggcctggactcagaggacagtgcacaggctagcctggagctcaccaggcctggggagctgggacggggccccgctgccggacctgcagccctggacagatggggaacactgtgcctccctgaacagaaatggcaggggaggaggctgatgctttaaatgaagaggatggtggggttgggaggtataaccctgctcctctctcccagtctgtgcaataaaggtcgtgaagatctctcagccaggggcc

SEQ ID NO: 9347 - protein, 205 aa, Homo sapiens
MHLQMREDMAKYRRMSGVRPQSFRDLETPPHWAAYDTGLELLGRQEAGLALPRLEEALQGSLAQMESCRADCEGPEEQQGAEEEEDGAASQGGLYEAIAGHWIQVLQCRQRCVGETATRPGRSFPVPDFLPNQLRRLHEAHAQVSLSGLHGNHHFTRTLICPPLAPVTSSGDGLPSALLLLTFLYFPPSCSSLNSPAKWAICPRL

SEQ ID NO: 9348 - DNA, 2140 bp, Homo sapiens
ctctgatgccctcctcccttcgcctcctcagttgaagaagctggatctggcagctgcggcagcacacaccttctttgtagcaaaccccatgcacctgcagatgcgggaggacatggctaagtacagacgaatgtcgggagttcggccccagagcttccgggacctggagacgcccccacactgggcagcctatgacactggcctggagctactggggcgccaggaggcaggactggcactgcccaggctagaggaggctcttcaggggagcctggcccagatggagagctgccgtgctgactgtgaggggcctgaggagcagcagggggctgaagaagaggaggatggggctgcgagccaggggggcctctatgaggccattgcaggacactggattcaggtcctgcagtgccggcaacgctgtgtgggggaaacagccacacgccctggtcgcagcttccctgtcccagacttccttcccaaccagctgaggcggctacatgaggcccatgctcaggtgggcaatctgtcccaggctatagaaaatgtcctgagtgtcctgctcttctacccggaggatgaggctgccaagagggctctgaaccagtaccaggcccagctgggagagccgagacctggcctcggacccagagaggacatccagcgcttcatcctccgatccctgggggagaagaggcagctctactatgccatggagcacctggggaccagcttcaaggatcctgacccctggacccctgcagctctcatccctgaggcacttagagaaaagctcagagaggatcaagagaagaggccttgggaccatgagcccgtgaagccaaagcccttgacctactggaaggatgtccttctcctggagggtgtgaccttgacccaggattccaggcagctgaatgggtcggagcgggcggtgttggatgggctgctcaccccagccgagtgtggggtgctgctgcagctggctaaggatgcagctggggctggagccaggtctggctatcgtggtcgccgctcccctcacaccccccatgaacgcttcgaggggctcacggtgcttaaggctgcgcagctggcccgggctgggacagtgggcagtcagggtgctaagctgcttctggaggtgagcgagcgggtgcggaccttgacccaggcctacttctccccggaacggcccctgcatctgtccttcacccacctggtgtgccgcagcgccatagaaggagagcaagagcagcgcatggacctgagtcacccagtgcacgcagacaactgcgtcctggaccctgacacgggagagtgctggcgggagcccccagcctacacctatcgggactacagcggactcctctacctcaacgatgacttccagggtggggacctgttcttcacggagcccaacgccctcactgtcacggctcgggtgcgtcctcgctgtgggcgccttgtggccttcagctccggtgtcgagaatccccatggggtgtgggccgtgactcggggacggcgctgtgccctggcactgtggcacacgtgggcacctgagcacagggagcaggagtggatagaagccaaagaactgctgcaggagtcacaggaggaggaggaagaggaagaggaagaaatgcccagcaaagacccttccccagagccccctagccgcaggcaccagagggtccaagacaagactggaagggcacctcgggttcgggaggagctgtgagtggctgagccagctccttgaggatgtggccacttgacttgtggaaggccatcttgatgccaggacacacaggaagcccctgtgtgacatcaggagcagaacagcaagctctctgtccctgcacccccaccatcttggggacctacaagggcctggactcagaggacagtgcacaggctagcctggagctcaccaggcctggggagctgggacggggccccgctgccggacctgcagccctggacagatggggaacactgtgcctccctgaacagaaatggcaggggaggaggctgatgctttaaatgaagaggatggtggggttgggaggtataaccctgctcctctctcccagtctgtgcaataaaggtcgtgaagatctctcagccaggggcc

SEQ ID NO: 9349 - protein, 551 aa, Homo sapiens; identical to SEQ ID NO: 9343

SEQ ID NO: 9350 - DNA, 2442 bp, Homo sapiens
ttgtagcaaaccccatgcacctgcagatgcgggaggacatggctaagtacagacgaatgtcgggagttcggccccagagcttccgggacctggagacgcccccacactgggcagcctatgacactggcctggagctactggggcgccaggaggcaggactggcactgcccaggctagaggaggctcttcaggggagcctggcccagatggagagctgccgtgctgactgtgaggggcctgaggagcagcagggggctgaagaagaggaggatggggctgcgagccaggggggcctctatgaggccattgcaggacactggattcaggtcctgcagtgccggcaacgctgtgtgggggaaacagccacacgccctggtcgcagcttccctgtcccagacttccttcccaaccagctgaggcggctacatgaggcccatgctcaggtttcactgtcagggctgcatgggaaccatcacttcacaaggactctaatttgccctcctttggcgcctgtgacaagctcaggagatgggcttccttctgccttgctgcttctcaccttcctttattttcccccctcttgctcttctttgaactctccagctaagtgggcaatctgtcccaggctatagaaaatgtcctgagtgtcctgctcttctacccggaggatgaggctgccaagagggctctgaaccagtaccaggcccagctgggagagccgagacctggcctcggacccagagaggacatccagcgcttcatcctccgatccctgggggagaagaggcagctctactatgccatggagcacctggggaccagcttcaaggatcctgacccctggacccctgcagctctcatccctgaggcacttagagaaaagctcaggtaggatatgccccatggtgggaggggcttggcccgagctgggaggctgggtctggactgtcctgggcacccactgagcgcatctctcacccctgagagaggatcaagagaagaggccttgggaccatgagcccgtgaagccaaagcccttgacctactggaagggtgagttcctgggagggagaaggcaggagcctggagggtctgggggctgccagctactgctctgcctgcccttaggggatgctcagccccctctgctctgtcttttccctggcagatgtccttctcctggagggtgtgaccttgacccaggattccaggcagctgaatgggtcggagcgggcggtgttggatgggctgctcaccccagccgagtgtggggtgctgctgcagctggctaaggatgcagctggggctggagccaggtctggctatcgtggtcgccgctcccctcacaccccccatgaacgcttcgaggggctcacggtgcttaaggctgcgcagctggcccgggctgggacagtgggcagtcagggtgctaagctgcttctggaggtgagcgagcgggtgcggaccttgacccaggcctacttctccccggaacggcccctgcatctgtccttcacccacctggtgtgccgcagcgccatagaaggagagcaagagcagcgcatggacctgagtcacccagtgcacgcagacaactgcgtcctggaccctgacacgggagagtgctggcgggagcccccagcctacacctatcgggactacagcggactcctctacctcaacgatgacttccagggtggggacctgttcttcacggagcccaacgccctcactgtcacggctcgggtgcgtcctcgctgtgggcgccttgtggccttcagctccggtgtcgagaatccccatggggtgtgggccgtgactcggggacggcgctgtgccctggcactgtggcacacgtgggcacctgagcacagggagcaggagtggatagaagccaaagaactgctgcaggagtcacaggaggaggaggaagaggaagaggaagaaatgcccagcaaagacccttccccagagccccctagccgcaggcaccagagggtccaagacaagactggaagggcacctcgggttcgggaggagctgtgagtggctgagccagctccttgaggatgtggccacttgacttgtggaaggccatcttgatgccaggacacacaggaagcccctgtgtgacatcaggagcagaacagcaagctctctgtccctgcacccccaccatcttggggacctacaagggcctggactcagaggacagtgcacaggctagcctggagctcaccaggcctggggagctgggacggggccccgctgccggacctgcagccctggacagatggggaacactgtgcctccctgaacagaaatggcaggggaggaggctgatgctttaaatgaagaggatggtggggttgggaggtataaccctgctcctctctcccagtctgtgcaataaaggtcgtgaagatctctcagccaggggcc

SEQ ID NO: 9351 - protein, 304 aa, Homo sapiens
MLSPLCSVFSLADVLLLEGVTLTQDSRQLNGSERAVLDGLLTPAECGVLLQLAKDAAGAGARSGYRGRRSPHTPHERFEGLTVLKAAQLARAGTVGSQGAKLLLEVSERVRTLTQAYFSPERPLHLSFTHLVCRSAIEGEQEQRMDLSHPVHADNCVLDPDTGECWREPPAYTYRDYSGLLYLNDDFQGGDLFFTEPNALTVTARVRPRCGRLVAFSSGVENPHGVWAVTRGRRCALALWHTWAPEHREQEWIEAKELLQESQEEEEEEEEEMPSKDPSPEPPSRRHQRVQDKTGRAPRVREEL

SEQ ID NO: 9352 - DNA, 996 bp, Homo sapiens
aaacaaaaaacaacaacaaaaaacaactaaccctgtcatttgtagctgtgtgatcttgagcatgttactttacttctctgtgtctcagggctctcaattacaaaatgagcactttaatattctgtttcatgagactgttgtgaactttaaaggataaattccatttccatgaataaagctcttagaatagcccctagcagatagtaagtgctatatgagttatagttgtacttgttgttacagtttgatccactgcccagggctcctgacattgagtcccgggcttttcctacctccgtcttcctctctggaaacagaagaaacttaatgagatatttcagctctaatgtcagggattccaggggctgaccttggtgggtgatgatgcttttctggactgtcgcaggacccctggacccctgcagctctcatccctgaggcacttagagaaaagctcaggtaggatatgccccatggtgggaggggcttggcccgagctgggaggctgggtctggactgtcctgggcacccactgagcgcatctctcacccctgagagaggatcaagagaagaggccttgggaccatgagcccgtgaagccaaagcccttgacctactggaagggtgagttcctgggagggagaaggcaggagcctggagggtctgggggctgccagctactgctctgcctgcccttaggggatgctcagccccctctgctctgtcttttccctggcagatgtccttctcctggagggtgtgaccttgacccaggattccaggcagctgaatgggtcggagcgggcggtgttggatgggctgctcaccccagccgagtgtggggtgctgctgcagctggctaaggtactcgggaggctgaggcaggagaagcgcctgaacccgggaggcggaggttgtggtgagctgatctcgtgccattgcactccagcgtgggcaacaagagcgaaactccatctcaaaaaaaaaaaaaaaaag

SEQ ID NO: 9353 - protein, 97 aa, Homo sapiens
MLSPLCSVFSLADVLLLEGVTLTQDSRQLNGSERAVLDGLLTPAECGVLLQLAKVLGRLRQEKRLNPGGGGCGELISCHCTPAWATRAKLHLKKKKK

SEQ ID NO: 9354 - DNA, 864 bp, Homo sapiens
tatagttgtacttgttgttacagtttgatccactgcccagggctcctgacattgagtcccgggcttttcctacctccgtcttcctctctggaaacagaagaaacttaatgagatatttcagctctaatgtcagggattccaggggctgaccttggtgggtgatgatgcttttctggactgtcgcaggacccctggacccctgcagctctcatccctgaggcacttagagaaaagctcaggtaggatatgccccatggtgggaggggcttggcccgagctgggaggctgggtctggactgtcctgggcacccactgagcgcatctctcacccctgagagaggatcaagagaagaggccttgggaccatgagcccgtgaagccaaagcccttgacctactggaagggtgagttcctgggagggagaaggcaggagcctggagggtctgggggctgccagctactgctctgcctgcccttaggggatgctcagccccctctgctctgtcttttccctggcagatgtccttctcctggagggtgtgaccttgacccaggattccaggcagctgaatgggtcggagcgggcggtgttggatgggctgctcaccccagccgagtgtggggtgctgctgcagctggctaaggatgcagctggggctggactcaccaggcctggggagctgggacggggccccgctgccggacctgcagccctggacagatggggaacactgtgcctccctgaacagaaatggcaggggaggaggctgatgctttaaatgaagaggatggtggggttgggaggtataaccctgctcctctctcccagtctgtgcaataaaggtcgtgaagatctctcagcca

SEQ ID NO: 9355 - protein, 98 aa, Homo sapiens
MLSPLCSVFSLADVLLLEGVTLTQDSRQLNGSERAVLDGLLTPAECGVLLQLAKDAAGAGLTRPGELGRGPAAGPAALDRWGTLCLPEQKWQGRRLML

SEQ ID NO: 9356 - DNA, 2870 bp, Homo sapiens
gcgcctggagcctgtgatttgtcagggaaatctcagccacctgctcccctcatgcaaatgacccaagcccctggcagctgctccttaggcctccaagtgtaagccctgtcttccctctctgagctttgctgagacttagggccgcctgctttctctctgacccctgctttcacagcctcgagagggcaaggagggggccagaccccagcctgggagcagcgtgcgggccttccctccacttgaaatccgttgcccgcccacaataggggcagacctgtccatccttctctgtgggtcccctgtacctttctcccccaacaggatcagacccagaggcagctggttggggtttgtcgagaagaaggattatccagatcagtcctttctaatctcagctcctgcctgtaccctcccatactcaccaaaccctcttccccaccaccctgagctgaggagcacagtttgaggtactgacaatggggccatctatcacccttatatcccacctcctggcctggttgctaagtggccctgactgccaagatcatcaccatggatgggggccgggaccaggggggccactggagctgtagttgtctgctcctttgcacccctcccaaaccccaacccttaatcctcacagctttgctctaatcctgtggggcctgatgctcttatctctgcctgcagagactgaccagggaagcaccccttcaccccctcctctctcagggcttgtggtgggggctgcccctctctatggccccacactcctgcccccaaccctcctcccggctgggcccaagtctctctggaatccgtacacctccctccctccccccaccccttccccccacccctgccagctgatttcatttgcctgacgttgtggttggctctacccttccctgtcaggcccccccaaccccccgccggtcggggccaggccaggccaggccagctcctctggcagcagagcctgggcaggtgacgggcgggcgcgggcgtcgcagctgagggagtaaggaggctcccaggaaccggagctggaaacccggccgaggtccagccagagcccaagagccagagtgacccctcgacctgtcagccatgggggagatggagcaactgcgtcaggaagcggagcagctcaagaagcagattgcagtaactccagagccctacccctggggccccagaaaacagctggggacatgaggagcgtggcccagggggagggggctgggtttgctcttgagtgactagaagtgaccagggactttctaaacttggttcgcatatttgagacccccaagccccagagccccaagaccaacctgccctgaaggcccatgcacctgccacccccacctcgcccttgctcccctgatgtctgctttccctgcaggatgccaggaaagcctgtgctgacgttactctggcagagctggtgtctggcctagaggtggtgggacgagtccagatgcggacgcggcggacgttaaggggacacctggccaagatttacgccatgcactgggccactgattctaagctgctggtaagtgcctcgcaagatgggaagctgatcgtgtgggacagctacaccaccaacaaggtgcacgccatcccactgcgctcctcctgggtcatgacctgtgcctatgccccatcagggaactttgtggcatgtggggggctggacaacatgtgttccatctacaacctcaaatcccgtgagggcaatgtcaaggtcagccgggagctttctgctcacacaggttatctctcctgctgccgcttcctggatgacaacaatattgtgaccagctcgggggacaccacgtgtgccttgtgggacattgagactgggcagcagaagactgtatttgtgggacacacgggtgactgcatgagcctggctgtgtctcctgacttcaatctcttcatttcgggggcctgtgatgccagtgccaagctctgggatgtgcgagaggggacctgccgtcagactttcactggccacgagtcggacatcaacgccatctgtttcttccccaatggagaggccatctgcacgggctcggatgacgcttcctgccgcttgtttgacctgcgggcagaccaggagctgatctgcttctcccacgagagcatcatctgcggcatcacgtccgtggccttctccctcagtggccgcctactattcgctggctacgacgacttcaactgcaatgtctgggactccatgaagtctgagcgtgtgggcatcctctctggccacgataacagggtgagctgcctgggagtcacagctgacgggatggctgtggccacaggttcctgggacagcttcctcaaaatctggaactgaggaggctggagaaagggaagtggaaggcagtgaacacactcagcagccccctgcccgaccccatctcattcaggtgttctcttctatattccgggtgccattcccactaagctttctcctttgagggcagtggggagcatgggactgtgcctttgggaggcagcatcagggacacaggggcaaagaactgccccatctcctcccatggccttccctccccacagtcctcacagcctctcccttaatgagcaaggacaacctgcccctccccagccctttgcaggcccagcagacttgagtctgaggccccaggccctaggattcctcccccagagccactacctttgtccaggcctgggtggtatagggcgtttggccctgtgactatggctctggcaccactagggtcctggccctcttcttattcatgctttctcctttttctacctttttttctctcctaagacacctgcaataaagtgtagcaccctggtac

SEQ ID NO: 9357 - protein, 296 aa, Homo sapiens [sequence omitted]

SEQ ID NO: 9358 - DNA, 3146 bp, Homo sapiens
gcgcctggagcctgtgatttgtcagggaaatctcagccacctgctcccctcatgcaaatgacccaagcccctggcagctgctccttaggcctccaagtgtaagccctgtcttccctctctgagctttgctgagacttagggccgcctgctttctctctgacccctgctttcacagcctcgagagggcaaggagggggccagaccccagcctgggagcagcgtgcgggccttccctccacttgaaatccgttgcccgcccacaataggggcagacctgtccatccttctctgtgggtcccctgtacctttctcccccaacaggatcagacccagaggcagctggttggggtttgtcgagaagaaggattatccagatcagtcctttctaatctcagctcctgcctgtaccctcccatactcaccaaaccctcttccccaccaccctgagctgaggagcacagtttgaggtactgacaatggggccatctatcacccttatatcccacctcctggcctggttgctaagtggccctgactgccaagatcatcaccatggatgggggccgggaccaggggggccactggagctgtagttgtctgctcctttgcacccctcccaaaccccaacccttaatcctcacagctttgctctaatcctgtggggcctgatgctcttatctctgcctgcagagactgaccagggaagcaccccttcaccccctcctctctcagggcttgtggtgggggctgcccctctctatggccccacactcctgcccccaaccctcctcccggctgggcccaagtctctctggaatccgtacacctccctccctccccccaccccttccccccacccctgccagctgatttcatttgcctgacgttgtggttggctctacccttccctgtcaggcccccccaaccccccgccggtcggggccaggccaggccaggccagctcctctggcagcagagcctgggcaggtgacgggcgggcgcgggcgtcgcagctgagggagtaaggaggctcccaggaaccggagctggaaacccggccgaggtccagccagagcccaagagccagagtgacccctcgacctgtcagccatgggggagatggagcaactgcgtcaggaagcggagcagctcaagaagcagattgcagtaactccagagccctacccctggggccccagaaaacagctggggacatgaggagcgtggcccagggggagggggctgggtttgctcttgagtgactagaagtgaccagggactttctaaacttggttcgcatatttgagacccccaagccccagagccccaagaccaacctgccctgaaggcccatgcacctgccacccccacctcgcccttgctcccctgatgtctgctttccctgcaggatgccaggaaagcctgtgctgacgttactctggcagagctggtgtctggcctagaggtggtgggacgagtccagatgcggacgcggcggacgttaaggggacacctggccaagatttacgccatgcactgggccactgattctaagctgctggtaagtgcctcgcaagatgggaagctgatcgtgtgggacagctacaccaccaacaaggtgcacgccatcccactgcgctcctcctgggtcatgacctgtgcctatgccccatcagggaactttgtggcatgtggggggctggacaacatgtgttccatctacaacctcaaatcccgtgagggcaatgtcaaggtcagccgggagctttctgctcacacaggttatctctcctgctgccgcttcctggatgacaacaatattgtgaccagctcgggggacaccacgtgtgccttgtgggacattgagactgggcagcagaagactgtatttgtgggacacacgggtgactgcatgagcctggctgtgtctcctgacttcaatctcttcatttcgggggcctgtgatgccagtgccaagctctgggatgtgcgagaggggacctgccgtcagactttcactggccacgagtcggacatcaacgccatctgtttcttccccaatggagaggccatctgcacgggctcggatgacgcttcctgccgcttgtttgacctgcgggcagaccaggagctgatctgcttctcccacgagagcatcatctgcggcatcacgtccgtggccttctccctcagtggccgcctactattcgctggctacgacgacttcaactgcaatgtctgggactccatgaagtctgagcgtgtgggcatcctctctggccacgataacagggtgagctgcctgggagtcacagctgacgggatggctgtggccacaggttcctgggacagcttcctcaaaatctggaactgaggaggctggagaaagggaagtggaaggcagtgaacacactcagcagccccctgcccgaccccatctcattcaggtgttctcttctatattccgggtgccattcccactaagctttctcctttgagggcagtggggagcatgggactgtgcctttgggaggcagcatcagggacacaggggcaaagaactgccccatctcctcccatggccttccctccccacagtcctcacagcctctcccttaatgagcaaggacaacctgcccctccccagccctttgcaggcccagcagacttgagtctgaggccccaggccctaggattcctcccccagagccactacctttgtccaggcctgggtggtatagggcgtttggccctgtgactatggctctggcaccactagggtcctggccctcttcttattcatgctttctcctttttctacctttttttctctcctaagacacctgcaataaagtgtagcaccctggtacatctgtgatgtttgccttctactctcttctgttccaaaaagacccaggtcccatttaagggcagtaatgtgttacaggtgctgtgataaaggctgggtactggatagcttgtgggcttatgggaggaggcctgagatgggtcagggggagaaggtattcagcaggtggctgggggactgtgtgcagcagttcgctatggcctgcctgtggtgcccatgtgtttgtacgggagggttagcttgagaaggaatcagattataaaaggtcttgaatgtc

SEQ ID NO: 9359 - protein, 296 aa, Homo sapiens [sequence omitted]

SEQ ID NO: 9360 - DNA, 1923 bp, Homo sapiens; identical to SEQ ID NO: 1352

SEQ ID NO: 9361 - protein, 340 aa, Homo sapiens [sequence omitted]

SEQ ID NO: 9362 - DNA, 2200 bp, Homo sapiens
ccacaataggggcagacctgtccatccttctctgtgggtcccctgtacctttctcccccaacaggatcagacccagaggcagctggttggggtttgtcgagaagaaggattatccagatcagtcctttctaatctcagctcctgcctgtaccctcccatactcaccaaaccctcttccccaccaccctgagctgaggagcacagtttgaggcccccccaaccccccgccggtcggggccaggccaggccaggccagctcctctggcagcagagcctgggcaggtgacgggcgggcgcgggcgtcgcagctgagggagtaaggaggctcccaggaaccggagctggaaacccggccgaggtccagccagagcccaagagccagagtgacccctcgacctgtcagccatgggggagatggagcaactgcgtcaggaagcggagcagctcaagaagcagattgcagatgccaggaaagcctgtgctgacgttactctggcagagctggtgtctggcctagaggtggtgggacgagtccagatgcggacgcggcggacgttaaggggacacctggccaagatttacgccatgcactgggccactgattctaagctgctggtaagtgcctcgcaagatgggaagctgatcgtgtgggacagctacaccaccaacaaggtgcacgccatcccactgcgctcctcctgggtcatgacctgtgcctatgccccatcagggaactttgtggcatgtggggggctggacaacatgtgttccatctacaacctcaaatcccgtgagggcaatgtcaaggtcagccgggagctttctgctcacacaggttatctctcctgctgccgcttcctggatgacaacaatattgtgaccagctcgggggacaccacgtgtgccttgtgggacattgagactgggcagcagaagactgtatttgtgggacacacgggtgactgcatgagcctggctgtgtctcctgacttcaatctcttcatttcgggggcctgtgatgccagtgccaagctctgggatgtgcgagaggggacctgccgtcagactttcactggccacgagtcggacatcaacgccatctgtttcttccccaatggagaggccatctgcacgggctcggatgacgcttcctgccgcttgtttgacctgcgggcagaccaggagctgatctgcttctcccacgagagcatcatctgcggcatcacgtccgtggccttctccctcagtggccgcctactattcgctggctacgacgacttcaactgcaatgtctgggactccatgaagtctgagcgtgtgggcatcctctctggccacgataacagggtgagctgcctgggagtcacagctgacgggatggctgtggccacaggttcctgggacagcttcctcaaaatctggaactgaggaggctggagaaagggaagtggaaggcagtgaacacactcagcagccccctgcccgaccccatctcattcaggtgttctcttctatattccgggtgccattcccactaagctttctcctttgagggcagtggggagcatgggactgtgcctttgggaggcagcatcagggacacaggggcaaagaactgccccatctcctcccatggccttccctccccacagtcctcacagcctctcccttaatgagcaaggacaacctgcccctccccagccctttgcaggcccagcagacttgagtctgaggccccaggccctaggattcctcccccagagccactacctttgtccaggcctgggtggtatagggcgtttggccctgtgactatggctctggcaccactagggtcctggccctcttcttattcatgctttctcctttttctacctttttttctctcctaagacacctgcaataaagtgtagcaccctggtacatctgtgatgtttgccttctactctcttctgttccaaaaagacccaggtcccatttaagggcagtaatgtgttacaggtgctgtgataaaggctgggtactggatagcttgtgggcttatgggaggaggcctgagatgggtcagggggagaaggtattcagcaggtggctgggggactgtgtgcagcagttcgctatggcctgcctgtggtgcccatgtgtttgtacgggagggttagcttgagaaggaatcagattataaaaggtcttgaatgtc

SEQ ID NO: 9363 - protein, 340 aa, Homo sapiens [sequence omitted]

SEQ ID NO: 9364 - DNA, 2055 bp, Homo sapiens
tttgcttgttttttagaggcagggtcttgctcttgtcacccaggctggagtgcagtggcacgatcacagctcactgcagcctcaacttcctgagctcaagcgattctcctgtctcagcctctccagtagctgggattataggcatgagccaccacgcctggctaatttttgtattttttttatagagatgaggtcttgccatattgcccaggctggtttcaaactcctaggctcaagtgatctgcctgcctcagcctcctgaagtgctgggattacaggcatgagccaccatgcccagcctgcccagcctcctcagttccagattttgaggaagctgtcccaggaacctgtggccacagccatcccgtcagctgtgactcccaggcagctcaccctgttatcgtggccagagaggatgcctgaggaagagggaaaggagtcagcctgtctctccaagctgatttggaaagcagtgtgtgcatgcgtatgaagaaactgaggcccatggaggagtgacttgtgcaaggacactcagaaagtgagcaacagaattaggatttggattctgcccctggccagtgttattttcatcagcacctggcctcttgatagagaagaagccatcctatctgaccaacttcaggctagtcttagatgagccctaggctgcagtcagggccctcgggccactccagatctccttgattctgccttgattccatgtttccctgaggctgtcttgcctctcagtgggtgcccctgaaatgccaggaacccagaactgactggacagtcatggtccacagatctcctagggcagggagcagtcatggcattgggcagtggagagaggctgcttagagcaacactgagggaaaacagtcctagttgggaaccaaggggtactggattccaggggtggagtcacccagtgacaagggacagcagtaagagagtccgaaatgggagctgatggggggtacagaatggggagggagggctggggagggtccttccagctgaggaagcagcagccagggctggcccttacccacacgctcagacttcatggagtcccagacattgcagttgaagtcgtcgtagccagcgaatagtaggcggccactgagggagaaggccacggacgtgatgccgcagatgatgctctcgtgggagaagcagatcagctcctggtctgcccgcaggtcaaacaagcggcaggaagcgtcatccgagcccgtgcagatggcctctccattggggaagaactgagggcacgggtggcaagtgggtcagggatcagacctgggcagcccacagcctctcccgccctctgcctcccacctgacagctccagggcaagccgctgctctcagcctccctgcctgtccctcccttggtttggggtgagaagcagccctgccaacacataccacgtgccagtgacttccctatgcccctcgcccgctctgcactatacagcgctgcaggcaggcatcatttccacgtcgcaggcaagagcaccaaggcttgcctgcagtgacccggctagaagggcggacggaggttgtcccagactcccagactacacaagtgggctggatcagggtgtgtaagaacagggtccagtacaaatgcaaggcctggatctcacggcgagcaaatgtcagataagctcaaacggagggagagtctacagaaaactggtttgtactcttcaaaaacgtcaatgacataaaagacaaaggtgggaaaacagttccagtttaaaggtggtgacgaaaaagatatggcgaggaaaggtaatgcacgtttctggattggatcctggacagaaaaaaacatgagctattatggacatttttgaggctattggtgaaatttgaatatagactgtagactgtagtattgtgtcaatgttgagtttcctgatcttaagaatcatacagtgattatgctacagaagggctttgtttcgggaagtacttaaggggtaaagaaacatgatgtctgcaacctactttcaaaagacacagaaagaaaatgtatatctac

SEQ ID NO: 9365 - protein, 69 aa, Homo sapiens
MSHHAQPAQPPQFQILRKLSQEPVATAIPSAVTPRQLTLLSWPERMPEEEGKESACLSKLIWKAVCACV

SEQ ID NO: 9366 - DNA, 3125 bp, Homo sapiens
acaaggaaaatcagcactttcccttggtggagagctaggccctgcatggccccagcaatgcagtcacccagggcctggtgatatctgtgtcctctcaccccttctttcccagggatactgaggaatggcttgttttcttagactcctcctcagctaccaaactgggactcacagctttattgggctttctttgtgtcttgtgtgtttcttttatattaaaggaagtaattttaaatgttactttaaaaaggtatatgtaaaccttgcaccgagttttctgtgtgtagaatggcggcctagagagcttgcgttccctggcctgagcccactgatgctctgagccttctttgcacatctccctttaaccatggtgtccctatggctctgtccttggccctgctctccctgggtgtttacttctagggctttagctatcacttccctatattctggtaactttcaggtctctctctctaaccctgacctttatccagctgctttataagtacttcaaagtcagtttgtctaaaactgaatttatgatcttcccccaaaagctattcctcattccctcttccctatccttgtgaatgacagcattatctacccagccaccaaacccaaaccttggccattatctcgaatccttccctcccaatgtcctatatcctagcatttggtcactaaatcctggtgattccacattttgtttgtttgcttgttttttagaggcagggtcttgctcttgtcacccaggctggagtgcagtggcacgatcacagctcactgcagcctcaacttcctgagctcaagcgattctcctgtctcagcctctccagtagctgggattataggcatgagccaccacgcctggctaatttttgtattttttttatagagatgaggtcttgccatattgcccaggctggtttcaaactcctaggctcaagtgatctgcctgcctcagcctcctgaagtgctgggattacaggcatgagccaccatgcccagcctgcccagcctcctcagttccagattttgaggaagctgtcccaggaacctgtggccacagccatcccgtcagctgtgactcccaggcagctcaccctgttatcgtggccagagaggatgcctgaggaagagggaaaggagtcagcctgtctctccaagctgatttggaaagcagtgtgtgcatgcgtgtaagtgtatgtgtgggtgtgtgggtgtgtgtgtgtatgtgggtgtgtggggggatatgtgtgcatgtgtatgcatgtgtgggtgtgtgtacgtgtgtgtgtgcatgtgtgcttgagcacatgcatgcagggatcctagactcggtagactgggctcaacccctgaagaaggctaagagactgaaagaggattagctgtagggcagggggttctctgtcaagagctttggttgggggagggctgggatcagacagagaaaggctggaagcatctgtgtactatgaaaaaacccgagggcaccttgacaggtgctggaaaagagaaggcaaccgttcatcctatttctttgcttccagatgaagaaactgaggcccatggaggagtgacttgtgcaaggacactcagaaagtgagcaacagaattaggatttggattctgcccctggccagtgttattttcatcagcacctggcctcttgatagagaagaagccatcctatctgaccaacttcaggctagtcttagatgagccctaggctgcagtcagggccctcgggccactccagatctccttgattctgccttgattccatgtttccctgaggctgtcttgcctctcagtgggtgcccctgaaatgccaggaacccagaactgactggacagtcatggtccacagatctcctagggcagggagcagtcatggcattgggcagtggagagaggctgcttagagcaacactgagggaaaacagtcctagttgggaaccaaggggtactggattccaggggtggagtcacccagtgacaagggacagcagtaagagagtccgaaatgggagctgatggggggtacagaatggggagggagggctggggagggtccttccagctgaggaagcagcagccagggctggcccttacccacacgctcagacttcatggagtcccagacattgcagttgaagtcgtcgtagccagcgaatagtaggcggccactgagggagaaggccacggacgtgatgccgcagatgatgctctcgtgggagaagcagatcagctcctggtctgcccgcaggtcaaacaagcggcaggaagcgtcatccgagcccgtgcagatggcctctccattggggaagaactgagggcacgggtggcaagtgggtcagggatcagacctgggcagcccacagcctctcccgccctctgcctcccacctgacagctccagggcaagccgctgctctcagcctccctgcctgtccctcccttggtttggggtgagaagcagccctgccaacacataccacgtgccagtgacttccctatgcccctcgcccgctctgcactatacagcgctgcaggcaggcatcatttccacgtcgcaggcaagagcaccaaggcttgcctgcagtgacccggctagaagggcggacggaggttgtcccagactcccagactacacaagtgggctggatcagggtgtgtaagaacagggtccagtacaaatgcaaggcctggatctcacggcgagcaaatgtcagataagctcaaacggagggagagtctacagaaaactggtttgtactcttcaaaaacgtcaatgacataaaagacaaaggtgggaaaacagttccagtttaaaggtggtgacgaaaaagatatggcgaggaaaggtaatgcacgtttctggattggatcctggacagaaaaaaacatgagctattatggacatttttgaggctattggtgaaatttgaatatagactgtagactgtagtattgtgtcaatgttgagtttcctgatcttaagaatcatacagtgattatgctacagaagggctttgtttcgggaagtacttaaggggtaaagaaacatgatgtctgcaacctactttcaaaagacacagaaagaaaatgtatatctac

SEQ ID NO: 9367 - protein, 69 aa, Homo sapiens; identical to SEQ ID NO: 9365

SEQ ID NO: 9368 - DNA, 3562 bp, Homo sapiens
gcggagacgacgcgcgagaatggcagttggacggagcctgcctgccggtgctccgcccctgccccgcgcttgactgacgccaatgagaagcgctcctaaggcaattgatggttgaaagaaccaatcccactcctccagggcgggagcgcacgtagagcagctaggtgggcttcggggttgcagctgctgcggctccgcagctgctccggctccgggacccttagagtccattcgcgtgccttctattgaagagcaggaactgacggttgttttaggcctctcaattccagaaagtttcctggggacctgtccggtcggaaagtcgagggacagttgtcttggtatttgtaaagggggtatccagtgaggcggagcttgagggggttgtgtcgagtgactgatacagctgtcaaccaataaagctactatcgctcgcctcaggaaaaccatcacaactccagctggatgtgcgcataatagtgtaatcactcatgattctattttgtttaataattcgttcttgagactagacgtctcgaaagcgaagactggcactcctcagcctgccacggacggctcgcaggccgatactgaacagaagtacccttatcaaggaggcgtcacccctgggcaagcctagcatcagtccattgacacctacagtcaccatgatagacgttctcccagaccaacagcttcctttggctcgaggcgggtcttacgtggagggcctatgggaactacgtcggctcagccaatagggtcagggcagggggcgtggcgggaagtttgaaactggtaacttcgggagttgagccacgagctgttgtgcatccagaggtggaattggggcccggcattccctcctcgtcccgggctggcccttgcccccaccctgcaactcctggttgagatgggctcagccaagagcgtcccagtcacaccagcgcggcctccgccgcacaacaagcatctggctcgagtggcggacccccgttcacctagtgctggcatcctgcgcactcccatccaggtggagagctctccacagccaggcctaccagcaggggagcaactggagggtcttaaacatgcccaggactcagatccccgctctcctactcttggtattgcacggacacctatgaagaccagcagtggagaccccccaagcccactggtgaaacagctgagtgaagtatttgaaactgaagactctaaatcaaatcttcccccagagcctgttctgcccccagaggcacctttatcttctgaattggacttgcctctgggtacccagttatctgttgaggaacagatgccaccttggaaccagactgagttcccctccaaacaggtgttttccaaggaggaagcaagacagcccacagaaacccctgtggccagccagagctccgacaagccctcaagggaccctgagactcccagatcttcagcctcctcagttccagattttgaggaagctgtcccaggaacctgtggccacagccatcccgtcagctgtgactcccaggcagctcaccctgttatcgtggccagagaggatgcctgaggaagagggaaaggagtcagcctgtctctccaagctgatttggaaagcagtgtgtgcatgcgtgtaagtgtatgtgtgggtgtgtgggtgtgtgtgtgtatgtgggtgtgtggggggatatgtgtgcatgtgtatgcatgtgtgggtgtgtgtacgtgtgtgtgtgcatgtgtgcttgagcacatgcatgcagggatcctagactcggtagactgggctcaacccctgaagaaggctaagagactgaaagaggattagctgtagggcagggggttctctgtcaagagctttggttgggggagggctgggatcagacagagaaaggctggaagcatctgtgtactatgaaaaaacccgagggcaccttgacaggtgctggaaaagagaaggcaaccgttcatcctatttctttgcttccagatgaagaaactgaggcccatggaggagtgacttgtgcaaggacactcagaaagtgagcaacagaattaggatttggattctgcccctggccagtgttattttcatcagcacctggcctcttgatagagaagaagccatcctatctgaccaacttcaggctagtcttagatgagccctaggctgcagtcagggccctcgggccactccagatctccttgattctgccttgattccatgtttccctgaggctgtcttgcctctcagtgggtgcccctgaaatgccaggaacccagaactgactggacagtcatggtccacagatctcctagggcagggagcagtcatggcattgggcagtggagagaggctgcttagagcaacactgagggaaaacagtcctagttgggaaccaaggggtactggattccaggggtggagtcacccagtgacaagggacagcagtaagagagtccgaaatgggagctgatggggggtacagaatggggagggagggctggggagggtccttccagctgaggaagcagcagccagggctggcccttacccacacgctcagacttcatggagtcccagacattgcagttgaagtcgtcgtagccagcgaatagtaggcggccactgagggagaaggccacggacgtgatgccgcagatgatgctctcgtgggagaagcagatcagctcctggtctgcccgcaggtcaaacaagcggcaggaagcgtcatccgagcccgtgcagatggcctctccattggggaagaactgagggcacgggtggcaagtgggtcagggatcagacctgggcagcccacagcctctcccgccctctgcctcccacctgacagctccagggcaagccgctgctctcagcctccctgcctgtccctcccttggtttggggtgagaagcagccctgccaacacataccacgtgccagtgacttccctatgcccctcgcccgctctgcactatacagcgctgcaggcaggcatcatttccacgtcgcaggcaagagcaccaaggcttgcctgcagtgacccggctagaagggcggacggaggttgtcccagactcccagactacacaagtgggctggatcagggtgtgtaagaacagggtccagtacaaatgcaaggcctggatctcacggcgagcaaatgtcagataagctcaaacggagggagagtctacagaaaactggtttgtactcttcaaaaacgtcaatgacataaaagacaaaggtgggaaaacagttccagtttaaaggtggtgacgaaaaagatatggcgaggaaaggtaatgcacgtttctggattggatcctggacagaaaaaaacatgagctattatggacatttttgaggctattggtgaaatttgaatatagactgtagactgtagtattgtgtcaatgttgagtttcctgatcttaagaatcatacagtgattatgctacagaagggctttgtttcgggaagtacttaaggggtaaagaaacatgatgtctgcaacctactttcaaaagacacagaaagaaaatgtatatctac

SEQ ID NO: 9369 - protein, 219 aa, Homo sapiens
MGSAKSVPVTPARPPPHNKHLARVADPRSPSAGILRTPIQVESSPQPGLPAGEQLEGLKHAQDSDPRSPTLGIARTPMKTSSGDPPSPLVKQLSEVFETEDSKSNLPPEPVLPPEAPLSSELDLPLGTQLSVEEQMPPWNQTEFPSKQVFSKEEARQPTETPVASQSSDKPSRDPETPRSSASSVPDFEEAVPGTCGHSHPVSCDSQAAHPVIVAREDA

SEQ ID NO: 9370 - DNA, 1372 bp, Homo sapiens
atccagaaacgtgcattacctttcctcgccatatctttttcgtcaccacctttaaactggaactgttttcccacctttgtcttttatgtcattgacgtttttgaagagtacaaaccagttttctgtagactctccctccgtttgagcttatctgacatttgctcgccgtgagatccaggccttgcatttgtactggaccctgttcttacacaccctgatccagcccacttgtgtagtctgggagtctgggacaacctccgtccgcccttctagccgggtcactgcaggcaagccttggtgctcttgcctgcgacgtggaaatgatgcctgcctgcagcgctgtatagtgcagagcgggcgaggggcatagggaagtcactggcacgtggtatgtgttggcagggctgcttctcaccccaaaccaagggagggacaggcagggaggctgagagcagcggcttgccctggagctgtcaggtgggaggcagagggcgggagaggctgtgggctgcccaggtctgatccctgacccacttgccacccgtgccctcagttcttccccaatggagaggccatctgcacgggctcggatgacgcttcctgccgcttgtttgacctgcgggcagaccaggagctgatctgcttctcccacgagagcatcatctgcggcatcacgtccgtggccttctccctcagtggccgcctactattcgctggctacgacgacttcaactgcaatgtctgggactccatgaagtctgagcgtgtgggcatcctctctggccacgataacagggtgagctgcctgggagtcacagctgacgggatggctgtggccacaggttcctgggacagcttcctcaaaatctggaactgaggaggctggagaaagggaagtggaaggcagtgaacacactcagcagccccctgcccgaccccatctcattcaggtgttctcttctatattccgggtgccattcccactaagctttctcctttgagggcagtggggagcatgggactgtgcctttgggaggcagcatcagggacacaggggcaaagaactgccccatctcctcccatggccttccctccccacagtcctcacagcctctcccttaatgagcaaggacaacctgcccctccccagccctttgcaggcccagcagacttgagtctgaggccccaggccctaggattcctcccccagagccactacctttgtccaggcctgggtggtatagggcgtttggccctgtgactatggctctggcaccactagggtcctggccctcttcttattcatgctttctcctttttctacctttttttctctcctaagacacctgcaataaagtgtagcaccctggta

SEQ ID NO: 9371 - protein, 41 aa, Homo sapiens
MKSERVGILSGHDNRVSCLGVTADGMAVATGSWDSFLKIWN

SEQ ID NO: 9372 - DNA, 1649 bp, Homo sapiens
atccagaaacgtgcattacctttcctcgccatatctttttcgtcaccacctttaaactggaactgttttcccacctttgtcttttatgtcattgacgtttttgaagagtacaaaccagttttctgtagactctccctccgtttgagcttatctgacatttgctcgccgtgagatccaggccttgcatttgtactggaccctgttcttacacaccctgatccagcccacttgtgtagtctgggagtctgggacaacctccgtccgcccttctagccgggtcactgcaggcaagccttggtgctcttgcctgcgacgtggaaatgatgcctgcctgcagcgctgtatagtgcagagcgggcgaggggcatagggaagtcactggcacgtggtatgtgttggcagggctgcttctcaccccaaaccaagggagggacaggcagggaggctgagagcagcggcttgccctggagctgtcaggtgggaggcagagggcgggagaggctgtgggctgcccaggtctgatccctgacccacttgccacccgtgccctcagttcttccccaatggagaggccatctgcacgggctcggatgacgcttcctgccgcttgtttgacctgcgggcagaccaggagctgatctgcttctcccacgagagcatcatctgcggcatcacgtccgtggccttctccctcagtggccgcctactattcgctggctacgacgacttcaactgcaatgtctgggactccatgaagtctgagcgtgtgggcatcctctctggccacgataacagggtgagctgcctgggagtcacagctgacgggatggctgtggccacaggttcctgggacagcttcctcaaaatctggaactgaggaggctggagaaagggaagtggaaggcagtgaacacactcagcagccccctgcccgaccccatctcattcaggtgttctcttctatattccgggtgccattcccactaagctttctcctttgagggcagtggggagcatgggactgtgcctttgggaggcagcatcagggacacaggggcaaagaactgccccatctcctcccatggccttccctccccacagtcctcacagcctctcccttaatgagcaaggacaacctgcccctccccagccctttgcaggcccagcagacttgagtctgaggccccaggccctaggattcctcccccagagccactacctttgtccaggcctgggtggtatagggcgtttggccctgtgactatggctctggcaccactagggtcctggccctcttcttattcatgctttctcctttttctacctttttttctctcctaagacacctgcaataaagtgtagcaccctggtacatctgtgatgtttgccttctactctcttctgttccaaaaagacccaggtcccatttaagggcagtaatgtgttacaggtgctgtgataaaggctgggtactggatagcttgtgggcttatgggaggaggcctgagatgggtcagggggagaaggtattcagcaggtggctgggggactgtgtgcagcagttcgctatggcctgcctgtggtgcccatgtgtttgtacgggagggttagcttgagaaggaatcagattataaaaggtcttgaatgtc

SEQ ID NO: 9373 - protein, 41 aa, Homo sapiens; identical to SEQ ID NO: 9371

SEQ ID NO: 9374 - DNA, 1674 bp, Homo sapiens
gcagcctgtctgaagtgcagaggttcaggcggccaagggacccgcgccggtttccgcgggcgacctgcaaatcctgcccggggcccggcaggcgctgcgtcccggcgcgttggcagttggcgacccccctcgaatcccccctctgctgcgggctccccgtggcctttggaggctcggtctgcttagtggcctatcttggcttgtttatgctttgtgtctcatatcaggttgacgaacggacatgtattcaattttctatgaaaatccattgtcatgacttctgagctgtttgaaagagaatgttctcagaatcaagccatttggaatggacagaatgaaacagaagtcaaagagctgtctacacgtccttcccaagctataattaagatggaagctcatttgccattctgaggattggtgcaatcaagcatatgacagcaagattttggaacatttttatcagttttggaaccacagctcctccatggccaaatttctctttatgtctcaggtttcagagcatggcctaatatttcccgtacagacaggccgctccgctgcccttctgattcagctgaccactgtgcactgtagcgacgtgcaaggggtaggagtggacacattccagctcgctggggtttggaacggcacctctcattcccagagaagggattctctgtggaggctgagttggcagtgctcaagcttgccttgcggttggcacgtaggccatcagcaatcatctgagtatcaacctgccaagctgaggccgtcctggggcacagagatttattgctaacagaggaaagaaaagaaaccatttccttaattctgctttgcaggccactctcatggaaaggaactcccctgctgccctgatcagttcaatatctaactcatcatgcctgtgttcttccccagcagctcaggccggtctgctaccaggaacaggtgccaaatcagagtgtggaattttcccagcaggccccagggtgtgttgctgccaaggcaactgtggtagggttggggaataactagcgaaccacaaatccagaaaaggaagaggaggcctccttttcggcttgggccaactcaggtacaggctgtcccttgaggaaagctgtgggacacccccaacaccaagtgccaaggccagacaaggccagggcaggccaggctggaccctacgggcagcttgccagacctaggttaaccagaccaggtaaagacaactgagaatggctgcctgctaaggccacgcaggctctgcccaggaggagtaacaaaaaacagctgattgctaggcaagacctagagacctgtgttcagtgaacaatagcggtgaggatctgaagtgaggcttaaatctaactgggtaccagggaggaagcagagctgtgtgctacatggaagcaggcctggtattcagaaaagcaggaacaaagctagtaatatacaaagagcagagagtagaaacagagaggctagttggggccaatcagtggtcaatatccattggcattatctaagagaacacattcctcctcctccttgtgaagggagctctgcccatggccaacacagcacgcagtagccctagacaaatggagccctgtcatcagagttctcacctgcctttacttgttctgggccccaaaatcttaactgcaaatc

SEQ ID NO: 9375 - protein, 45 aa, Homo sapiens [sequence omitted]

SEQ ID NO: 9376 - DNA, 984 bp, Homo sapiens
gtgagaagtcatcagcctgcaacccagaagaggaccttcaccaggaaccgtatcagctgacaccgtgatcttggacttctcagcctccagaactgtaaaagcaagataaaggaacacaaaatgtactctttccctaattggataaagtgagaaaggatattagaaaaccacccaatggaactgataaaaatgagttggaacttgtgaccagcagctggatgagaggagtgtgaatcccccaaatcttatggatatagtgtgctttctttgatgttcctgccaaagtgaggctggaaagctaggaagatctgtaagacgtgtgccagcacaaagtgactacaattcaaaagttccaaaaaccttgcttgaaacaattgcaaatagctcatcattttaaaccagtgaacccaaggctgagtgtttcatcaatttacagaaaaccaagaagagaaatctgacagctatcccagtgtatgacttaccatggagatcttcaaatagaatcactttggtttgggtctcattttcatattataacacaaatttgtgtatgtgggttaagattcatatttgataggaactgctgggaattcttgcagttatatcctcaaaagacaaaataagcataaccaacagaattgtgaagcaataaagttgattatggatgaaaactgggctgaacagtcataggacatgacttgttcctttgacctaaaatgtgcttttctttccttatctacccagtgtaatggtactactctttcaaccatcttgaattcactcacacttattcgtcaaatcctgctcagctattcccactacccacaaagtgtacctttttcgtattccttactttttatacattagctcattttcccccaaacaatgcaataaagtaaaaaatattactctattttatagaaacttgcagctcagaaaggataagaaacttgcaagttgatccaaaataaatttctaaaaagc

SEQ ID NO: 9377 - protein, 57 aa, Homo sapiens
MTCSFDLKCAFLSLSTQCNGTTLSTILNSLTLIRQILLSYSHYPQSVPFSYSLLFIH

SEQ ID NO: 9378 - DNA, 483 bp, Homo sapiens
ccagactcagcctcctcagacaaaaaatcccactctgttcccaggccggagagcctcctgggctggaattgctcaagcctcagctcacagatgagtcactgtattcatttgctccacagaagaaagaatcttcaggcctctgctcttgtgagagtaatttctcttaacaccgacagtgcagcctactccatgtgctactttctctcgcaactttgagcaagaatgttagatcttttgctgggggccttcggaagccgtgagggagcatatcctgacacccacatagaagacctggtacctatgtttccacatcacaaagcaggccaacaagcacacaaggccgcagaccaaattaagaatcatctggatgagtaagaacagtttgaaagtgccagtgacgctggtacagtccgtcacatcccggtaaacaaaggtcctgctgagcggctccgaggagggcagtttgcactggcaagagtcgag

SEQ ID NO: 9379 - protein, 41 aa, Homo sapiens
MSHCIHLLHRRKNLQASALVRVISLNTDSAAYSMCYFLSQL

SEQ ID NO: 9380 - DNA, 550 bp, Homo sapiens
acaattattatcaacttgctggctataaaaggcaggggctacaaactcagtgagccaaatgcagtgcttgcttcctatctgtggtccattgcatagcagtgtgcttgggtgctgcgtaagacaattccccccaacgcctccaaaaaataggacatggtccactgcaggagttcataatctaggagtccagagagtccaggctcatcatcccttcagaagaaagaatcttcaggcctctgctcttgtgagagtaatttctcttaacaccgacagtgcagcctactccatgtgctactttctctcgcaactttgagcaagaatgttagatcttttgctgggggccttcggaagccgtgagggagcatatcctgacacccacatagaagacctggtacctatgtttccacatcacaaagcaggccaacaagcacacaaggccgcagaccaaattaagaatcatctggatgagtaagaacagtttgaaagtgccagtgacgctggtacagtccgtcacatcccggtaaacaaaggtcctgctgagcggctccga

SEQ ID NO: 9381 - protein, 84 aa, Homo sapiens
MQCLLPICGPLHSSVLGCCVRQFPPTPPKNRTWSTAGVHNLGVQRVQAHHPFRRKNLQASALVRVISLNTDSAAYSMCYFLSQL

SEQ ID NO: 9382 - DNA, 982 bp, Homo sapiens
atctcactctgagtactgtgtgtttcatctgccttcactctcacaattattatcaacttgctggctataaaaggcaggggctacaaactcagtgagccaaatgcagtgcttgcttcctatctgtggtccattgcatagcagtgtgcttgggtgctgcgtaagacaattccccccaacgcctccaaaaaataggacatggtccactgcaggagttcataatctaggagtccagagagtccaggctcatcatcccttcagaagaaagaatcttcaggcctctgctcttgtgagagtaatttctcttaacaccgacagtgcagcaatacaactaccaccacctttcaattattgagaggcaatcatctaaagcatttggcaagtgatccacttacggagccaagctaagggagctgaagagaagaggccgccgccccaacccaggtgttgttagttatctagccttttgcaaagcctcttccgtttctactctgctctttaagctatttcatgccttgaagatgtctctaccagggaaaataaagagattcagctcttcccccacctcctgcctgtctccaagacagagtggggctgatgactggaggtgggaaggactagaggaagatgccacaaaatttagcaactgggcctgaaattcaccattcacaccatcaaactggactaacaggaaagaagattatgtaaggaatggataaaatgagttaacaggaattaactccagactgtaaagatagatctatgccattctttccttgttcagtgttctgttaacttttaatatcccaaaatcaatttggatcttgctttctctgcaagaatgttaaaaaaaatacaatagaaacctgaagaaatgctcttttgtttcataaaaatataaaaatattcaattagaagagtgacttttattgtcaatttttttcctttctttgtttaaaatttttttttgtttgtttaacctcag

SEQ ID NO: 9383 - protein, 83 aa, Homo sapiens
MQCLLPICGPLHSSVLGCCVRQFPPTPPKNRTWSTAGVHNLGVQRVQAHHPFRRKNLQASALVRVISLNTDSAAIQLPPPFNY

SEQ ID NO: 9384 - DNA, 283 bp, Homo sapiens
gcagatccattgtcatgacttctgagctgtttgaaagagaatgttctcagaatcaagatgtgccagtaaatatgaattggttggatttgacttctcaatgatacacaatgattctctacctggactaacaccacagaggatgccatagaaacttctgagatttcgatgataaatataaaaagttgaagctttggggagcccaagccaggaagctggagacactgtggcagaaagtgaaagaggaagaagccattcgacgtctgtttttaaaaatgtgttctgt

SEQ ID NO: 9385 - protein, 35 aa, Homo sapiens
MFSESRCASKYELVGFDFSMIHNDSLPGLTPQRMP

SEQ ID NO: 9386 - DNA, 5936 bp, Homo sapiens
atgtcactgcgcctgggagcttgtgtccgattccgggaggtggccgtgtccgagtgcgtggttgtacatttccgaaggtctcagtttctctcactttcagcccgcgagttcctccgcttctcctttagcagggttatcaatgccgggaagagcacacacaatgaagaccaagccagctgtgaggtgctcactgtgaagaagaaggcaggggccgtgacctcaaccccaaacaggaactcatccaagagacggtcctcccttcccaatggggaagggctgcagctgaaggagaactcggaatccgagggtgtttcctgccactattggtcgctgtttgacgggcacgcggggtccggggccgcggtggtggcgtcacgcctgctgcagcaccacatcacggagcagctgcaggacatcgtggacatcctgaagaactccgccgtcctgccccctacctgcctgggggaggagcctgagaacacgcccgccaacagccggactctgacccgggcagcctccctgcgcggaggggtgggggccccgggctcccccagcacgccccccacacgcttctttaccgagaagaagattccccatgagtgcctggtcatcggagcgcttgaaagtgcattcaaggaaatggacctacagatagaacgagagaggagttcatataatatatctggtggctgcacggccctcattgtgatttgccttttggggaagctgtatgttgcaaatgctggggatagcagggccataatcatcagaaatggagaaattatccccatgtcttcagaatttacccccgagacggagcgccagcgacttcagtacctggcattcatgcagcctcacttgctgggaaatgagttcacacatttggagtttccaaggagagtacagagaaaggagcttggaaagaagatgctctacagggactttaatatgacaggctgggcatacaaaaccattgaggatgaggacttgaagttcccccttatatatggagaaggcaagaaggcccgggtaatggcaactattggagtgaccaggggacttggggaccatgacctgaaggtgcatgactccaacatctacattaaaccattcctgtcttcagctccagaggtaagaatctacgatctttcaaaatatgatcatggatcagatgatgtgctgatcttggccactgatggactctgggacgttttatcaaatgaagaagtagcagaagcaatcactcagtttcttcctaactgtgatccagatgatcctcacaggtacacactggcagctcaggacctggtgatgcgtgcccggggtgtgctgaaggacagaggatggcggatatctaatgaccgactgggctcaggagacgacatttctgtatatgtcattcctttaatacatggaaacaagctgtcatgaaaatggcccaggggattgggaggacagaggggaagaaagctgggatgcctcttggcaggacggaactgggaagtgccccagctgagttccaagtgatgcagtctcttcccagcccaagcggggagttcatggccaaaagactatgcttcaagatgaccctttggtttccatttcttctttagtaacaggtcaactcaacaagagcaaaacacaaaggctgctaccaagtgttgttgtatttcagttcctttcataggcctccgaggtggccattgactatttggggtatatatgtcatatttattttatctagagtagctggggcagccattttcaggtgtaaatggcagaggactcttcagcctgtcaagctgccagcttatctacgggttaaaaagtgctgcattggaaagtagggggtcatgcctcaaaatgtaagtaagtgcccaccttctaggaagcctgaggtttatttcagggattgccgtctgccccccgccccccttctctttttttcttctctgtttctattcttttatggcagtggtggagtgaggcagggatttttttttttttttttcgtgtttttgacattccttgaatctgttttttattccccttccacagaacaggcctgggactttccaacaccctgctaaggaagttctgtgtccaagtcccacccaggctgggttgtccccacctcctccagcccacacagcccaggcagcatccgggccagtgccctgcatgacagagggtctttgttgtgtaatgtttgttcccaagttgcattttctaaccgaatcagtgtgttttcatgaaactgagtgtttctgtggaccagtagttcctctgttgtcttcagtggtcttcctgtgtggctcaagggttctctgtgagagtctggattttcatttctggaatggctggccccatcccacttttctgtatcatggggacacatataaagcagtgtttaatagagcagtttaagaagttgcttgcatctgttggttcaccatggctcatctggggaccattttggattcatgtttcatggcttgtgactgtccccaagcccactccaaacaaagtgtaaggatcagagttctgtcaaggagcagcagttctgctctccccatcatctttgtgcaaggcccctcggggggcactttaataaaagaatttgaaatgggttgactggccattctcatgctgtgctccctgtctcttctcttctctaaagaatcatgtcccagctcctcaaggtccctctatggttccacatctgagtgttcgccacaagagcagcagcagcaggcacagtgcatgccatatctacctgctgcttctctgctgggaggaatggccaagtagattataaaactcacttctgtctcttaggcagacttgtacggccacaaaattacctagtcttcttcctgctgagctactgaggtattgccaccattttgacaactttgagtaattaaaacactcttctgacccaaaaaggaaaaaaggtcactgacgtgacccccccagcatgctagagagctaattccagttctcatatttgtttgaatttcttcccagaggagaggataggaacctctcctccagggcagtaaatcacctgcatttctggagttgtcggtattgtattcgaaaaggcctggagcccctcctgctcaggaaagaactcattccagggtgtggagacagtgccgtctggcaggtgaaatactgtgggaattcacgccaccaggtgtttgtgcaagtgttggcctgggaagaatgggacttcggccttgtcaggagttgtcttcatctgcagcacgtttcttcctcctgcagtagatcttagctaccccagatatctctatggagagaagtttgtggaaaatgctttgcttcgtggcagagtctgatgctgtaggaaaaccttcgggcatgtgacagcagtgtggtccactccctgttctgccctggcactcagagtcatgtgtaagtaggaaacctgagcaagtcttccgtggaggaccctgagctgccgtctttgggatccttcctgtgtccccaccgtctttcatttatttgctttcctgggcctctatctgggccctaccttgagcttctccagttttattcaagccaccagagtaagaatttgggtgtagatgtcacaactaccttctactcaattcaccaattcatttactgctatggcacgtctcaggaataactctagaaacctctaaatcgaaatattataaaatcttgagcacttagtcctgctggttttagttagaaaggcatccaggaattgttttcctacgcccccttgagtggaaagatcttagttagaagataaagtcaagtttgtgttcaggggatgggaggaagactataaataagatgaagaaatcaaaagtaggaaacatgatgtaaacgaagcatggcagatctgtccagcactgatattgctctataaattgagcttactcagttttggccttatttttttacccaggccccatgtcacccagtcctaaaacagtaaccgtgtctacataacgggttggcccctggtgcatccctggaaaagtcaaaggacgcacacttcgaaattctgcagaacgtatttatacatggttcagaaatcttgcgtatctgacttatagccaaatctgcttgctcgaatagcctcagaggaagtcttgtttaataaaaaccttttgatttcctagtcaagtctttatggttgtctcgaggggtgtgtggctactttaatgaaaggctttcctgctctaaatctctttgctgggctgggcctcttcagactatctggtgaaactcctttccttagaacaaactcagtccgtccatgctctgtggcattttgctagatgataaccaaagccttattcctgtagccagtgtcagcagtcagagaggtggagggtgtgttctgctgtggttatgcatacctatctgctgttcttgaggtgtaaaaggaaaggtgaaaatcgggccaggccaagtactcagctgtcttaataggatgaagccttaagcagtggaaatttcagttattttccacagtattccattttggaggatttggggtgtttactttttaaattcttgaacaacttaacctccatgaggctttgtgaagtcagctgtgaccaccctcctcttactgtgttctcagtattcattcacttccagggaagaatgacagccacagggagatggtggtgggcaagaatgagagtcccaggatccagatttagcctcagatcttccccattcaggaagggttttccatttaacaagagcactagtatgaaaacattagggacaaatctcccatgtctttgaaattcggattctcctcttgagatccccttcctcacctgccaatcaactttataaggccacaagtggtcactggttttccttccacaggtttgaggttctcagctttccttaagcgacccagcagctccgctgttttcagagtgaatatgttaagctttgatgagattctattttcagtaagttagtgcttctgggacacttggagaaagctgtgagagtcattgtctacgcaaagaacaacgaagctgatcctaaaagtgatccaatctaagaaaatggtaaaacgagctctggccacagcacagaattttatgtgaggaactcagatttttgaagacttaacaattgcagagaaaggttgcagcctgcacaccatagcccacctctctgagcagactttggttttgtgtggtgacgtggcacatgtttgtacactgggatttttcaaaggacgctacgcgagcagactgacttgcctcttctgtgagcactgtggcttttgtcagatggagtgccggtctgcagaggactgctctttcgaatccacagtgttatctgtgtaaatagctttaatttttcttctgtgtcttaggtgaagttttgttcatgtagcaaccaggtagacagtgaccaaataaggctgtaaatgtgctgtagttttctactgtgatgtacttgaaggagaacctgtgtcctctacttttctgatctcccacaagtattttgtgtttgtttcctgagtcctgaggttattattttactcctgttttgcccccagttttctttgttttttttctggagacccagggaggcccatggtggagatcatttgtaaggaatggatcatggtctgggtttccaaaactaccctagtacagtgaatgagagaaatctgcctggaaattgtttcagaaccatgtacctttatgctttgtgattgtgaaacattgacttttttgtaaccccaaaatgaaaactgtttagtaaaggggatctattttgtgtgttttgaaacttaggtgcaatgtcccctggaaaaagctaaagaaatgtatatgttcaatgacattttaaaataaaatattatatatatgtatatacgacatattcagcaa

SEQ ID NO: 9387 - protein, 476 aa, Homo sapiens
MSLRLGACVRFREVAVSECVVVHFRRSQFLSLSAREFLRFSFSRVINAGKSTHNEDQASCEVLTVKKKAGAVTSTPNRNSSKRRSSLPNGEGLQLKENSESEGVSCHYWSLFDGHAGSGAAVVASRLLQHHITEQLQDIVDILKNSAVLPPTCLGEEPENTPANSRTLTRAASLRGGVGAPGSPSTPPTRFFTEKKIPHECLVIGALESAFKEMDLQIERERSSYNISGGCTALIVICLLGKLYVANAGDSRAIIIRNGEIIPMSSEFTPETERQRLQYLAFMQPHLLGNEFTHLEFPRRVQRKELGKKMLYRDFNMTGWAYKTIEDEDLKFPLIYGEGKKARVMATIGVTRGLGDHDLKVHDSNIYIKPFLSSAPEVRIYDLSKYDHGSDDVLILATDGLWDVLSNEEVAEAITQFLPNCDPDDPHRYTLAAQDLVMRARGVLKDRGWRISNDRLGSGDDISVYVIPLIHGNKLS

SEQ ID NO: 9388 - DNA, 6266 bp, Homo sapiens
ttatcacatgacccggcggcagtagccgtggcagcagccgcggcggctccgcgagctcgccgggtgggctcagttcagcgcacgccggagccgagcgcagggggcggggaagggacctgctgcagctgcagccgcctgggcgctcctggagcgcgcggtgactcccccggtcggcccgctccatgcagctccgttgcggaagtgtagcggggggaggcggcggccaccgcggcactaagcacgagaggccggggctcggccccctgcagcactaggctctgggagccgcgcgcggcgcgtcccagtggcccgactcgccgtgcgcccggcgcccaccgcagcctgcatgccccgcgctgcgccttgcccggcccccgccgcctcctgctcgcaccgctgcagccgggcgccggagtaatatgctcactcgagtgaaatctgccgtggccaatttcatgggcggcatcatggctggcagctcaggctccgagcacggcggcggcagctgcggaggctcggacctgcccctgcgtttcccctacgggcggccagagttcctggggctgtctcaggacgaggtggagtgcagcgccgaccacatcgcccgccccatcctcatcctcaaggagactcggcggctgccctgggccactggctacgcagaggttatcaatgccgggaagagcacacacaatgaagaccaagccagctgtgaggtgctcactgtgaagaagaaggcaggggccgtgacctcaaccccaaacaggaactcatccaagagacggtcctcccttcccaatggggaagggctgcagctgaaggagaactcggaatccgagggtgtttcctgccactattggtcgctgtttgacgggctcccccagcacgccccccacacgcttctttaccgagaagaagattccccatgagtgcctggtcatcggagcgcttgaaagtgcattcaaggaaatggacctacagatagaacgagagaggagttcatataatatatctggtggctgcacggccctcattgtgatttgccttttggggaagctgtatgttgcaaatgctggggatagcagggccataatcatcagaaatggagaaattatccccatgtcttcagaatttacccccgagacggagcgccagcgacttcagtacctggcattcatgcagcctcacttgctgggaaatgagttcacacatttggagtttccaaggagagtacagagaaaggagcttggaaagaagatgctctacagggactttaatatgacaggctgggcatacaaaaccattgaggatgaggacttgaagttcccccttatatatggagaaggcaagaaggcccgggtaatggcaactattggagtgaccaggggacttggggaccatgacctgaaggtgcatgactccaacatctacattaaaccattcctgtcttcagctccagaggtaagaatctacgatctttcaaaatatgatcatggatcagatgatgtgctgatcttggccactgatggactctgggacgttttatcaaatgaagaagtagcagaagcaatcactcagtttcttcctaactgtgatccagatgatcctcacaggtacacactggcagctcaggacctggtgatgcgtgcccggggtgtgctgaaggacagaggatggcggatatctaatgaccgactgggctcaggagacgacatttctgtatatgtcattcctttaatacatggaaacaagctgtcatgaaaatggcccaggggattgggaggacagaggggaagaaagctgggatgcctcttggcaggacggaactgggaagtgccccagctgagttccaagtgatgcagtctcttcccagcccaagcggggagttcatggccaaaagactatgcttcaagatgaccctttggtttccatttcttctttagtaacaggtcaactcaacaagagcaaaacacaaaggctgctaccaagtgttgttgtatttcagttcctttcataggcctccgaggtggccattgactatttggggtatatatgtcatatttattttatctagagtagctggggcagccattttcaggtgtaaatggcagaggactcttcagcctgtcaagctgccagcttatctacgggttaaaaagtgctgcattggaaagtagggggtcatgcctcaaaatgtaagtaagtgcccaccttctaggaagcctgaggtttatttcagggattgccgtctgccccccgccccccttctctttttttcttctctgtttctattcttttatggcagtggtggagtgaggcagggatttttttttttttttttcgtgtttttgacattccttgaatctgttttttattccccttccacagaacaggcctgggactttccaacaccctgctaaggaagttctgtgtccaagtcccacccaggctgggttgtccccacctcctccagcccacacagcccaggcagcatccgggccagtgccctgcatgacagagggtctttgttgtgtaatgtttgttcccaagttgcattttctaaccgaatcagtgtgttttcatgaaactgagtgtttctgtggaccagtagttcctctgttgtcttcagtggtcttcctgtgtggctcaagggttctctgtgagagtctggattttcatttctggaatggctggccccatcccacttttctgtatcatggggacacatataaagcagtgtttaatagagcagtttaagaagttgcttgcatctgttggttcaccatggctcatctggggaccattttggattcatgtttcatggcttgtgactgtccccaagcccactccaaacaaagtgtaaggatcagagttctgtcaaggagcagcagttctgctctccccatcatctttgtgcaaggcccctcggggggcactttaataaaagaatttgaaatgggttgactggccattctcatgctgtgctccctgtctcttctcttctctaaagaatcatgtcccagctcctcaaggtccctctatggttccacatctgagtgttcgccacaagagcagcagcagcaggcacagtgcatgccatatctacctgctgcttctctgctgggaggaatggccaagtagattataaaactcacttctgtctcttaggcagacttgtacggccacaaaattacctagtcttcttcctgctgagctactgaggtattgccaccattttgacaactttgagtaattaaaacactcttctgacccaaaaaggaaaaaaggtcactgacgtgacccccccagcatgctagagagctaattccagttctcatatttgtttgaatttcttcccagaggagaggataggaacctctcctccagggcagtaaatcacctgcatttctggagttgtcggtattgtattcgaaaaggcctggagcccctcctgctcaggaaagaactcattccagggtgtggagacagtgccgtctggcaggtgaaatactgtgggaattcacgccaccaggtgtttgtgcaagtgttggcctgggaagaatgggacttcggccttgtcaggagttgtcttcatctgcagcacgtttcttcctcctgcagtagatcttagctaccccagatatctctatggagagaagtttgtggaaaatgctttgcttcgtggcagagtctgatgctgtaggaaaaccttcgggcatgtgacagcagtgtggtccactccctgttctgccctggcactcagagtcatgtgtaagtaggaaacctgagcaagtcttccgtggaggaccctgagctgccgtctttgggatccttcctgtgtccccaccgtctttcatttatttgctttcctgggcctctatctgggccctaccttgagcttctccagttttattcaagccaccagagtaagaatttgggtgtagatgtcacaactaccttctactcaattcaccaattcatttactgctatggcacgtctcaggaataactctagaaacctctaaatcgaaatattataaaatcttgagcacttagtcctgctggttttagttagaaaggcatccaggaattgttttcctacgcccccttgagtggaaagatcttagttagaagataaagtcaagtttgtgttcaggggatgggaggaagactataaataagatgaagaaatcaaaagtaggaaacatgatgtaaacgaagcatggcagatctgtccagcactgatattgctctataaattgagcttactcagttttggccttatttttttacccaggccccatgtcacccagtcctaaaacagtaaccgtgtctacataacgggttggcccctggtgcatccctggaaaagtcaaaggacgcacacttcgaaattctgcagaacgtatttatacatggttcagaaatcttgcgtatctgacttatagccaaatctgcttgctcgaatagcctcagaggaagtcttgtttaataaaaaccttttgatttcctagtcaagtctttatggttgtctcgaggggtgtgtggctactttaatgaaaggctttcctgctctaaatctctttgctgggctgggcctcttcagactatctggtgaaactcctttccttagaacaaactcagtccgtccatgctctgtggcattttgctagatgataaccaaagccttattcctgtagccagtgtcagcagtcagagaggtggagggtgtgttctgctgtggttatgcatacctatctgctgttcttgaggtgtaaaaggaaaggtgaaaatcgggccaggccaagtactcagctgtcttaataggatgaagccttaagcagtggaaatttcagttattttccacagtattccattttggaggatttggggtgtttactttttaaattcttgaacaacttaacctccatgaggctttgtgaagtcagctgtgaccaccctcctcttactgtgttctcagtattcattcacttccagggaagaatgacagccacagggagatggtggtgggcaagaatgagagtcccaggatccagatttagcctcagatcttccccattcaggaagggttttccatttaacaagagcactagtatgaaaacattagggacaaatctcccatgtctttgaaattcggattctcctcttgagatccccttcctcacctgccaatcaactttataaggccacaagtggtcactggttttccttccacaggtttgaggttctcagctttccttaagcgacccagcagctccgctgttttcagagtgaatatgttaagctttgatgagattctattttcagtaagttagtgcttctgggacacttggagaaagctgtgagagtcattgtctacgcaaagaacaacgaagctgatcctaaaagtgatccaatctaagaaaatggtaaaacgagctctggccacagcacagaattttatgtgaggaactcagatttttgaagacttaacaattgcagagaaaggttgcagcctgcacaccatagcccacctctctgagcagactttggttttgtgtggtgacgtggcacatgtttgtacactgggatttttcaaaggacgctacgcgagcagactgacttgcctcttctgtgagcactgtggcttttgtcagatggagtgccggtctgcagaggactgctctttcgaatccacagtgttatctgtgtaaatagctttaatttttcttctgtgtcttaggtgaagttttgttcatgtagcaaccaggtagacagtgaccaaataaggctgtaaatgtgctgtagttttctactgtgatgtacttgaaggagaacctgtgtcctctacttttctgatctcccacaagtattttgtgtttgtttcctgagtcctgaggttattattttactcctgttttgcccccagttttctttgttttttttctggagacccagggaggcccatggtggagatcatttgtaaggaatggatcatggtctgggtttccaaaactaccctagtacagtgaatgagagaaatctgcctggaaattgtttcagaaccatgtacctttatgctttgtgattgtgaaacattgacttttttgtaaccccaaaatgaaaactgtttagtaaaggggatctattttgtgtgttttgaaacttaggtgcaatgtcccctggaaaaagctaaagaaatgtatatgttcaatgacattttaaaataaaatattatatatatgtatatacgacatattcagcaa

SEQ ID NO: 9389 - protein, 263 aa, Homo sapiens
MDLQIERERSSYNISGGCTALIVICLLGKLYVANAGDSRAIIIRNGEIIPMSSEFTPETERQRLQYLAFMQPHLLGNEFTHLEFPRRVQRKELGKKMLYRDFNMTGWAYKTIEDEDLKFPLIYGEGKKARVMATIGVTRGLGDHDLKVHDSNIYIKPFLSSAPEVRIYDLSKYDHGSDDVLILATDGLWDVLSNEEVAEAITQFLPNCDPDDPHRYTLAAQDLVMRARGVLKDRGWRISNDRLGSGDDISVYVIPLIHGNKLS

SEQ ID NO: 9390 - DNA, 1047 bp, Homo sapiens; identical to SEQ ID NO: 1354

SEQ ID NO: 9391 - protein, 171 aa, Homo sapiens; identical to SEQ ID NO: 1355

SEQ ID NO: 9392 - DNA, 1164 bp, Homo sapiens
cacaagcagaatcttcagaacaggttctccttccccagtcaccagttgctcgagttagaattgtctgcaatggccgccctgcagaaatctgtgagctctttccttatggggaccctggccaccagctgcctccttctcttggccctcttggtacagggaggagcagctgcgcccatcagctcccactgcaggcttgacaagtccaacttccagcagccctatatcaccaaccgcaccttcatgctggctaaggaggctagcttggctgataacaacacagacgttcgtctcattggggagaaactgttccacggagtcagtatgagtgagcgctgctatctgatgaagcaggtgctgaacttcacccttgaagaagtgctgttccctcaatctgataggttccagccttatatgcaggaggtggtgcccttcctggccaggctcagcaacaggctaagcacatgtcatattgaaggtgatgacctgcatatccagaggaatgtgcaaaagctgaaggacacagtgaaaaagcttggagagagtggagagatcaaagcaattggagaactggatttgctgtttatgtctctgagaaatgcctgcatttgaccagagcaaagctgaaaaatgaataactaaccccctttccctgctagaaataacaattagatgccccaaagcgattttttttaaccaaaaggaagatgggaagccaaactccatcatgatgggtggattccaaatgaacccctgcgttagttacaaaggaaaccaatgccacttttgtttataagaccagaaggtagactttctaagcatagatatttattgataacatttcattgtaactggtgttctatacacagaaaacaatttattttttaaataattgtctttttccataaaaaagattactttccattcctttaggggaaaaaacccctaaatagcttcatgtttccataatcagtactttatatttataaatgtatttattattattataagactgcattttatttatatcattttattaatatggatttatttatagaaacatcattcgatattgctacttgagtgtaaggctaatattgatatttatgacaataattatagagctataacatgtttatttgacctcaataaacacttggatatcct

SEQ ID NO: 9393 - protein, 179 aa, Homo sapiens; identical to SEQ ID NO: 1357

SEQ ID NO: 9394 - DNA, 2509 bp, Homo sapiens
agttaactgtcggagtagcgggggctccggcgccgggcgacatgccggtgcgcttcaaggggctgagtgaataccagaggaacttcctgtggaaaaagtcttatttgtccgagtcttgtaattcctccgtggggcgaaagtacccatgggctggacttagatcagatcaattagttggatagacttctgcgtaagaaagctggattgactgttgttccttcatataatgccttgagaaattctgaatatcaaaggcagtttgtttggaagacttctaaagaaactgctccagcttttgcagccaatcaggttttccacaataaaagccagtttgttccaccattcaaaggtaactcagtcatccatgaaactgaatacaaaagaaatttcaagggtttatctccagtgaaagaaccaaaattaagaaatgatttgagagaaaacagaaatcttgaaacagtgtctcctgaaaggaagagtaataaaatagacgatcgtttaaaattggaagcagagatggaattaaaagacttacaccagcctaaaaggaagcttactccttggaaacatcaaaggcttgggaaggtgaattccgaatatagagcaaaatttctgagcccagctcagtatttatataaagctggggcttggacacatgtaaagggaaacatgccaaatcaggttaaagaactccgagaaaaggctgagttttataggaagcgagttcaggggacgcatttttctcgggaccatctgaatcagattttatctgatagcaactgctgttgggatgtctcctcaaccacaagctcagaaggaaccgttagtagcaacatcagagcattagatcttgctggagatcctacaagccataagactttgcagaaatgtccttctacagaaccagaagaaaaaggaaatatcgtggaagaacagccccagaaaaataccacggagaaattgggtgtgtcagctcccaccatacccgttagaaggcggctggcttgggatacagagaacacaagtgaagacgtacagaaacagcccggggagaaagaggaggaggacgacaatgaagaggaaggggacaggaaaacgggcaagcaggcttttatgggagagcaagagaagttggatgtacgtgagaaatctaaggcagataagatgaaagaagggtcagattcttctgtatcctcagaaaaaggaggccggcttcctactcccaagctgagagaacttggtggaatccagaggactcatcatgatctcactactccagctgttggtggtgctgttttagtgtctccatctaagatgaagcctccagccccagaacagaggaaaagaatgacctctcaggattgtttagaaacttcaaagaatgattttactaagaaagaaagtcgtgctgtatccctactgacttctccagctgctggtataaaaacagttgatcctctgcctttgcgggaagattctgaagacaatatccacaaatttgctgaggcaactcttccagtttcaaaaattccaaaatacccaacaaatccccctggacagttgccttctccaccacatgttccatcctactggcatccctctcgacgaattcagggctctcttagagatccagagtttcagcacaatgtgggaaaagcaaggatgaacaatttgcagttacctcaacatgaagcctttaatgatgaagatgaggacagattgtctgagatttctgctcgctctgcagcttctagtctccgggcttttcaaactctggcacgagctaagaaaaggaaggagaatttctggggtaaaacataaacctagctgagttgcctttatctaaggaaacattggcataatttttctttattgcttactgtgttaaaattttttgagtgaagtttttcctaacgttttctactttgaaatatttaatttccaatagaacagtttacttggaaattgttaacataggcttatacaaatttaacttttaaagaattctttttacatctatcccagagtacaaagacctagattattgaattcttcacatgtaactttcgtaataggtgtcatggatagattttcacctatccagagagtattctaaaaaaataaacaaagtgaagtaaaagttaagatcccagtgtgaagtatatattcccctaagatttgatatatgtatctttataattgatgatgttgtaaaatgaatttgttgttcctttaacctttgctgtagtgtttctttttattttagttccttctatacatgtttgcagtgttaagataattgtactttgaaaacaccagctgtatatatttttcttatttatgtaacaaagtttgctgaaagatatgtatatttttgatctttgagtgtattctatttgtgtaaggactttggcttacatttgaataatgtctagattttgaaaaattacctgtataatggagaattaaaactttgtagacattttgaaataaaaatggatcaagtgcg

SEQ ID NO: 9395 - protein, 434 aa, Homo sapiens
MELKDLHQPKRKLTPWKHQRLGKVNSEYRAKFLSPAQYLYKAGAWTHVKGNMPNQVKELREKAEFYRKRVQGTHFSRDHLNQILSDSNCCWDVSSTTSSEGTVSSNIRALDLAGDPTSHKTLQKCPSTEPEEKGNIVEEQPQKNTTEKLGVSAPTIPVRRRLAWDTENTSEDVQKQPGEKEEEDDNEEEGDRKTGKQAFMGEQEKLDVREKSKADKMKEGSDSSVSSEKGGRLPTPKLRELGGIQRTHHDLTTPAVGGAVLVSPSKMKPPAPEQRKRMTSQDCLETSKNDFTKKESRAVSLLTSPAAGIKTVDPLPLREDSEDNIHKFAEATLPVSKIPKYPTNPPGQLPSPPHVPSYWHPSRRIQGSLRDPEFQHNVGKARMNNLQLPQHEAFNDEDEDRLSEISARSAASSLRAFQTLARAKKRKENFWGKT

SEQ ID NO: 9396 - DNA, 2969 bp, Homo sapiens
aagcgcggagtgcgccggcgcgtagtcggggacgccgggccgaggctttgctagggaacactgttatcgccccgccccctcggagctttttctccagttaactgtcggagtagcgggggctccggcgccgggcgacatgccggtgcgcttcaaggggctgagtgaataccagaggaacttcctgtggaaaaagtcttatttgtccgagtcttgtaattcctccgtggggcgaaagtacccatgggctggacttagatcagatcaattaggcatcacgaaagagccaagttttatttcaaaaagaagagtcccttaccatgacccacagatttcaaaatctctggagtggaatggagctatctcagagagcaatgtggttgcatcaccagaaccagaagccccggaaacaccaaaatcacaagaagcagaacaaaaggatgttactcaagaaagagttcactcactagaagcttccagggttcccaaaagaaccagatctcactctgcagactccagagctgaaggggcttcagatgtggaaaataatgagggtgtaacaaaccatacaccagttaatgaaaatgtggaactggaacattctaccaaggttctttcagaaaatgtagataatgggttggatagacttctgcgtaagaaagctggattgactgttgttccttcatataatgccttgagaaattctgaatatcaaaggcagtttgtttggaagacttctaaagaaactgctccagcttttgcagccaatcaggttttccacaataaaagccagtttgttccaccattcaaaggtaactcagtcatccatgaaactgaatacaaaagaaatttcaagggtttatctccagtgaaagaaccaaaattaagaaatgatttgagagaaaacagaaatcttgaaacagtgtctcctgaaaggaagagtaataaaatagacgatcgtttaaaattggaagcagagatggaattaaaagacttacaccagcctaaaaggaagcttactccttggaaacatcaaaggcttgggaaggtgaattccgaatatagagcaaaatttctgagcccagctcagtatttatataaagctggggcttggacacatgtaaagggaaacatgccaaatcaggttaaagaactccgagaaaaggctgagttttataggaagcgagttcaggggacgcatttttctcgggaccatctgaatcagattttatctgatagcaactgctgttgggatgtctcctcaaccacaagctcagaaggaaccgttagtagcaacatcagagcattagatcttgctggagatcctacaagccataagactttgcagaaatgtccttctacagaaccagaagaaaaaggaaatatcgtggaagaacagccccagaaaaataccacggagaaattgggtgtgtcagctcccaccatacccgttagaaggcggctggcttgggatacagagaacacaagtgaagacgtacagaaacagcccggggagaaagaggaggaggacgacaatgaagaggaaggggacaggaaaacgggcaagcaggcttttatgggagagcaagagaagttggatgtacgtgagaaatctaaggcagataagatgaaagaagggtcagattcttctgtatcctcagaaaaaggaggccggcttcctactcccaagctgagagaacttggtggaatccagaggactcatcatgatctcactactccagctgttggtggtgctgttttagtgtctccatctaagatgaagcctccagccccagaacagaggaaaagaatgacctctcaggattgtttagaaacttcaaagaatgattttactaagaaagaaagtcgtgctgtatccctactgacttctccagctgctggtataaaaacagttgatcctctgcctttgcgggaagattctgaagacaatatccacaaatttgctgaggcaactcttccagtttcaaaaattccaaaatacccaacaaatccccctggacagttgccttctccaccacatgttccatcctactggcatccctctcgacgaattcagggctctcttagagatccagagtttcagcacaatgtgggaaaagcaaggatgaacaatttgcagttacctcaacatgaagcctttaatgatgaagatgaggacagattgtctgagatttctgctcgctctgcagcttctagtctccgggcttttcaaactctggcacgagctaagaaaaggaaggagaatttctggggtaaaacataaacctagctgagttgcctttatctaaggaaacattggcataatttttctttattgcttactgtgttaaaattttttgagtgaagtttttcctaacgttttctactttgaaatatttaatttccaatagaacagtttacttggaaattgttaacataggcttatacaaatttaacttttaaagaattctttttacatctatcccagagtacaaagacctagattattgaattcttcacatgtaactttcgtaataggtgtcatggatagattttcacctatccagagagtattctaaaaaaataaacaaagtgaagtaaaagttaagatcccagtgtgaagtatatattcccctaagatttgatatatgtatctttataattgatgatgttgtaaaatgaatttgttgttcctttaacctttgctgtagtgtttctttttattttagttccttctatacatgtttgcagtgttaagataattgtactttgaaaacaccagctgtatatatttttcttatttatgtaacaaagtttgctgaaagatatgtatatttttgatctttgagtgtattctatttgtgtaaggactttggcttacatttgaataatgtctagattttgaaaaattacctgtataatggagaattaaaactttgtagacattttgaaataaaaatggatcaagtgcg

SEQ ID NO: 9397 - protein, 714 aa, Homo sapiens
MPVRFKGLSEYQRNFLWKKSYLSESCNSSVGRKYPWAGLRSDQLGITKEPSFISKRRVPYHDPQISKSLEWNGAISESNVVASPEPEAPETPKSQEAEQKDVTQERVHSLEASRVPKRTRSHSADSRAEGASDVENNEGVTNHTPVNENVELEHSTKVLSENVDNGLDRLLRKKAGLTVVPSYNALRNSEYQRQFVWKTSKETAPAFAANQVFHNKSQFVPPFKGNSVIHETEYKRNFKGLSPVKEPKLRNDLRENRNLETVSPERKSNKIDDRLKLEAEMELKDLHQPKRKLTPWKHQRLGKVNSEYRAKFLSPAQYLYKAGAWTHVKGNMPNQVKELREKAEFYRKRVQGTHFSRDHLNQILSDSNCCWDVSSTTSSEGTVSSNIRALDLAGDPTSHKTLQKCPSTEPEEKGNIVEEQPQKNTTEKLGVSAPTIPVRRRLAWDTENTSEDVQKQPGEKEEEDDNEEEGDRKTGKQAFMGEQEKLDVREKSKADKMKEGSDSSVSSEKGGRLPTPKLRELGGIQRTHHDLTTPAVGGAVLVSPSKMKPPAPEQRKRMTSQDCLETSKNDFTKKESRAVSLLTSPAAGIKTVDPLPLREDSEDNIHKFAEATLPVSKIPKYPTNPPGQLPSPPHVPSYWHPSRRIQGSLRDPEFQHNVGKARMNNLQLPQHEAFNDEDEDRLSEISARSAASSLRAFQTLARAKKRKENFWGKT

SEQ ID NO: 9398 - DNA, 1033 bp, Homo sapiens
atccagcattacaaagcagtaatataacttgactgagttccccatcttttccatttgctttccttgtaatcagtggtaatatgccgtgaaatagaaaccatattgtgaagtagtaagtataaaaggaaatatttaacaatagaagtgtagtaattgctcagaacattttctttgccttaataaaatacgctgaaaataagccaagggaagaaaagctaaacaaattgaacatattgggtattcagaaatgtgaagaattttctattaaggcaggaagaaaaaaaatcatgtcagggaggaagaaaaaaacctgtagaactgacaacagagttgccttaaagctaatgtctatgtcatatgaaaatatgccaacgtttattttgattataagctatattttgattacaaaactgttattcaaaacatagtaatgagtacataaagttgacctttggatgttaataatatatgtgaaatgaaattaaaatcatatataactttgctatttttttgtcctgtaattcaactttatgttttgttaagtaattgaagaccaaagttccgcatatttaatcaacaaaactaaactaaaataatttttgttttaaggttttccacaataaaagccagtttgttccaccattcaaaggtaactcagtcatccatgaaactgaatacaaaagaaatttcaagggtttatctccagtgaaagaaccaaaattaagaaatgatttgagagaaaacagaaatcttgaaacagtgtctcctgaaaggaagagtaataaaatagacgatcgtttaaaattggaagcagagatggaattaaaagacttacaccagcctaaaaggaagcttactccttggaaacatcaaaggcttgggtatgtattttaataggaaaatatggtatttcaatgattaacatggtgaaatatttactttcatttcatttctattaggaaggtgaattccgaatatagagcaaaatttctgagcccagctcagtatttatataaagctggggcttggacac

SEQ ID NO: 9399 - protein, 46 aa, Homo sapiens
MSGRKKKTCRTDNRVALKLMSMSYENMPTFILIISYILITKLLFKT

SEQ ID NO: 9400 - DNA, 2716 bp, Homo sapiens
acactgttatcgccccgccccctcggagctttttctccagttaactgtcggagtagcgggggctccggcgccgggcgacatgccggtgcgcttcaaggggctgagtgaataccagaggaacttcctgtggaaaaagtcttatttgtccgagtcttgtaattcctccgtggggcgaaagtacccatgggctggacttagatcagatcaattaggaaatcaaggcagatgtagaaccaagatccagcacagtgacatctcatcccttctcatcttggtctgctccacataagagaagctttgtgaaaagttccaaattttgacagtaccagggcccattgttctgttaagtagcacaggaaagtaattagaaacgaggcagcatgtactgcctggcctgccaggtctatcacgttgcaattctagtgacttttgttaggataactggaacattttgtgaccccctgatttttaattttttgttatggtcaaatttttaatgcttttaaaagcaaaattaaatattttatgttgaaaagctgtacttttaaaatcctataatctgaaggatattgtgtgtatatataggtacatatatctgaactaaatttaaaatttcatttctcctccacaagtgttcttaaaagttgtctttgtaactttttgctttagtagctactatttttgtataccgtgttttgtaggcatcacgaaagagccaagttttatttcaaaaagaagagtcccttaccatgacccacagatttcaaaatctctggagtggaatggagctatctcagagagcaatgtggttgcatcaccagaaccagaagccccggaaacaccaaaatcacaagaagcagaacaaaaggatgttactcaagaaagagttcactcactagaagcttccagggttcccaaaagaaccagatctcactctgcagactccagagctgaaggggcttcagatgtggaaaataatgagggtgtaacaaaccatacaccagttaatgaaaatgtggaactggaacattctaccaaggttctttcagaaaatgtagataatggggtaggcatattcactgcatttcttttcaaaagcatagaattcttcattggtttcattgtcatttctgtaatattacattttgtgtttcagaattttccattgttgttttcttgtctaatgtctataagaatagttgataacaggctgttgactttagttattgtgaattagttctattctgactactcgctattttgtagtagttgtactatgataatctgtttattggatggacctcctgcgtctggattttattcatcatatattagcacctgagtcctaagggagagatcaagttgagacagagaagggaagtaggcccttacttctggcagggtgctgagctgacttctacctagccccttttcagtttcttatcgtgtacaagaagacaaacagaaattcaattgatgaaatgcaaaaggaaggagagctctggctgtctctcagagatcttgcatttctgctctcttatgtcacagctggcctgcagcaggtccctgtgagcacataagcagaggctgcaggaacttgtgtggggatctcaatgctttccacatttctttctccattctgttccactgctcttctctggttcatgtccaccactgactgggaccctgaagaggcatttcagagtgttggagaagaatctgtagcttgttgaaaaagctgggggtgaaagggaacaaggaaggtgatgtgtgagtctggcaggcaggagaaggggtgttcatagaagcagtgtgcaggtgaggcaaagtgctgggactttttggtaatagatttaattatgaatgattagtaggaaaggactgagagtattatatttttcctgggatgcctaatagtcctttgatagaaaggaattttaaatagtttgacacttgaaaaaagatactatttataagttgaagaaagtttgctgtaccacaatgcgcatgtagttaacaattttgcactgtagatttaacattttgttaagaggatagatttcatgttatgcattttttaccacaatttttaaaaagtttgaatagaaatttttaatgtctttgagtggattttgttttttgaacagttggatagacttctgcgtaagaaagctggattgactgttgttccttcatataatgccttgagaaattctgaatatcaaaggcagtttgtttggaagacttctaaagaaactgctccagcttttgcagccaatcaggtagcttaatggatgtaatacatttctgagtaccattatcttatctagtaatgtagatttacatagaattaagagttgaaagaaattaagtacttaagtagcctggaggtaggttctagaaaaccaaaatgagagttttgctaaaatcatcctattacttatgatttatggtagtaatattatactgtcctaggcttctgatgatcattgttgccagatgcagcacatatactaaatatgagacagggtaatgaaaacttggggaactggtaagtttttgcatgctacaagatttttttacttattaaaaaattattaaattgattttattctaaaatgttgtgttttgttgactaatatattgcgtgtttcctgtattctaagaaaggcgtaactgctttgaatatttaataaatacaaaatatgttgacagt

SEQ ID NO: 9401 - protein, 69 aa, Homo sapiens
MPVRFKGLSEYQRNFLWKKSYLSESCNSSVGRKYPWAGLRSDQLGNQGRCRTKIQHSDISSLLILVCST

SEQ ID NO: 9402 - DNA, 2251 bp, Homo sapiens
gccgggccgaggctttgctagggaacactgttatcgccccgccccctcggagctttttctccagttaactgtcggagtagcgggggctccggcgccgggcgacatgccggtgcgcttcaaggggctgagtgaataccagaggaacttcctgtggaaaaagtcttatttgtccgagtcttgtaattcctccgtggggcgaaagtacccatgggctggacttagatcagatcaattaggcatcacgaaagagccaagttttatttcaaaaagaagagtcccttaccatgacccacagatttcaaaatctctggagtggaatggagctatctcagagagcaatgtggttgcatcaccagaaccagaagccccggaaacaccaaaatcacaagaagcagaacaaaaggatgttactcaagaaagagttcactcactagaagcttccagggttcccaaaagaaccagatctcactctgcagactccagagctgaaggggcttcagatgtggaaaataatgagggtgtaacaaaccatacaccagttaatgaaaatgtggaactggaacattctaccaaggttctttcagaaaatgtagataatggggtaggcatattcactgcatttcttttcaaaagcatagaattcttcattggtttcattgtcatttctgtaatattacattttgtgtttcagaattttccattgttgttttcttgtctaatgtctataagaatagttgataacaggctgttgactttagttattgtgaattagttctattctgactactcgctattttgtagtagttgtactatgataatctgtttattggatggacctcctgcgtctggattttattcatcatatattagcacctgagtcctaagggagagatcaagttgagacagagaagggaagtaggcccttacttctggcagggtgctgagctgacttctacctagccccttttcagtttcttatcgtgtacaagaagacaaacagaaattcaattgatgaaatgcaaaaggaaggagagctctggctgtctctcagagatcttgcatttctgctctcttatgtcacagctggcctgcagcaggtccctgtgagcacataagcagaggctgcaggaacttgtgtggggatctcaatgctttccacatttctttctccattctgttccactgctcttctctggttcatgtccaccactgactgggaccctgaagaggcatttcagagtgttggagaagaatctgtagcttgttgaaaaagctgggggtgaaagggaacaaggaaggtgatgtgtgagtctggcaggcaggagaaggggtgttcatagaagcagtgtgcaggtgaggcaaagtgctgggactttttggtaatagatttaattatgaatgattagtaggaaaggactgagagtattatatttttcctgggatgcctaatagtcctttgatagaaaggaattttaaatagtttgacacttgaaaaaagatactatttataagttgaagaaagtttgctgtaccacaatgcgcatgtagttaacaattttgcactgtagatttaacattttgttaagaggatagatttcatgttatgcattttttaccacaatttttaaaaagtttgaatagaaatttttaatgtctttgagtggattttgttttttgaacagttggatagacttctgcgtaagaaagctggattgactgttgttccttcatataatgccttgagaaattctgaatatcaaaggcagtttgtttggaagacttctaaagaaactgctccagcttttgcagccaatcaggtagcttaatggatgtaatacatttctgagtaccattatcttatctagtaatgtagatttacatagaattaagagttgaaagaaattaagtacttaagtagcctggaggtaggttctagaaaaccaaaatgagagttttgctaaaatcatcctattacttatgatttatggtagtaatattatactgtcctaggcttctgatgatcattgttgccagatgcagcacatatactaaatatgagacagggtaatgaaaacttggggaactggtaagtttttgcatgctacaagatttttttacttattaaaaaattattaaattgattttattctaaaatgttgtgttttgttgactaatatattgcgtgtttcctgtattctaagaaaggcgtaactgctttgaatatttaataaatacaaaatatgttgacagt

SEQ ID NO: 9403 - protein, 222 aa, Homo sapiens; identical to SEQ ID NO: 1361

SEQ ID NO: 9404 - DNA, 554 bp, Homo sapiens
gccgggcgacatgccggtgcgcttcaaggggctgagtgaataccagaggaacttcctgtggaaaaagtcttatttgtccgagtcttgtaattcctccgtggggcgaaagtacccatgggctggacttagatcagatcaattaggtaagttgagcaggctaatagccattctaacctgggctaagtttataacttgggccaagccgttataacttgggctaagtaaaccttgggctaagtttaccaaatgatatattaaaagttcagttggcctggttgatttattcatttattaatcaagtatttattgaaggtttactatgagccaggactattcccagcagctagtgtggcaggccaggtttcactaatggaggcctccatcacaactgtttcggtactgactgagcggttaagttaaatattgaaagctaaaaaaagccagtgcccttacacaaaggctgggatgtcacaaaagcccatcaagagtattgcctaggcctttcctgggccataaagcatgacaaaataaggaattcttaacaggatccgttt

SEQ ID NO: 9405 - protein, 66 aa, Homo sapiens
MPVRFKGLSEYQRNFLWKKSYLSESCNSSVGRKYPWAGLRSDQLGKLSRLIAILTWAKFITWAKPL

SEQ ID NO: 9406 - DNA, 1015 bp, Homo sapiens
gctgccgctaatggagttggactcatgagtgagggagaaagtgcctgtgaatgacatcattatgcgacatcataggacagttttttttttcttttattcactcgtctttcttttatttcaactgatgatatcaggtggcttcttcaaatgatttttaagtatctcgatgatgatgaagaacaaagacatcaatcaggattcaggaagacagcttttgcggaaaatgcttaaagggaagcatcaaggattggtgttgatatttgaaagtttaagagtggtatacttttattcagtcaacacatgacaaatgtaaaaggcactcatttgttgttcctggaagaagcctggcagcattccattcagacatctgccctttcatcgtcccactttttacttattgcagtcctttcagtctgaatatttcctcctgacgcatcttctgccgtccgaaatgactccctgctcccagatcctgtagcccttattattgacacctttcatttagaaatttagcacatgtcacattacaccattattgaataaataatgaataaataaataaataaagatgtatgtccttcccaagtatatcagagaactatctggacaatttctttctttcccaattctcagaatcagcagtattctgtcaagaaacatttatcgacgatgatggcaatagtcgattaaaatcagatgaagttttatttttaaaaaaaggttgagcggagagacaaggctgaaggtttggaagttgagacaaccatcttcaataaacgttttctcatctaagggctgtatgtacatcattttggggaaggtagagattgaaggaggaagaacatcactggaggaagagacagcagtttgtctttcgagtttcaataaagtttcaaaaatcttgcctaagttatatatttttttggcctttcccttttgatgtgacaataaactgtaatgcggctgtcgtttgtacgaaccgatattcagcagaataaatctgagcactttcaga

SEQ ID NO: 9407 - protein, 50 aa, Homo sapiens
MSFPSISENYLDNFFLSQFSESAVFCQETFIDDDGNSRLKSDEVLFLKKG

SEQ ID NO: 9408 - DNA, 1041 bp, Homo sapiens
tattccgtgatattgaataagtctcacaagatctggtgggtttatcaggggtttctgcttttgcttcttcctcagtttctcttgctgccgccgtgtaagaaggaccttttgcctcccaccatgattctaagtcctccccagccacgtggaactatatcaggtggcttcttcaaatgatttttaagtatctcgatgatgatgaagaacaaagacatcaatcaggattcaggaagacagcttttgcggaaaatgcttaaagggaagcatcaaggattggtgttgatatttgaaagtttaagagtggtatacttttattcagtcaacacatgacaaatgtaaaaggcactcatttgttgttcctggaagaagcctggcagcattccattcagacatctgccctttcatcgtcccactttttacttattgcagtcctttcagtctgaatatttcctcctgacgcatcttctgccgtccgaaatgactccctgctcccagatcctgtagcccttattattgacacctttcatttagaaatttagcacatgtcacattacaccattattgaataaataatgaataaataaataaataaagatgtatgtccttcccaagtatatcagagaactatctggacaatttctttctttcccaattctcagaatcagcagtattctgtcaagaaacatttatcgacgatgatggcaatagtcgattaaaatcagatgaagttttatttttaaaaaaaggttgagcggagagacaaggctgaaggtttggaagttgagacaaccatcttcaataaacgttttctcatctaagggctgtatgtacatcattttggggaaggtagagattgaaggaggaagaacatcactggaggaagagacagcagtttgtctttcgagtttcaataaagtttcaaaaatcttgcctaagttatatatttttttggcctttcccttttgatgtgacaataaactgtaatgcggctgtcgtttgtacgaaccgatattcagcagaataaatctgagcactttcaga

SEQ ID NO: 9409 - protein, 50 aa, Homo sapiens; identical to SEQ ID NO: 9407

SEQ ID NO: 9410 - DNA, 589 bp, Homo sapiens
gctgccgctaatggagttggactcatgagtgagggagaaagtgcctgtgaatgacatcattatgcgacatcataggacagttttttttttcttttattcactcgtctttcttttatttcaactgatgatatcaggtggcttcttcaaatgatttttaagtatctcgatgatgatgaagaacaaagacatcaatcaggattcaggaagacagcttttgcggaaaatgcttaaagggaagcatcaaggattggtgttgatatttgaaagtttaagagtggtatacttttattcagtcaacacatgacaaatgtaaaaggcactcatttgttgttcctggaagaagcctggcagcattccattcagacatctgccctttcatcgtcccactttttacttattgcagtcctttcagtctgaatatttcctcctgacgcatcttctgccgtccgaaatgactccctgctcccagatcctgtagcccttattattgacacctttcatttagaaatttagcacatgtcacattacaccattattgaataaataatgaataaataaataaataaagatgtatgtccttcccaagtat

SEQ ID NO: 9411 - protein, 45 aa, Homo sapiens
MMMKNKDINQDSGRQLLRKMLKGKHQGLVLIFESLRVVYFYSVNT

SEQ ID NO: 9412 - DNA, 615 bp, Homo sapiens
tattccgtgatattgaataagtctcacaagatctggtgggtttatcaggggtttctgcttttgcttcttcctcagtttctcttgctgccgccgtgtaagaaggaccttttgcctcccaccatgattctaagtcctccccagccacgtggaactatatcaggtggcttcttcaaatgatttttaagtatctcgatgatgatgaagaacaaagacatcaatcaggattcaggaagacagcttttgcggaaaatgcttaaagggaagcatcaaggattggtgttgatatttgaaagtttaagagtggtatacttttattcagtcaacacatgacaaatgtaaaaggcactcatttgttgttcctggaagaagcctggcagcattccattcagacatctgccctttcatcgtcccactttttacttattgcagtcctttcagtctgaatatttcctcctgacgcatcttctgccgtccgaaatgactccctgctcccagatcctgtagcccttattattgacacctttcatttagaaatttagcacatgtcacattacaccattattgaataaataatgaataaataaataaataaagatgtatgtccttcccaagtat

SEQ ID NO: 9413 - protein, 45 aa, Homo sapiens; identical to SEQ ID NO: 9411

SEQ ID NO: 9414 - DNA, 909 bp, Homo sapiens
ttcattgtaagatcgactgttgaggtatcacagtgcctgtgttcaagaacccttaatttacttaatgatgaccccaaagtgtaagaatagtgatgctggcatattgttataattgttctattttattattagttattgttttaatctcttgttgtgcctaatttataaattaaactctattatatatatgtttctataggaagacatgtaatatatttagggtttgatactgtctgtgttttcaggcctccactgggggtattgctggtgggtaagtagggaaactactgtatcctgatgaattacaatagtctgcagaagagaaaatctctttctaaagtgtaacaaatttctgattttaattacatgataacatcttagcaattttaaaattagcaactgaggtgtcctgctgccgtagaaagctttctggactaaaagtccagttcgccaattagatattgacttactatttagactttggtaaattactaatctctgtttaccttttattttttgtaaagatttatgtataagatcatttccatctccatgtccatctgaataacttctttttcttagggttgtgaaaataaaatcagtgcatggtataatgttaatgtgttaaccttaatcggaattaactttggacttttaacttcagaggttttccaagtctcattaacagtttgtttcttcaaaaacatcaagaatataatccatgcagaaatgtgacctttggatttcaatttgttcagaagaaaccagttaattcttaaaaaatcacattatattattttattccaaaaacgttttgaattgtattaaataacagatgtattcaaattattaattatatgtaatattgaattactgaatactataataaaacattcatgaaattatatt

SEQ ID NO: 9415 - protein, 44 aa, Homo sapiens
LWTFNFRGFPSLINSLFLQKHQEYNPCRNVTFGFQFVQKKPVNS

SEQ ID NO: 9416 - DNA, 1117 bp, Homo sapiens
gaacgcagcatttcagggactggatgaggagcttacggttttttacagagacagggtctccctctgttgcccaggctggagtgcagtggtacaattattgctcactgtagcctccaactcttgtactcaagtaatcctcccgccttggcctcccaaagcactgggattatagaatcatcaatatcttggaagaaaaagaatgttaagaaataacaaaacaataattattaagtactttcttaatctcattaatggagctttcttggttcttggacttttattcatgggatttggtgcatggctcttattagatagaaataattttttaacagcttttgatgaaaataatcacttcatagtacctatttctcaaattttgattggaatgggatcttctactgttcttttttgtctattgggttatataggaattcacaacgaaatcagatggctcctaattgtgtatgcagtattgataacatggacctttgctgttcaggttgtactttcagcattcatcatcacaaagaaagaggaggttcagcaactatggcatgacaaaattgattttgtcatttctgagtatggatctaaagataagcctgaagatataaccaagtggactattctgaatgccttacagaaaacattacagtgttgtggccaacataattacacagactggataaagaataagaacaaagaaaattcaggacaggtgccatgttcttgcacaaagtcaactttaagaaaatggttttgtgatgagccactgaatgcaacttaccttgagggttgtgaaaataaaatcagtgcatggtataatgttaatgtgttaaccttaatcggaattaactttggacttttaacttcagaggttttccaagtctcattaacagtttgtttcttcaaaaacatcaagaatataatccatgcagaaatgtgacctttggatttcaatttgttcagaagaaaccagttaattcttaaaaaatcacattatattattttattccaaaaacgttttgaattgtattaaataacagatgtattcaaattattaattatatgtaatattgaattactgaatactataataaaacattcatgaaattat

SEQ ID NO: 9417 - protein, 248 aa, Homo sapiens
MLRNNKTIIIKYFLNLINGAFLVLGLLFMGFGAWLLLDRNNFLTAFDENNHFIVPISQILIGMGSSTVLFCLLGYIGIHNEIRWLLIVYAVLITWTFAVQVVLSAFIITKKEEVQQLWHDKIDFVISEYGSKDKPEDITKWTILNALQKTLQCCGQHNYTDWIKNKNKENSGQVPCSCTKSTLRKWFCDEPLNATYLEGCENKISAWYNVNVLTLIGINFGLLTSEVFQVSLTVCFFKNIKNIIHAEM

SEQ ID NO: 9418 - DNA, 999 bp, Homo sapiens
tgaaacgaacgcagcatttcagggactggatgaggagcttacggttttttacagaatcatcaatatcttggaagaaaaagaatgttaagaaataacaaaacaataattattaagtactttcttaatctcattaatggagctttcttggttcttggacttttattcatgggatttggtgcatggctcttattagatagaaataattttttaacagcttttgatgaaaataatcacttcatagtacctatttctcaaattttgattggaatgggatcttctactgttcttttttgtctattgggttatataggaattcacaacgaaatcagatggctcctaattgtgtatgcagtattgataacatggacctttgctgttcaggttgtactttcagcattcatcatcacaaagaaagaggaggttcagcaactatggcatgacaaaattgattttgtcatttctgagtatggatctaaagataagcctgaagatataaccaagtggactattctgaatgccttacagaaaacattacagtgttgtggccaacataattacacagactggataaagaataagaacaaagaaaattcaggacaggtgccatgttcttgcacaaagtcaactttaagaaaatggttttgtgatgagccactgaatgcaacttaccttgagggttgtgaaaataaaatcagtgcatggtataatgttaatgtgttaaccttaatcggaattaactttggacttttaacttcagaggttttccaagtctcattaacagtttgtttcttcaaaaacatcaagaatataatccatgcagaaatgtgacctttggatttcaatttgttcagaagaaaccagttaattcttaaaaaatcacattatattattttattccaaaaacgttttgaattgtattaaataacagatgtattcaaattattaattatatgtaatattgaattactgaatactataataaaacattcatgaaattat

SEQ ID NO: 9419 - protein, 248 aa, Homo sapiens; identical to SEQ ID NO: 9417

SEQ ID NO: 9420 - DNA, 3831 bp, Homo sapiens
aaacaatctcgattctaaattgaaacgaacgcagcatttcagggactggatgaggagcttacggttttttacagaatcatcaatatcttggaagaaaaagaatgttaagaaataacaaaacaataattattaagtactttcttaatctcattaatggagctttcttggttcttggacttttattcatgggatttggtgcatggctcttattagatagaaataattttttaacagcttttggtggagtctcgctctgtcactaggctggagtgcagtggcacgatctcggctcactgcaacctccacctcccggattcaagcgattctcctgcctcagattccgaagtagctggaattacagtatgcagtattgataacatggacctttgctgttcaggttgtactttcagcattcatcatcacaaagaaagaggaggttcagcaactatggcatgacaaaattgattttgtcatttctgagtatggatctaaagataagcctgaagatataaccaagtggactattctgaatgccttacagaaaacattacagtgttgtggccaacataattacacagactggataaagaataagaacaaagaaaattcaggacaggtgccatgttcttgcacaaagtcaactttaagaaaatggttttgtgatgagccactgaatgcaacttaccttgaggtaaagataaatctaggcttctacaagtatttatagtattttgtttgtttattttgcaagtcaatttagaattctgagcaaatttttatataaaaataatgttgttgacggtggctacattcttaatccacttccctaagttgaacacgtaattaggtaaattgtagtgtcatttccagtgtataatacgtaaagtaaataaatttcctgggagtatatgatttatgtattcttggaacttgggatatcatcagtctttctccccagccttccttgagaagtcctgcagaaagaggaggcacttctgtcaaagccttggtgcataagattggaaagggagctaaaacaccaggagtaaaagaataggcaaaaactaaagggagtggaccccagcaatgatgaatgtggtgttcaagtaagtgtagcagaagcaagagtaaagggttgtctggagcaactgcgatttacaggtgtgggatactgataactagattttttcatcctaagaactgcgaatactttgtatagtttacatattaagcttattctaatcttaagatgtattgtttcaattgcataattaattcataaataaatggaacattactttttttttttaaaaaaaagcatctactctttgggaaataaccattttatgtggtgatatatacagtagttgcccctatctgcagtttcacattgtgagagttcaaccattgaaaatattaagtggaaaattccagaaataaacaattcataagttttcaattgcacactgttctgggtagtatgatgaaatcttgtgtcttcctgccctgttccctcctgggacatgagtcatccctttgtccagtgtattcatgatgcagatgctacccacccttagtcacttagtagtcatcttcattgtaagatcgactgttgaggtatcacagtgcctgtgttcaagaacccttaatttacttaatgatgaccccaaagtgtaagaatagtgatgctggcatattgttataattgttctattttattattagttattgttttaatctcttgttgtgcctaatttataaattaaactctattatatatatgtttctataggaagacatgtaatatatttagggtttgatactgtctgtgttttcaggcctccactgggggtattgctggtgggtaagtagggaaactactgtatcctgatgaattacaatagtctgcagaagagaaaatctctttctaaagtgtaacaaatttctgattttaattacatgataacatcttagcaattttaaaattagcaactgaggtgtcctgctgccgtagaaagctttctggactaaaagtccagttcgccaattagatattgacttactatttagactttggtaaattactaatctctgtttaccttttattttttgtaaagatttatgtataagatcatttccatctccatgtccatctgaataacttctttttcttagggttgtgaaaataaaatcagtgcatggtataatgttaatgtgttaaccttaatcggaattaactttggacttttaacttcagaggtaagcttttgttcatatgttaaaatgaaaaatattaagtataagctatacagaatagactgcagagcaatcaggtggagacctaatcagataagttcatataatagagccaggactttgaggctctttacatccaagagttgtacaggtgattccttaatcagccaggtcaggggagcctattaataagtggtcatcctggaggtagtgattttattactatgtatagtacctatgtatatttttatctttctttctatatatatctataaatagatctattgatgtatagatatatttacgtgtgtgtgtgtgtgtgtgtgtgtgtgtgtgtgtgtgtgtgtgtatatgttcatatattggcagtaagagcaccatgttgggcagtctgcaagttgccagacttctgaaatctaggcagatgtttgactttagtaagatccactattcactcatatgttcattcattcaatgtatttggagggacggggagcatttactgtgtgtcatgtactgtactagatgttgaatatacaatgagatgcaaaatagacacattccatgacctaaaggtgtcaactgcagaattaagtttcagaagcaagacgctattcttcagtctcagtgaagactattaagaataagtgcaggctatggattcaaagaaactttgagagtaaatagagtgttatagtggggactatgccactaaaacaaatacatactgcatttgactttgtatagatccatgaagcccctgacctaagttttcatctcttcaattggtaacaattttagtctcagaatggtagtaaaccaagacattctttatacacattaatatcattgtttttaaatgtttattctctactgtgttcatgctggaatatcttaagacaaaactgcagaggtaatatccatgttccattttatcttctgccctttacaagccacctttcattatctataaaaaaaagaagcagttttgtacatttaatgacatagttagaaagatatcgaacaacaacaacaagaaaaccatcagcagtttgtccaggcatgtagctcagtgatagctaatgtaattaaaacctaaaggtttttccttattctcctctgtacgtgaacttggtaacaggtgggttattcttgaagactcattttgcagacttcctattcacaactgtatgtaccttattctgaaattttctcaccagttttgatcccttttccctttacaatacgcattttggtgactatatattgttaactttgcaaattactcttatcattgattaaattttaatctcttattgttcccttttcttccaggttttccaagtctcattaacagtttgtttcttcaaaaacatcaagaatataatccatgcagaaatgtgacctttggatttcaatttgttcagaagaaaccagttaattcttaaaaaatcacattatattattttattccaaaaacgttttgaattgtattaaataacagatgtattcaaattattaattatatgtaatattgaattactgaatactataataaaacattcatgaaattat

SEQ ID NO: 9421 - protein, 53 aa, Homo sapiens
MLRNNKTIIIKYFLNLINGAFLVLGLLFMGFGAWLLLDRNNFLTAFGGVSLCH

SEQ ID NO: 9422 - DNA, 1930 bp, Homo sapiens
tgtgattggctgttgccatggatacgctttgtgtagcggctatgggcgctgtcttacaacaaagccaaggaatctcgctgctgagggcagttctgtgctttattatgaagaataatggacgatgatgatgcaaagctcaaagcagaaatagaagctgaattggataaactcagcatttcctccttggaaaaagaagacattgagagtgatgcaaaatcagaaacccagagtgatgatagtgatacagattcagttgaattaccagaatcagttcttcactgtattaacatcataaagaacaggagtaaagctgttgaagagctcattcttcaggacctggaagatactgatattttaagctgtagttatggagcagtttctaataatcatatgcatttaagaacaggactatcaactgaatatgaagaaagttcagagcaattaattaagatattatctgaaatagaaaaagaagaatttatgagaagtaaaaccgattgtgccactcctgattttgttcctgagcctagtcctcatgacttgcctatggatgaacatgttttaccagatgatgctgatataaattttggatactgtgaagtggaagaaaaatgtagacagtcttttgaggcttggcaagagaaacagaaggaattagaagataaagagaaacaaactctcaaagctcagagggatagagaagaaaaacaatttcaagaagaagaagaaaagcgacattgctggatgaaacaatttaaagttgaaaagaagaaattagagaacattcagaaggagtatattagaaacttgcatttacaaatggaagaagaaagaacaagatttaaagaccaacaagaaaaagaaaaaaattctttgttaaaacagcagaataatgcagctgttaaaattcaagctaaatataaagcatttgttgcctatcaaaaatatggcccaattattaaagagcaaattgaaagtaagaaaaggaaagcacaagagtggaaggaaaaggaagcaaaaatacgacaaaaggaggaagaaaatcgaaaaagattagaggaggaacaaaggataaaagaagagagaaaaaagcaaaaggaagaggaaaggaaaaggagagaaaaagaatatgaagaaaaaaagaatattgtgaaacaggaaagagagcaactaataagcaaggaaaaaataatattaagagaagatgcaagccaacagctaataataagtagtgcattaaagaagagcggatataataacaaacatttaagtcttgaagatatttcaaatgataagggtgatatagccaaaaatctagtggatgaaaattcaaagaagcaggaagatgttctcctttggctagttgaggaatcaaatatgaaagaaaatgtagatagacagactatattaaaagaatcaatacaagtaaagttaaaagaatctatatcaagccaaacaattctggcagattttaaaatggaagaaaaaaatgaaaacctagcaaaaaaacgatgttcagaagaattggtcaagcaagaaagaaaatatgaaaatacagataacaaaactgaattgggaaactctgatctaaaaggaaatctgaaagaacagtttccattgcaagaattaaagtctgatgcacaaaaagaagaaaaaatcatgaaacatgtcataaatgagaatacaggacaaaaaacccagataatattaggacataaccaagaaatcagtgaggtgaaaaccaatgaagagcagaaaataatcaaagataatcagcagaaaaagatacaaaaagtagaaaaagaagagatacaagaacagaatggattattatataaagataaggatactttagttatttcagtgaaacaaagatcactctcactaacatcagaaaattccaaagatgtaagagaaaacgtaatattac

SEQ ID NO: 9423 - protein, 604 aa, Homo sapiens
MDDDDAKLKAEIEAELDKLSISSLEKEDIESDAKSETQSDDSDTDSVELPESVLHCINIIKNRSKAVEELILQDLEDTDILSCSYGAVSNNHMHLRTGLSTEYEESSEQLIKILSEIEKEEFMRSKTDCATPDFVPEPSPHDLPMDEHVLPDDADINFGYCEVEEKCRQSFEAWQEKQKELEDKEKQTLKAQRDREEKQFQEEEEKRHCWMKQFKVEKKKLENIQKEYIRNLHLQMEEERTRFKDQQEKEKNSLLKQQNNAAVKIQAKYKAFVAYQKYGPIIKEQIESKKRKAQEWKEKEAKIRQKEEENRKRLEEEQRIKEERKKQKEEERKRREKEYEEKKNIVKQEREQLISKEKIILREDASQQLIISSALKKSGYNNKHLSLEDISNDKGDIAKNLVDENSKKQEDVLLWLVEESNMKENVDRQTILKESIQVKLKESISSQTILADFKMEEKNENLAKKRCSEELVKQERKYENTDNKTELGNSDLKGNLKEQFPLQELKSDAQKEEKIMKHVINENTGQKTQIILGHNQEISEVKTNEEQKIIKDNQQKKIQKVEKEEIQEQNGLLYKDKDTLVISVKQRSLSLTSENSKDVRENVI

SEQ ID NO: 9424 - DNA, 1839 bp, Homo sapiens
tgtgattggctgttgccatggatacgctttgtgtagcggctatgggcgctgtcttacaacaaagccaaggaatctcgctgctgagggcagttctgtgctttattatgaagaataatggacgatgatgatgcaaagctcaaagcagaaatagaagctgaattggataaactcagcatttcctccttggaaaaagaagacattgagagtgatgcaaaatcagaaacccagagtgatgatagtgatacagattcagttgaattaccagaatcagttcttcactgtattaacatcataaagaacaggagtaaagctgttgaagagctcattcttcaggacctggaagatactgatattttaagctgtagttatggagcagtttctaataatcatatgcatttaagaacaggactatcaactgaatatgaagaaagttcagagcaattaattaagatattatctgaaatagaaaaagaagaatttatgagaagtaaaaccgattgtgccactcctgattttgttcctgagcctagtcctcatgacttgcctatggatgaacatgttttaccagatgatgctgatataaattttggatactgtgaagtggaagaaaaatgtagacagtcttttgaggcttggcaagagaaacagaaggaattagaagataaagagaaacaaactctcaaagctcagagggatagagaagaaaaacaatttcaagaagaagaagaaaagcgacattgctggatgaaacaatttaaagttgaaaagaagaaattagagaacattcagaagcaagaacaggacaagatgaatgatgaactctataaagaagagaaaatttggaaagagaaatttaaacagcatgaggagtatattagaaacttgcatttacaaatggaagaagaaagaacaagatttaaagaccaacaagaaaaagaaaaaaattctttgttaaaacagcagaataatgcagctgttaaaattcaagctaaatataaagcatttgttgcctatcaaaaatatggcccaattattaaagagcaaattgaaagtatattgtgaaacaggaaagagagcaactaataagcaaggaaaaaataatattaagagaagatgcaagccaacagctaataataagtagtgcattaaagaagagcggatataataacaaacatttaagtcttgaagatatttcaaatgataagggtgatatagccaaaaatctagtggatgaaaattcaaagaagcaggaagatgttctcctttggctagttgaggaatcaaatatgaaagaaaatgtagatagacagactatattaaaagaatcaatacaagtaaagttaaaagaatctatatcaagccaaacaattctggcagattttaaaatggaagaaaaaaatgaaaacctagcaaaaaaacgatgttcagaagaattggtcaagcaagaaagaaaatatgaaaatacagataacaaaactgaattgggaaactctgatctaaaaggaaatctgaaagaacagtttccattgcaagaattaaagtctgatgcacaaaaagaagaaaaaatcatgaaacatgtcataaatgagaatacaggacaaaaaacccagataatattaggacataaccaagaaatcagtgaggtgaaaaccaatgaagagcagaaaataatcaaagataatcagcagaaaaagatacaaaaagtagaaaaagaagagatacaagaacagaatggattattatataaagataaggatactttagttatttcagtgaaacaaagatcactctcactaacatcagaaaattccaaagatgtaagagaaaacgtaatattac

SEQ ID NO: 9425 - protein, 315 aa, Homo sapiens
MDDDDAKLKAEIEAELDKLSISSLEKEDIESDAKSETQSDDSDTDSVELPESVLHCINIIKNRSKAVEELILQDLEDTDILSCSYGAVSNNHMHLRTGLSTEYEESSEQLIKILSEIEKEEFMRSKTDCATPDFVPEPSPHDLPMDEHVLPDDADINFGYCEVEEKCRQSFEAWQEKQKELEDKEKQTLKAQRDREEKQFQEEEEKRHCWMKQFKVEKKKLENIQKQEQDKMNDELYKEEKIWKEKFKQHEEYIRNLHLQMEEERTRFKDQQEKEKNSLLKQQNNAAVKIQAKYKAFVAYQKYGPIIKEQIESIL

SEQ ID NO: 9426 - DNA, 4460 bp, Homo sapiens
tgtgattggctgttgccatggatacgctttgtgtagcggctatgggcgctgtcttacaacaaagccaaggaatctcgctgctgagggcagttctgtgctttattatgaagaataatggacgatgatgatgcaaagctcaaagcagaaatagaagctgaattggataaactcagcatttcctccttggaaaaagaagacattgagagtgatgcaaaatcagaaacccagagtgatgatagtgatacagattcagttgaattaccagaatcagttcttcactgtattaacatcataaagaacaggagtaaagctgttgaagagctcattcttcaggacctggaagatactgatattttaagctgtagttatggagcagtttctaataatcatatgcatttaagaacaggactatcaactgaatatgaagaaagttcagagcaattaattaagatattatctgaaatagaaaaagaagaatttatgagaagtaaaaccgattgtgccactcctgattttgttcctgagcctagtcctcatgacttgcctatggatgaacatgttttaccagatgatgctgatataaattttggatactgtgaagtggaagaaaaatgtagacagtcttttgaggcttggcaagagaaacagaaggaattagaagataaagagaaacaaactctcaaagctcagagggatagagaagaaaaacaatttcaagaagaagaagaaaagcgacattgctggatgaaacaatttaaagttgaaaagaagaaattagagaacattcagaagcaagaacaggacaagatgaatgatgaactctataaagaagagaaaatttggaaagagaaatttaaacagcatgaggagtatattagaaacttgcatttacaaatggaagaagaaagaacaagatttaaagaccaacaagaaaaagaaaaaaattctttgttaaaacagcagaataatgcagctgttaaaattcaagctaaatataaagcatttgttgcctatcaaaaatatggcccaattattaaagagcaaattgaaagtaagaaaaggaaagcacaagagtggaaggaaaaggaagcaaaaatacgacaaaaggaggaagaaaatcgaaaaagattagaggaggaacaaaggataaaagaagagagaaaaaagcaaaaggaagaggaaaggaaaaggagagaaaaagaatatgaagaaaaaaagaatattgtgaaacaggaaagagagcaactaataagcaaggaaaaaataatattaagagaagatgcaagccaacagctaataataagtagtgcattaaagaagagcggatataataacaaacatttaagtcttgaagatatttcaaatgataagggtgatatagccaaaaatctagtggatgaaaattcaaagaagcaggaagatgttctcctttggctagttgaggaatcaaatatgaaagaaaatgtagatagacagactatattaaaagaatcaatacaagtaaagttaaaagaatctatatcaagccaaacaattctggcagattttaaaatggaagaaaaaaatgaaaacctagcaaaaaaacgatgttcagaagaattggtcaagcaagaaagaaaatatgaaaatacagataacaaaactgaattgggaaactctgatctaaaaggaaatctgaaagaacagtttccattgcaagaattaaagtctgatgcacaaaaagaagaaaaaatcatgaaacatgtcataaatgagaatacaggacaaaaaacccagataatattaggacataaccaagaaatcagtgaggtgaaaaccaatgaagagcagaaaataatcaaagataatcagcagaaaaagatacaaaaagtagaaaaagaagagatacaagaacagaatggattattatataaagataaggatactttagttatttcagtgaaacaaagatcactctcactaacatcagaaaattccaaagatgtaagagaaaacgtaatattacaagaaaaagaaatttattcaaaatccaaagaaattgaggagaacccaaaagacaatgcttggaatagtggcattgtgatttttaacacaactgataccatgataaatatagaaggcaaaagaaatgaccaagattatgtgttaggtagacatgctccttgtgagggcttgagtaactataatgcagaaagctccatggtatctaaagaagtcaactctcttaaatctgagattagaaatatttcagaaaaatgccatgaaaatgcacctgaacctgatagcatgacctgctgtgtatcagagtcaacccttctatattctattgaagaaaggagactagcctggataaaatcatttaaaccttggcttgaaattttcaagcaaaatcaacaaaagaaaattgttagaagaaagagacctgtgaaatgcccagccaacatgacacccgctttggataaactggaaattcttcgatgtggcccttgggatactttacagcaggttacaacagttacatttcaagatttgccaggctgtgttctctccacactggcagagtgtacaaatcttcagtttctatcccttcgacgctgtggattaacttctttgcacagcctgagtaattgtaaaaaacttaagtacattgatgcacaggaaaaccatattgaggctattgagtgtgaaaatttggaaaatctctgtgttgttcttcttaataaaaatcaactgacttctcttcatggtttggatggctgtactaatattcagtgtcttgaactttcatataataaaattactcgaattggatattccttctttctggaagaaaaacttgttgacaatgcagggttctgccatcacttgggcacctccacttcttacttatccctggcacaagtctggattccaactggattatgttggtcctggatacctattacctcacttacaaaaaattcagattgtaatttccttatctcccacttatactggaattgtggtttagaatctttgaaaaatcttcaacaactaattttggaccacaatcagttaattaatacaaaaggtctttgtgatacacctaccattgtatacctagattgctcccataatcatcttactgatgtagagggcgttgaaaattgtggattgctccaaatattgaagttacagggaaattatctgagtgagcttccatccttggagaatcttgttttactaagagaattgcacttggatgataacagcatttcaactgtggaagcattttcttcatactggctgcctttactacaaaatattactatctctcaaaacagcttgactaaaatcgtaccactttttcattttgtttcattggaaaagctagatgtcagccacaattgtctttctgatcttaaaagtgccataaaatggtttgatgcatgctattctctccatgaattgtctcttactggaaacccacttcttcaagaaacaaactggagggattctctacttaaagtgttgcctgctctgagaatcctcaatggcaatatactaaactctaattcagaaagccgcactgaagaacacaatcaactgggatcagcaggtttcctggcactttgtcagtctcagattcgagaattcaacttgctaattgaaaattatataactggaaaaggagatgtatttaccttggatactgcagaaaatctctgtcattattttaagaaattgatgatacttagtactgaataccgacatgcacacgaacgaggggatgtaactatcaccaagaaagatgaatcagaagcccagaaaaatcatttggcccctacaaacagtgacagcactctgcaaaatggagtcttctactcttgtgcacgtgaaggtgagccagactcaccagatattcctgagaaatggatggactctgtctccagccactccccattaagcaaatccgccacatgtgaaaatatggaaggaagacatcaggaaatattagtatgtcagaagagagaagacagcaaggcaagcagtattcccaccataagaatcccatttaaggaagtagtaatgacaaattctttgctgaggaatcaccaaaatattgagcctagtgaaaaaatgtaagatatataaataatgtttcttttatagatgtatgtttactccttttgatggatgatattagtcaatggtacctagtaatttgctgaaggattcaaatcacaatcatatttcataccgattccattatgttttcgtgaggtgcattatgttttcatgaggtgcacaaatcattaattatagtgcatattaatttgattaaattctcatttaatttctagtagtatttaaatgagtaaatgtgagtttttttctgccttgtaatttctaaataattaatatgttttaaggagaaataaaatatcacagtctaaaaataataaaaacattttctgagt

SEQ ID NO: 9427 - protein, 1336 aa, Homo sapiens; identical to SEQ ID NO: 1363

SEQ ID NO: 9428 - DNA, 1863 bp, Homo sapiens
atggatacgctttgtgtagcggctatgggcgctgtcttacaacaaagccaaggaatctcgctgctgagggcagttctgtgctttattatgaagaataatggacgatgatgatgcaaagctcaaagcagaaatagaagctgaattggataaactcagcatttcctccttggaaaaagaagacattgagagtgatgcaaaatcagaaacccagagtgatgatagtgatacagattcagttgaattaccagaatcagttcttcactgtattaacatcataaagaacaggagtaaagctgttgaagagctcattcttcaggacctggaagatactgatattttaagctgtagttatggagcagtttctaataatcatatgcatttaagaacaggactatcaactgaatatgaagaaagttcagagcaattaattaagatattatctgaaatagaaaaagaagaatttatgagaagtaaaaccgattgtgccactcctgattttgttcctgagcctagtcctcatgacttgcctatggatgaacatgttttaccagatgatgctgatataaattttggatactgtgaagtggaagaaaaatgtagacagtcttttgaggcttggcaagagaaacagaaggaattagaagataaagagaaacaaactctcaaagctcagagggatagagaagaaaaacaatttcaagaagaagaagaaaagcgacattgctggatgaaacaatttaaagttgaaaagaagaaattagagaacattcagaaggtattttgcttttgtttttcatgtatttttaaaatcagtagctacctctgaagaatattgatatttggattgtgttgcagattgagcttaatagtatgacttttaattactctctgatagaggaagaaattgactgtgaattaacagtatttaatatgaggtccttgattagtttttattgaaattcattggaaggtcagacacacttctgatcttgggggccaatggagtctatgaatttcaagggtcatcatggatagcctgaaatttacaatataaattgttgtttttctttatatgcttctaaacattggaaaaagcaatgaaaaattcttgagtatgcattaaccttgctctgtggtctggcatatgacatgtaaaacatatttaaaagtagttcaaccatttagagtcagtctgcgccccaccttcataattaagctacttccttgaactggcaactttttggtgtgaagttttgtactgttttcatttctgtcgtatgtgttgttggtgttgttttccccctaggagatccacacaatcagatcatagtggtggtatatcggtattgagaaactggtggattttaggacaccacttgcaggtcatgagaaccttagaatatttggataacaggcatgactgacttctctatctttcatgattaaagttgatttatacattatccagaacttgctgggtttgagtgttgcatataaagaacattagcttgttcaacattttttaatcctccatgttgaggacatttcatttcttgactgtgtagaaaataaacacattaaaggctgggcgcggtggctcacgcctgtaatcccagcaccttgggaggccgagacgggtgtataacgaggtcaggagatcgagatcatcctggctaacacggtgaaaccccgtctctactaaaaatagagaaaattagccaggcatagtggcgggcgcctctagtcccagctacccgggaggctgaggcaggagaatggcgtgaacccgggaggcagaccttgcagtgagccaagatcgtgccactgcactccagcctgggcgacagagcaagactccgtctc

SEQ ID NO: 9429 - protein, 242 aa, Homo sapiens
MDDDDAKLKAEIEAELDKLSISSLEKEDIESDAKSETQSDDSDTDSVELPESVLHCINIIKNRSKAVEELILQDLEDTDILSCSYGAVSNNHMHLRTGLSTEYEESSEQLIKILSEIEKEEFMRSKTDCATPDFVPEPSPHDLPMDEHVLPDDADINFGYCEVEEKCRQSFEAWQEKQKELEDKEKQTLKAQRDREEKQFQEEEEKRHCWMKQFKVEKKKLENIQKVFCFCFSCIFKISSYL

SEQ ID NO: 9430 - DNA, 712 bp, Homo sapiens
tcaaagaccagtagaaagagtttgctaaaatctgaaaaagaaaaaaaaatttcagaagaatggggctttaaggatatttctactgctcagcaaatgttgaagagggcacagaaaatgaaatcgaagaaactaaagaaaaaaatagattccactgtgcgtctagccttattcaaaaacaatgaaaataaagtgtctcttccaaaatcaccaaagatggtacagcccagaagagatggttactttgaaggtatagaagaagaccctatccacaaagataccactgcaaatgaaaaattagaacggaatagagaatatacataccaatggcttcacacacaggttggggttcatgaaacgactagttccagaaatatgaaatgcaatcactttttgcctgagttagatccagatgtacttaatggtggaagagttcagcttgtggtaagaaatgtgcttaaagttacagaaaaatgttgtagacactagtgctcaaataaatggcactttaagatatgtttataattaaactatgaaaatatcacaactgtatctatttgggataatatcaaaatatcatgtgttaaaataataacatgttttcttgacttgtaatacaatttaaaatgtgacattgcttaaaaatgttaattttatgtgacagatgtaaaaatattagcatcctacaactttaaaataaaattactgtggatgg

SEQ ID NO: 9431 - protein, 130 aa, Homo sapiens
MLKRAQKMKSKKLKKKIDSTVRLALFKNNENKVSLPKSPKMVQPRRDGYFEGIEEDPIHKDTTANEKLERNREYTYQWLHTQVGVHETTSSRNMKCNHFLPELDPDVLNGGRVQLVVRNVLKVTEKCCRH

SEQ ID NO: 9432 - DNA, 604 bp, Homo sapiens
tgtgcgtctagccttattcaaaaacaatgaaaataaagtgtctcttccaaaatcaccaaagatggtacagcccagaagagatggttactttgaaggtatagaagaagaccctatccacaaagataccactgcaaatgaaaaattagaacggaatagagaatatacataccaatggcttcacacacaggttggggttcatgaaacgactagttccagaaatatgaaatgcaatcactttttgcctgagttagatccagatgtacttaatggtggaagagttcagcttgtggcaagacttgtaagcagagaagacacggatttagaccttttttccatgaccaatggaagtgctttgtctgtgaacagagaaaaaaaaaatcaggcacacagacactcagcaggatcttcaagtaagttgtggtttccttcaaaattaatttagaaatcacaaacgaattgatggaacctaatgccaacaagcattctttttcagatagggggtaggatgccagcaacctgaactgcccaaaaatgtgtatttaaattttttctttctttaaatatcctcttttgatataaacaaaattaaattatttctaaaatt

SEQ ID NO: 9433 - protein, 126 aa, Homo sapiens
MVQPRRDGYFEGIEEDPIHKDTTANEKLERNREYTYQWLHTQVGVHETTSSRNMKCNHFLPELDPDVLNGGRVQLVARLVSREDTDLDLFSMTNGSALSVNREKKNQAHRHSAGSSSKLWFPSKLI

SEQ ID NO: 9434 - DNA, 1442 bp, Homo sapiens
gtattaaagggaccggagcggggcagttcccgacgccgcagcgctcgctttcccttccctcctctctggccctccctcctcccacccactggctccctcccccagcgctctccagtttctgtgccccaggagctacgcgacagtcttccaggattatggagtttctgagcgagaagtttgccctcaagagccctccgagtaaaaacagtgacttttacatgggcgcaggaggtcctctggagcacgttatggagacgctggacaatgagtccttttacagcaaagcgtctgcaggcaaatgcgtgcaggccttcggacccctgccccgcgccgagcatcacgtgcgcttggagaggacctcgccctgtcaggacagcagcgtgaactatgggatcactaaagtagaaggacagccccttcacaccgaactgaatagagctatggacaactgtaacagtctccgaatgtctcccgtgaaagggatgcaagagaagggagagctggatgaacttggggataaatgtgatagcaatgtatccagcagtaagaaacggaggcaccgaaccaccttcaccagtttgcagctagaggagctggagaaagtctttcagaaaactcattacccggatgtgtatgtcagagaacagcttgctctgaggacagagctcactgaggccagggtccaggtttggtttcaaaatcgaagggccaaatggagaaaaagggaacgttatggccaaatacaacaagcgaaaagccattttgctgccacctatgatatatcagttttgccaaggactgacagctacccacagattcagaacaatttgtgggcaggaaatgcaagtggtggttctgtggttacttcatgcatgttaccacgtgacacttcctcctgtatgacaccttattctcactcgcctcggacagattccagttacacggggttttcaaaccaccagaaccagttcagccacgtgcccctcaacaattttttcactgactctcttcttactggggcaaccaatggacatgcatttgaaacaaagccagagtttgaaaggaggtcttccagtatcgcagttcttcgaatgaaagccaaggagcacaccgccaatatttcatgggccatgtaacatacagtactcttttatttttcttttaatagcaaagttaaacattcttatttctcatatttaaaggataccacaataagctgctgtgtgtggaattgctaaaggtcaagatattcagtgagaccagcttaaatgaatagttgttatttaacattaaaatctaagaatgaacctctgaaaagactaaataggtttaccatgtgccagtctccacaaaccctgttttagtagtaaggttttctttttctattgtacaagtcaatgaaatatgatcacgcaacttattaaagaataaatgtgttaaac

SEQ ID NO: 9435 - protein, 326 aa, Homo sapiens; identical to SEQ ID NO: 1365

SEQ ID NO: 9436 - DNA, 1525 bp, Homo sapiens
gtattaaagggaccggagcggggcagttcccgacgccgcagcgctcgctttcccttccctcctctctggccctccctcctcccacccactggctccctcccccagcgctctccagtttctgtgccccaggagctacgcgacagtcttccaggattatggagtttctgagcgagaagtttgccctcaagagccctccgagtaaaaacagtgacttttacatgggcgcaggaggtcctctggagcacgttatggagacgctggacaatgagtccttttacagcaaagcgtctgcaggcaaatgcgtgcaggccttcggacccctgccccgcgccgagcatcacgtgcgcttggagaggacctcgccctgtcaggacagcagcgtgaactatgggatcactaaagtagaaggacagccccttcacaccgaactgaatagagctatggacaactgtaacagtctccgaatgtctcccgtgaaagggatgcaagagaagggagagctggatgaacttggggataaatgtgatagcaatgtatccagcagtaagaaacggaggcaccgaaccaccttcaccagtttgcagctagaggagctggagaaagtctttcagaaaactcattacccggatgtgtatgtcagagaacagcttgctctgaggacagagctcactgaggccagggtccaggtttggtttcaaaatcgaagggccaaatggagaaaaagggaacgttatggccaaatacaacaagcgaaaagccattttgctgccacctatgatatatcagttttgccaaggactgacagctacccacagattcagaacaatttgtgggcaggaaatgcaagtggtggttctgtggttacttcatgcatgttaccacgtgacacttcctcctgtatgacaccttattctcactcgcctcggacagattccagttacacggggttttcaaaccaccagaaccagttcagccacgtgcccctcaacaattttttcactgactctcttcttactggggcaaccaatggacatgcatttgaaacaaagccagagtttgaaaggaggtcttccagtatcgcagttcttcgaatgaaagccaaggagcacaccgccaatatttcatgggccatgtaacatacagtactcttttatttttcttttaatagcaaagttaaacattcttatttctcatatttaaaggataccacaataagctgctgtgtgtggaattgctaaaggtcaagatattcagtgagaccagcttaaatgaatagttgttatttaacattaaaatctaagaatgaacctctgaaaagactaaataggtttaccatgtgccagtctccacaaaccctgttttagtagtaaggttttctttttctattgtacaagtcaatgaaatatgatcacgcaacttattaaagaataaatgtgttaaacaaattcttctgttatagattgatttatgttacttctgtataacaagaaatctcatgtaaaataatacctgataaagaaggaaa

SEQ ID NO: 9437 - protein, 326 aa, Homo sapiens; identical to SEQ ID NO: 1365

SEQ ID NO: 9438 - DNA, 519 bp, Homo sapiens
agactgctgtgctagcaatcagcgagactccgtgggcgtaggaccctccgagccaggcatcagctatcaaaacttatgggaaatggaattgaagacaactacttctagaattggtgcatggaagcttctcataggtgattagccacactcttcttctgtcaacctggtgcagaaaagcttgaagaccttggaaatcacatattgatgatggaggagatacaagaatgaaggaccctgggttcctgaatcaacactctaagaagagactccttgaaatcaagagcactcattttgacattgcaaacggaaaaattcacttctatcaggtttgaaccaatatatagtttagggtttttaaaaaataactgttagcatgactttaactaatacacatgccatacaggatcagacctctgtgactttgcttttacagtctgctctgtctggaggggagtttcatctttgccatccttaatgatatagcatagacgctatgtcctccagaaacttccttggcac

SEQ ID NO: 9439 - protein, 35 aa, Homo sapiens [sequence omitted]

SEQ ID NO: 9440 - DNA, 2817 bp, Homo sapiens
atttgaattggtgaacttagtaaagcagacggctctcaccaataagggcaggcatcatccaatctgtcgaaagcttgaataaaacaaaaagaggaagggaaaatttgcttcttttcttcttgatctagtatatcatcttctcctgcccttggatgtgagtgggccttcagacttaaaccaggagttacacctttggcttccctggttctcagttctttggacttggactgaattacactgccaggtttcctggttctccagcttgcagatggcagatcatgggacttcttggcctccataattgtgggcaaaaaggaaagagacaaaacagcatgaaatgatgagaccaagtgatgaaaattcattcacaatgattgctttcaagagtaatttctcttgggtaattcagcagcctgttactatggctctctggagtgatagctaatgtaaatgaagcctctaaaagtggattatcctgacaagaatatactcagccaataatgcaacagaaatccattcaaagcattcgggaaaaattcaaaagaataaatattctttttttttttttaaagttaatgacctacgatccatttcttccctgactaacaagcagcaagcacttaaaaatatccagccaggatgaaatagaaacccacctgacttgttaatatttttgtttggtcccagggactcagattctaagccaaattctttgaatgatcttggcaaatgtctcgaattatttttgccaacttttctttatcttggaaaaaaagtttcatgaatgggtgtcaaaattgattagttttaaaaacctttcttgcagatacgtatggcaccctaaaactgtattagaaaaaaatttcatatctccaggcctttcattgggtcaggttggcatttcgctgccctttatgtgtgtgacaagtgaaaataaggaaagaaaaaaactcaagtgaagaaaatcagaatctgcgcagcagttcctgggcgtttcagctgcttcccacatcacctgcctcatcaagccccagcatccatctccttgctcatcttacaccctgtgtgcatgacaggcccaccattcatttatcagagcaaaggctctcccactattctggttcacccccctacttagccagatatacaagaatatctgcacggatgacctgcctcacctgggagctcagaggagctcagattccattactatcgcaccaaggacagatctcccagcaagaatgacagaaaagactaactgcccccaaaatctcccttccaaaacacagttctcttaattctcccaagaaaccagaatgtgactgctcacctctctaaggacctgaaaacaactggccatttcagctatttaaatcaactttaaaaaatccaaccgccaaaatattaaaccattttggttggaatgataacataactaacctgctgacagctgcttctgctaggtgcaaaaatggaaaaaaaaatacttctaatcaggtcaaatcactctacctttgggattctaaatttactcatattctcaaagaaatatattcagtcatagtggggaaaataggattattcctttagctcgataagcaaccagaagttcttccttcaaatcttgacatttaatcaatcagaaattgatttttggaaaactgtttcctatgaagctatctctgcctgaaggatttttcttttacaatccagactatagaaggaaattcacaacctggactttcacctccattggtcagagttttactgaccaattcccacctctgccttacacctaacggaagtttatgcctgttttctcttcacataccccaacagttacaaatggttgttattattaagcatcttttattttgtggcctctgattacatggtcccctaaattttgacctaatcacaaaagattggtaaaatttcttaacatattaataatattttgtttatgtgtcaatatcttagcatgtatcaattaagacagaggtcttaacgttctctttttgaaagagaatattaggattcagagatattaagagattctcccaggatcacagttaggtaacagagctggattttagtccaggtctgtctacagctctaacgtatatacaccctttgtataacatgtcacgaattcagcataaagggatcttcagtgatctaagtcaggggtcagcaaccttttctaaaaaggaccaaatagtaatatttcaggctttgtggaccctatggtctctatcataactgttcaaatcaccatgtagtgtaaaaggagccataagcaaaatataaactaacgaatgtggctgttttatgggatttttttttaactctttatttacaaaagcaggtggcagatcagaactcacttatgggccatagttctctgacccctgacctgagaaaatcttatatttatggacaacatttagactgtgacttgccaagtaagaacaagaagctctgtcaactgaaggtcaaggctggagttctgaaagcaaagagctgtctggtgttaatgataagtgaaatagttaaagttagaagatcccagttataagaagcacaaagaataatgaccatagactcctgaacaagaatgtctggacttctggcttaggcactcttgttgtatggtccaggccaagttacctaatctctccaggcctccattttcttatcattaaatgaagataataaaagtattttcctcagagagctgtaagaataaactgagctaacccatgtcaagcacatagaatagggcccagcctatattaatttatcaataaatgccag

SEQ ID NO: 9441 - protein, 80 aa, Homo sapiens
MILANVSNYFCQLFFILEKKFHEWVSKLISFKNLSCRYVWHPKTVLEKNFISPGLSLGQVGISLPFMCVTSENKERKKLK

SEQ ID NO: 9442 - DNA, 2274 bp, Homo sapiens
atttgaattggtgaacttagtaaagcagacggctctcaccaataagggcaggcatcatccaatctgtcgaaagcttgaataaaacaaaaagaggaagggaaaatttgcttcttttcttcttgatctagtatatcatcttctcctgcccttggatgtgagtgggccttcagacttaaaccaggagttacacctttggcttccctggttctcagttctttggacttggactgaattacactgccaggtttcctggttctccagcttgcagatggcagatcatgggacttcttggcctccataattgttttcatatctccaggcctttcattgggtcaggttggcatttcgctgccctttatgtgtgtgacaagtgaaaataaggaaagaaaaaaactcaagtgaagaaaatcagaatctgcgcagcagttcctgggcgtttcagctgcttcccacatcacctgcctcatcaagccccagcatccatctccttgctcatcttacaccctgtgtgcatgacaggcccaccattcatttatcagagcaaaggctctcccactattctggttcacccccctacttagccagatatacaagaatatctgcacggatgacctgcctcacctgggagctcagaggagctcagattccattactatcgcaccaaggacagatctcccagcaagaatgacagaaaagactaactgcccccaaaatctcccttccaaaacacagttctcttaattctcccaagaaaccagaatgtgactgctcacctctctaaggacctgaaaacaactggccatttcagctatttaaatcaactttaaaaaatccaaccgccaaaatattaaaccattttggttggaatgataacataactaacctgctgacagctgcttctgctaggtgcaaaaatggaaaaaaaaatacttctaatcaggtcaaatcactctacctttgggattctaaatttactcatattctcaaagaaatatattcagtcatagtggggaaaataggattattcctttagctcgataagcaaccagaagttcttccttcaaatcttgacatttaatcaatcagaaattgatttttggaaaactgtttcctatgaagctatctctgcctgaaggatttttcttttacaatccagactatagaaggaaattcacaacctggactttcacctccattggtcagagttttactgaccaattcccacctctgccttacacctaacggaagtttatgcctgttttctcttcacataccccaacagttacaaatggttgttattattaagcatcttttattttgtggcctctgattacatggtcccctaaattttgacctaatcacaaaagattggtaaaatttcttaacatattaataatattttgtttatgtgtcaatatcttagcatgtatcaattaagacagaggtcttaacgttctctttttgaaagagaatattaggattcagagatattaagagattctcccaggatcacagttaggtaacagagctggattttagtccaggtctgtctacagctctaacgtatatacaccctttgtataacatgtcacgaattcagcataaagggatcttcagtgatctaagtcaggggtcagcaaccttttctaaaaaggaccaaatagtaatatttcaggctttgtggaccctatggtctctatcataactgttcaaatcaccatgtagtgtaaaaggagccataagcaaaatataaactaacgaatgtggctgttttatgggatttttttttaactctttatttacaaaagcaggtggcagatcagaactcacttatgggccatagttctctgacccctgacctgagaaaatcttatatttatggacaacatttagactgtgacttgccaagtaagaacaagaagctctgtcaactgaaggtcaaggctggagttctgaaagcaaagagctgtctggtgttaatgataagtgaaatagttaaagttagaagatcccagttataagaagcacaaagaataatgaccatagactcctgaacaagaatgtctggacttctggcttaggcactcttgttgtatggtccaggccaagttacctaatctctccaggcctccattttcttatcattaaatgaagataataaaagtattttcctcagagagctgtaagaataaactgagctaacccatgtcaagcacatagaatagggcccagcctatattaatttatcaataaatgccagctacatattagttc

SEQ ID NO: 9443 - protein, 31 aa, Homo sapiens
MGLLGLHNCFHISRPFIGSGWHFAALYVCDK

SEQ ID NO: 9444 - DNA, 2235 bp, Homo sapiens
atttgaattggtgaacttagtaaagcagacggctctcaccaataagggcaggcatcatccaatctgtcgaaagcttgaataaaacaaaaagaggaagggaaaatttgcttcttttcttcttgatctagtatatcatcttctcctgcccttggatgtgagtgggccttcagacttaaaccaggagttacacctttggcttccctggttctcagttctttggacttggactgaattacactgccaggtttcctggttctccagcttgcagatggcagatcatgggacttcttggcctccataattgttatccccactgtgtagagctggtccacaatggagaggaggaaaagttttgcattggaccaaatcactgccttagaaggaaagagattgcaatcccattcatttttaagatctgcaatgggttgggatgatacccatttaaaaaagaaaaaaaaagaggttacctctttggcctctttggcaaaggatatgaactagtaataaagcctcagcatcaaggcttgggagtctggctcaaagtggctaagactagaagcatcttctaacataaatatggcagcattaggaaaatagcttggcctttagagagacccagattatcttcaccttaaaaactaccaagaccctggtccagcaagaccaccatcacagcagtaaatacatagccaccaacttcacagaaggttttccactgagacattgtgaaaaccacaatccattaccggtggatgagtcccagctctcttactacctggagcttccaagcaagacttacctgtcctttgttccagattggttcctgggatcctggaccaacacaaagagaagaggaaagcctcaagggaaataaaagtgaaggtttcagtgatagtttaaatatatatttttaaatgttagcttttttttaaatacttcacagtgatggatggagtatttcaaccacaatggcaaagaatgaattaccggcagtgtcagagtttcttgttgctgtgggaagacagctgccatgttgagaggtgccttgtggagaggctcatgtggcgaggaactgagactggcttctatccaacaaccagtgaggaactaaggccctaaagtcctatagtccacaaggaactaaatcctaccaacaactacatgagtgagcctggaatctgattttccccagtggggacttaaggtacctacaacctggctgttatgggctaaactgcatcctgcccaaatttatatgtttgagtcttaactcccagcacttcagaacatggttttgtttggagacatagtcattaaagaggtaatgaagttaaaatgaggtcattaggatgagtcctaatccaataggactggtgttcttatatgaagaggaaatttgaacacagacacatatacaggaaagaccatgcgaagaagacacagagaggaaacggccatctacaatccaaggagagaggcctcagaacaagccaaccctgcagataccttgatctaggcatccagaattgtatgaaaatacatttttgttatttaagctacccagtctgtggtgctttgttatggcaatcccagaaaactaattaactaattgactgcagccttgcaagggaccctgaaccagaggacccagttaagccatgtgcagattcctgactcacagaactaggagataacaaatgtttgttgttctaaggtgctaaatgttgggaaaatatgttatgtggctatgttgttttgcacatgtgccacataatgatgttttggtcaacaacagaccacacatatgatggtgggcccataagattgtaatactgtgtttctattatgcattctctatttatagatacacaaatacttgccactgtgttacaattgcctactgtcttcagtactgtaacatgctgtacaggtttgtagcccagaagcaatagactataccatacagtctgggtgtgtagtaggctataccatctatgtttgtgaagtacactctatgatgttcacataattatgaagttgcctagtgatgcatttctcagaatgcatgcccgacattaagtgacacttggctttatgtctatcatgcatttaagatattgcaatatagttaacttatgttttaatacacctcttaattctgttttgatcccacaccaaccaagatgcaaaactaattttttcgcccatttccataaaaaacacaattacaatggg

SEQ ID NO: 9445 - protein, 51 aa, Homo sapiens
MGLLGLHNCYPHCVELVHNGEEEKFCIGPNHCLRRKEIAIPFIFKICNGLG

SEQ ID NO: 9446 - DNA, 3897 bp, Homo sapiens; identical to SEQ ID NO: 1368

SEQ ID NO: 9447 - protein, 80 aa, Homo sapiens; identical to SEQ ID NO: 9441

SEQ ID NO: 9448 - DNA, 1577 bp, Homo sapiens
tttgcaggcccggcacagtctcagttccccacagcacagagaggaagcaaggtctttgcatgccctgttcacttggccaaacattgccctagatgtgcaattcaacccatataaagcaagcgtaattcaagagccctgactctttcaccatttcatgatggcttattactcgcacacggcattgtcaggttccagcaactctgtgtgcagcaggcagaaatgcagtgtttatctctgacaggcaaacattcttaggctcatcggcatgagtatccacgctgaactggctatcggggaagtagatccctgcatgggaaagtcaagtatccccactgtgtagagctggtccacaatggagaggaggaaaagttttgcattggaccaaatcactgccttagaaggaaagagattgcaatcccattcatttttaagatctgcaatgggttgggatgatacccatttaaaaaagaaaaaaaaagaggttacctctttggcctctttggcaaaggatatgaactagtaataaagcctcagcatcaaggcttgggagtctggctcaaagtggctaagactagaagcatcttctaacataaatatggcagcattaggaaaatagcttggcctttagagagacccagattatcttcaccttaaaaactaccaagaccctggtccagcaagaccaccatcacagcagtaaatacatagccaccaacttcacagaaggttttccactgagacattgtgaaaaccacaatccattaccggtggatgagtcccagctctcttactacctggagcttccaagcaagacttacctgtcctttgttccagattggttcctgggatcctggaccaacacaaagagaagaggaaagcctcaagggaaataaaagtgaaggtttcagtgatagtttaaatatatatttttaaatgttagcttttttttaaatacttcacagtgatggatggagtatttcaaccacaatggcaaagaatgaattaccggcagtgtcagagtttcttgttgctgtgggaagacagctgccatgttgagaggtgccttgtggagaggctcatgtggcgaggaactgagactggcttctatccaacaaccagtgaggaactaaggccctaaagtcctatagtccacaaggaactaaatcctaccaacaactacatgagtgagcctggaatctgattttccccagtggggacttaaggtacctacaacctggctgttatgggctaaactgcatcctgcccaaatttatatgtttgagtcttaactcccagcacttcagaacatggttttgtttggagacatagtcattaaagaggtaatgaagttaaaatgaggtcattaggatgagtcctaatccaataggactggtgttcttatatgaagaggaaatttgaacacagacacatatacaggaaagaccatgcgaagaagacacagagaggaaacggccatctacaatccaaggagagaggcctcagaacaagccaaccctgcagataccttgatctaggcatccagaattgtatgaaaatacatttttgttatttaagct

SEQ ID NO: 9449 - protein, 57 aa, Homo sapiens
MKRKFEHRHIYRKDHAKKTQRGNGHLQSKERGLRTSQPCRYLDLGIQNCMKIHFCYL

SEQ ID NO: 9450 - DNA, 2254 bp, Homo sapiens
tttgcaggcccggcacagtctcagttccccacagcacagagaggaagcaaggtctttgcatgccctgttcacttggccaaacattgccctagatgtgcaattcaacccatataaagcaagcgtaattcaagagccctgactctttcaccatttcatgatggcttattactcgcacacggcattgtcaggttccagcaactctgtgtgcagcaggcagaaatgcagtgtttatctctgacaggcaaacattcttaggctcatcggcatgagtatccacgctgaactggctatcggggaagtagatccctgcatgggaaagtcaagtatccccactgtgtagagctggtccacaatggagaggaggaaaagttttgcattggaccaaatcactgccttagaaggaaagagattgcaatcccattcatttttaagatctgcaatgggttgggatgatacccatttaaaaaagaaaaaaaaagaggttacctctttggcctctttggcaaaggatatgaactagtaataaagcctcagcatcaaggcttgggagtctggctcaaagtggctaagactagaagcatcttctaacataaatatggcagcattaggaaaatagcttggcctttagagagacccagattatcttcaccttaaaaactaccaagaccctggtccagcaagaccaccatcacagcagtaaatacatagccaccaacttcacagaaggttttccactgagacattgtgaaaaccacaatccattaccggtggatgagtcccagctctcttactacctggagcttccaagcaagacttacctgtcctttgttccagattggttcctgggatcctggaccaacacaaagagaagaggaaagcctcaagggaaataaaagtgaaggtttcagtgatagtttaaatatatatttttaaatgttagcttttttttaaatacttcacagtgatggatggagtatttcaaccacaatggcaaagaatgaattaccggcagtgtcagagtttcttgttgctgtgggaagacagctgccatgttgagaggtgccttgtggagaggctcatgtggcgaggaactgagactggcttctatccaacaaccagtgaggaactaaggccctaaagtcctatagtccacaaggaactaaatcctaccaacaactacatgagtgagcctggaatctgattttccccagtggggacttaaggtacctacaacctggctgttatgggctaaactgcatcctgcccaaatttatatgtttgagtcttaactcccagcacttcagaacatggttttgtttggagacatagtcattaaagaggtaatgaagttaaaatgaggtcattaggatgagtcctaatccaataggactggtgttcttatatgaagaggaaatttgaacacagacacatatacaggaaagaccatgcgaagaagacacagagaggaaacggccatctacaatccaaggagagaggcctcagaacaagccaaccctgcagataccttgatctaggcatccagaattgtatgaaaatacatttttgttatttaagctacccagtctgtggtgctttgttatggcaatcccagaaaactaattaactaattgactgcagccttgcaagggaccctgaaccagaggacccagttaagccatgtgcagattcctgactcacagaactaggagataacaaatgtttgttgttctaaggtgctaaatgttgggaaaatatgttatgtggctatgttgttttgcacatgtgccacataatgatgttttggtcaacaacagaccacacatatgatggtgggcccataagattgtaatactgtgtttctattatgcattctctatttatagatacacaaatacttgccactgtgttacaattgcctactgtcttcagtactgtaacatgctgtacaggtttgtagcccagaagcaatagactataccatacagtctgggtgtgtagtaggctataccatctatgtttgtgaagtacactctatgatgttcacataattatgaagttgcctagtgatgcatttctcagaatgcatgcccgacattaagtgacacttggctttatgtctatcatgcatttaagatattgcaatatagttaacttatgttttaatacacctcttaattctgttttgatcccacaccaaccaagatgcaaaactaattttttcgcccatttccataaaaaacacaattacaatggg

SEQ ID NO: 9451 - protein, 73 aa, Homo sapiens
MKRKFEHRHIYRKDHAKKTQRGNGHLQSKERGLRTSQPCRYLDLGIQNCMKIHFCYLSYPVCGALLWQSQKTN

SEQ ID NO: 9452 - DNA, 7379 bp, Homo sapiens
gcgctgcacacaggaactctccggcgaaggagggcgaggaggaaacggtgccggagcgcgcagggcttgctgccgccaccgccgctgcacaggctgccggagcgagcctgccgcgcgccgccctccccgctctccttcctgggcgagctgcggggatggggcggccgcgggagcccgagcgcgcgcaggaaccgccgccgccgccgcccgcgtctccgttgccgcgcgcctgagccgccgtcgccgccgcgcgccctgcccgggggcggcccccccagccccatggaggtctcccggaggaaggcgccgccgcgccccccgcgccccgcagcgccactgcccctgctcgcctatctgctggcactggcggctcccggccggggcgcggacgagcccgtgtggcggtcggagcaagccatcggagccatcgcggcgagccaggaggacggcgtgtttgtggcgagcggcagctgcctggaccagctggactacagcctggagcacagcctctcgcgcctgtaccgggaccaagcgggcaactgcacagagccggtctcgctggcgccccccgcgcggccccggcccgggagcagcttcagcaagctgctgctgccctaccgcgagggggcggccggcctcggggggctgctgctcaccggctggaccttcgaccggggcgcctgcgaggtgcggcccctgggcaacctgagccgcaactccctgcgcaacggcaccgaggtggtgtcgtgccacccgcagggctcgacggccggcgtggtgtaccgcgcgggccggaacaaccgctggtacctggcggtggccgccacctacgtgctgcctgagccggagacggcgagccgctgcaaccccgcggcatccgaccacgacacggccatcgcgctcaaggacacggaggggcgcagcctggccacgcaggagctggggcgcctcaagctgtgcgagggcgcgggcagcctgcacttcgtggacgcctttctctggaacggcagcatctacttcccctactacccctacaactacacgagcggcgctgccaccggctggcccagcatggcgcgcatcgcgcagagcaccgaggtgctgttccagggccaggcatccctcgactgcggccacggccaccccgacggccgccgcctgctcctctcctccagcctagtggaggccctggacgtctgggcgggagtgttcagcgcggccgctggagagggccaggagcggcgctcccccaccaccacggcgctctgcctcttcagaatgagtgagatccaggcgcgcgccaagagggtcagctgggacttcaagacggccgagagccactgcaaagaaggggatcaacctgaaagagtccaaccaatcgcatcatctaccttgatccattccgacctgacatccgtttatggcaccgtggtaatgaacaggactgttttattcttggggactggagatggccagttacttaaggttattcttggtgagaatttgacttcaaattgtccagaggttatctatgaaattaaagaagagacacctgttttctacaaactcgttcctgatcctgtgaagaatatctacatttatctaacagctgggaaagaggtgaggagaattcgtgttgcaaactgcaataaacataaatcctgttcggagtgtttaacagccacagaccctcactgcggttggtgccattcgctacaaaggtgcacttttcaaggagattgtgtacattcagagaacttagaaaactggctggatatttcgtctggagcaaaaaagtgccctaaaattcagataattcgaagcagtaaagaaaagactacagtgactatggtgggaagcttctctccaagacactcaaagtgcatggtgaagaatgtggactctagcagggagctctgccagaataaaagtcagcccaaccggacctgcacctgtagcatcccaaccagagcaacctacaaagatgtttcagttgtcaacgtgatgttctccttcggttcttggaatttatcagacagattcaactttaccaactgctcatcattaaaagaatgcccagcatgcgtagaaactggctgcgcgtggtgtaaaagtgcaagaaggtgtatccaccccttcacagcttgcgacccttctgattatgagagaaaccaggaacagtgtccagtggctgtcgagaagacatcaggaggaggaagacccaaggagaacaaggggaacagaaccaaccaggctttacaggtcttctacattaagtccattgagccacagaaagtatcgacattagggaaaagcaacgtgatagtaacgggagcaaactttacccgggcatcgaacatcacaatgatcctgaaaggaaccagtacctgtgataaggatgtgatacaggttagccatgtgctaaatgacacccacatgaaattctctcttccatcaagccggaaagaaatgaaggatgtgtgtatccagtttgatggtgggaactgctcttctgtgggatccttatcctacattgctctgccacattgttcccttatatttcctgctaccacctggatcagtggtggtcaaaatataaccatgatgggcagaaattttgatgtaattgacaacttaatcatttcacatgaattaaaaggaaacataaatgtctctgaatattgtgtggcgacttactgcgggtttttagcccccagtttaaagagttcaaaagtgcgcacgaatgtcactgtgaagctgagagtacaagacacctacttggattgtggaaccctgcagtatcgggaggaccccagattcacggggtatcgggtggaatccgaggtggacacagaactggaagtgaaaattcaaaaagaaaatgacaacttcaacatttccaaaaaagacattgaaattactctcttccatggggaaaatgggcaattaaattgcagttttgaaaatattactagaaatcaagatcttaccaccatcctttgcaaaattaaaggcatcaagactgcaagcaccattgccaactcttctaagaaagttcgggtcaagctgggaaacctggagctctacgtcgagcaggagtcagttccttccacatggtattttctgattgtgctccctgtcttgctagtgattgtcatttttgcggccgtgggggtgaccaggcacaaatcgaaggagctgagtcgcaaacagagtcaacaactagaattgctggaaagcgagctccggaaagagatacgtgacggctttgctgagctgcagatggataaattggatgtggttgatagttttggaactgttcccttccttgactacaaacattttgctctgagaactttcttccctgagtcaggtggcttcacccacatcttcactgaagatatgcataacagagacgccaacgacaagaatgaaagtctcacagctttggatgccctaatctgtaataaaagctttcttgttactgtcatccacacccttgaaaagcagaagaacttttctgtgaaggacaggtgtctgtttgcctccttcctaaccattgcactgcaaaccaagctggtctacctgaccagcatcctagaggtgctgaccagggacttgatggaacagtgtagtaacatgcagccgaaactcatgctgagacgcacggagtccgtcgtcgaaaaactcctcacaaactggatgtccgtctgcctttctggatttctccgggagactgtcggagagcccttctatttgctggtgacgactctgaaccagaaaattaacaagggtcccgtggatgtaatcacttgcaaagccctgtacacacttaatgaagactggctgttgtggcaggttccggaattcagtactgtggcattaaacgtcgtctttgaaaaaatcccggaaaacgagagtgcagatgtctgtcggaatatttcagtcaatgttctcgactgtgacaccattggccaagccaaagaaaagattttccaagcattcttaagcaaaaatggctctccttatggacttcagcttaatgaaattggtcttgagcttcaaatgggcacacgacagaaagaacttctggacatcgacagttcctccgtgattcttgaagatggaatcaccaagctaaacaccattggccactatgagatatcaaatggatccactataaaagtctttaagaagatagcaaattttacttcagatgtggagtactcggatgaccactgccatttgattttaccagattcggaagcattccaagatgtgcaaggaaagagacatcgagggaagcacaagttcaaagtaaaagaaatgtatctgacaaagctgctgtcgaccaaggtggcaattcattctgtgcttgaaaaactttttagaagcatttggagtttacccaacagcagagctccatttgctataaaatacttttttgactttttggacgcccaggctgaaaacaaaaaaatcacagatcctgacgtcgtacatatttggaaaacaaacagccttcctcttcgcttctgggtaaacatcctgaagaaccctcagtttgtctttgacattaagaagacaccacatatagacggctgtttgtcagtgattgcccaggcattcatggatgcattttctctcacagagcagcaactagggaaggaagcaccaactaataagcttctctatgccaaggatatcccaacctacaaagaagaagtaaaatcttattacaaagcaatcagggatttgcctccattgtcatcctcagaaatggaagaatttttaactcaggaatctaagaaacatgaaaatgaatttaatgaagaagtggccttgacagaaatttacaaatacatcgtaaaatattttgatgagattctaaataaactagaaagagaacgagggctggaagaagctcagaaacaactcttgcatgtaaaagtcttatttgatgaaaagaagaaatgcaagtggatgtaagcactctggggcctggcttaatctggcaaagttcttcagacgacttgggagcaaaatggctgcttgagctactctgtgtcgttaatttgttgtttgcacataggttccactttgggcactgtctttttaagagaccaaggcacatgcacagcttttagaaagcataccaacccttgtgcctgtgtgtataccgtgggaacccttctgtaaatagagttgaagtggttgttgcaaacagcctccttgtttacagagaatacaaggccagtaagcgaatgtcagtattgtaactacagtctccacttaagcacaatgatataagtggttttgtttgaaaactacagctatgtagcacttgtgctacactgcacctctgcattgtaaagggatactgccagtgctcaaaacaaaatgtgaaatgagtcatttggaaacaaggtgggggtgttagggcaacctcgaggatttgcagcattgaaactttccccagtagttcttggaaaagctgaccgcagaatttggtagtgtacacttagcatttgtgagtgtgtgtgtgtgtttaaaccaaaaactaacagtgttgcaacattgttgaaagggctcgtgtttttcagtggtcatcaactgcactccatcaaactcacctccatttcaccaaggagctctaaagtaaggagagtgggctttatttaaatgaacagcattttaaccagatactttgtcctaatgtatgttccttttcttcatctgttttttcatactaaatgtatttgatagtggacatgttggatattatacaaaaaaatcattaattcatttctgttccaaaacctttgatcagaacgatctgtggaagagtaactccatttctatatgagtgagtgtctccttgctttagatttctggtgaaccctgtggttatgaatacttgtgtgtgatttaaaaaaaaaaagatacattttacattttatcgaattgctgttcacactggagtattatatataaatatatatatttgaggcccaaggcctgaaaaatattagtatacaacttggtatcttagtcttactatgtactttttgaaagtattcctcgcaggagaaagaatttaaaatacccattttattcatgcctttctttttaaagaattctctatccagttatactgtagtctttttagtgctgattttttaattcctgaatttttgctgctcatgaccagttttaataccactgtgttttccttctattaaaccagaagaagtaaacagcataattggcaactcttgagcttttcttgtggcaggcaccttttacccttggtgctccaaatcccccatctaggaaagaaaattttttcaagtcaaataacattgatcacatattccttgaaatcatttaccaacactgtatggagcattaggatttaaatatgaatttgtcttaaaggcaattcctttttgcttctgtattatctggaaaagcatgagagaggtgacacctcaacaaactgatcagagaaaataagcagttactaccctgataggcaccttcccaatcctgttgcttttgaccattgtctgtccaacggacacacctcaaacaaacaaaactaccaaatagatgacagatcagaataaaggtgagaggtctggtccccattgaaggctgctacagtcttcaaagaggtgaaggagttcataagagaacaacagtaggaaagttgagagccaagggtaggagagttgcccaaaagacttcccctactactttagggtactgaaaactcaaaggatcagctacagctttatctaagtatttactaaatgctacatgagggtgtccctgtccagctttctggcacatgagtcctgtgtggagagttacctcctcttccagggactgtgctgttgggaactttgggcaagtcacttacctctttgtgcctcaatttctgtataatatttctaagctacctcactgaggtggtatgaagattcactaatgtatgtagcgtgtttgtcaatcctccagtgaaaagcactatctagatcacattttggatcacattagccaaatgcagtaaatggccaaattagatgtgtgctgaagacaatcagtcactgggtctatattaaacagcaaccagagcaacaaatggcaaacaatttctattttcaagtttctttgcatatttttttggtgcaaaaccatttataaacttttttttctaacactagtgtctacagcagcattcaaaaaaattctgttaccttttctgtattaggatttaaagtctatttcttattgtatacctgattgaagctgttcttggagatgaatgttttaaatgtctatatccaaaaaataaacattttgatgtaactgtg

SEQ ID NO: 9453 - protein, 1568 aa, Homo sapiens; identical to SEQ ID NO: 1371

SEQ ID NO: 9454 - DNA, 1604 bp, Homo sapiens
cgtgagccagccaggcctggccgctgggcctgaccggccccccagcccctacaccccgcttctcccggactctcccagcggacagccccccagccccacagcctgagcctcccagctgccatgtgcctgttgcacacctgcacacacgccctggcacacatacacacatgcgtgcaggcttgtgcagacactcagggatggagctgctgctgaagggacttgtagggagaggctcgtcaacaagcactgttctggaaccttctctccacgtggcccacaggcctgaccacaggggctgtgggtcctgcgtccccttcctcgggtgagcctggcctgtcccgttcagccgttgggcccaggcttcctcccctccaaggtgaaacactgcagtcccggtgtggtggctccccatgcaggacgggccaggctgggagtgccgccttcctgtgccaaattcagtggggactcagtgcccaggccctggccacgagctttggccttggtctacctgccaggccaggcaaagcgcctttacacaggcctcggaaaacaatggagtgagcacaagatgccctgtgcagctgcccgagggtctccgcccactctctggccgaagtggccgcaggctgtgcccccgagctgcccccaccccctcacagggtccctcagattataggtgcccaggctgaggtgaagaggcctgggggccctgccttccgggcgctcctggaccctggggcaaacctgtgacccttttctactggaatagaaatgagttttatcatctttgaaaaataattcactcttgaagtaataaacgtttaaaaaaatgggatgcctgcctctgtgacagccttgtttgctgaggtcgtgggggtgggggcctctgggaagttccgggctcctcttctcttggtcaatagctcctttctggtggctgccaagagcgtctctcccagggccgggctgctggcttaccttcctgttgttttcaaatttcaaccttgtgcaatgttgagtttcatagaaatactgcatgagtacgcccttgtttagaagcagcagggtctgagtcccatcccacagcccccagtgcagacgcttttgccacttttgcatggggccccctggatgtgtttctgtgcatttatctacaaatcctggtgcccataggacatgccccgtgttgttctaggcctttgctttctgctcgttacataaatggtgaagaagagaagcgggtaagagaacagattggagccatctaaaagttctcatcttaagtgtagatcattgcaaaggatggaattttctccgattgtcatcatcgttgatgtttgaatatgagaccatttcatcagtatttaagtgtgcccgctgggatctaactaggagaggagagggtattcactgccgaacatttcaaagaatatacgaacaagctcttttatggtcagaaatgttagcccttttccccttaaacttgtatttcctttcttcttccctcctaaaattttatctaaatgatatttatatttgatgcttttaagccttttattaatcactcctatacttgcctgcaacataaatatataagttgaagc

SEQ ID NO: 9455 - protein, 92 aa, Homo sapiens
MQDGPGWECRLPVPNSVGTQCPGPGHELWPWSTCQARQSAFTQASENNGVSTRCPVQLPEGLRPLSGRSGRRLCPRAAPTPSQGPSDYRCPG

SEQ ID NO: 9456 - DNA, 2057 bp, Homo sapiens
tcaacacataaacatacgttctcctcctgagggacagagcttgccccggttgttccatgttgactgtgctgcacacaggccgccccccttgctctgcccctcactgtattaagtctctttgggcctcagtttctccatctctaaaggaggtcggggaggccaggcgggtgttgagtgagatgaagaggcccttggagtcattccaggagtctataggtgactccagtctcttctcacttctgacagcctggtggcgggggtggagtctctgctggggatgtgggtacagggctgtggtgggcggggatgagggtggggtttggtgacagggcgtgggtggtcacccagctttgcctttctccacagggtcctgaggacaccgtgagccagccaggcctggccgctgggcctgaccggccccccagcccctacaccccgcttctcccggactctcccagcggacagccccccagccccacagcctgagcctcccagctgccatgtgcctgttgcacacctgcacacacgccctggcacacatacacacatgcgtgcaggcttgtgcagacactcagggatggagctgctgctgaagggacttgtagggagagggtggcccacaggcctgaccacaggggctgtgggtcctgcgtccccttcctcgggtgagcctggcctgtcccgttcagccgttgggcccaggcttcctcccctccaaggtgaaacactgcagtcccggtgtggtggctccccatgcaggacgggccaggctgggagtgccgccttcctgtgccaaattcagtggggactcagtgcccaggccctggccacgagctttggccttggtctacctgccaggccaggcaaagcgcctttacacaggcctcggaaaacaatggagtgagcacaagatgccctgtgcagctgcccgagggtctccgcccaccccggccggactttgatccccccgaagtcttcacaggcactgcatcgggttgtctggcgcccttttcctccagcctaaactgacatcatcctatggactgagccggccactctctggccgaagtggccgcaggctgtgcccccgagctgcccccaccccctcacagggtccctcagattataggtgcccaggctgaggtgaagaggcctgggggccctgccttccgggcgctcctggaccctggggcaaacctgtgacccttttctactggaatagaaatgagttttatcatctttgaaaaataattcactcttgaagtaataaacgtttaaaaaaatgggatgcctgcctctgtgacagccttgtttgctgaggtcgtgggggtgggggcctctgggaagttccgggctcctcttctcttggtcaatagctcctttctggtggctgccaagagcgtctctcccagggccgggctgctggcttaccttcctgttgttttcaaatttcaaccttgtgcaatgttgagtttcatagaaatactgcatgagtacgcccttgtttagaagcagcagggtctgagtcccatcccacagcccccagtgcagacgcttttgccacttttgcatggggccccctggatgtgtttctgtgcatttatctacaaatcctggtgcccataggacatgccccgtgttgttctaggcctttgctttctgctcgttacataaatggtgaagaagagaagcgggtaagagaacagattggagccatctaaaagttctcatcttaagtgtagatcattgcaaaggatggaattttctccgattgtcatcatcgttgatgtttgaatatgagaccatttcatcagtatttaagtgtgcccgctgggatctaactaggagaggagagggtattcactgccgaacatttcaaagaatatacgaacaagctcttttatggtcagaaatgttagcccttttccccttaaacttgtatttcctttcttcttccctcctaaaattttatctaaatgatatttatatttgatgcttttaagccttttattaatcactcctatacttgcctgcaacataaatatataagttgaagc

SEQ ID NO: 9457 - protein, 118 aa, Homo sapiens
MRAGLCRHSGMELLLKGLVGRGWPTGLTTGAVGPASPSSGEPGLSRSAVGPRLPPLQGETLQSRCGGSPCRTGQAGSAAFLCQIQWGLSAQALATSFGLGLPARPGKAPLHRPRKTME

SEQ ID NO: 9458 - DNA, 2523 bp, Homo sapiens
gtttttatgtaatttgtcctgatttaaaaaaaaaaaatcacatgcgggtaaactcaacatattttaatttctctttagagaaattttccacttgagccaggtatggtggctcttgcctgtaatctgagctactcgggaggttgaggtgggaggatcacttgagcccaggagttggaggctgcagtgagccatgatcgcaccattgcactccagcctggacaacagagtgagatcctgtctcaaaaattaaaaaaagcagtaattttttcttctcaagtcattcttttaaaataaatcaaaagtattttaacagaacaatctgttcctcgttgattttaaacagccccccagctaagtccactggttgtcggtctccatggcccatctccccaccttgcttcctcgctggcttaaattttcaagtggacgagcccttttcagcttggcttgtccacctcccaggtgtgtttcctgaagatgcttgtacttatgtctaagagcggcagctccccacatctcagccacctgcaatcgttgagggttgttggactctaaacttatgtgcctttcctgtttcctctttgccttttgcaaattgaagaaccgtgtaaaaccatttttatgtggcttcaacgtcaactataaattagcttggttatcttctaggagaaatgctatttattttggagtagtagtaaaaagggctcaaaggataaggaggccattcaggcctattctgaatccctgatgacatcagctcccaagggctctgtgctgcaggaagcaaaactgtagggtcctgaggacaccgtgagccagccaggcctggccgctgggcctgaccggccccccagcccctacaccccgcttctcccggactctcccagcggacagccccccagccccacagcctgagcctcccagctgccatgtgcctgttgcacacctgcacacacgccctggcacacatacacacatgcgtgcaggcttgtgcagacactcagggatggagctgctgctgaagggacttgtagggagaggctcgtcaacaagcactgttctggaaccttctctccacgtggcccacaggcctgaccacaggggctgtgggtcctgcgtccccttcctcgggtgagcctggcctgtcccgttcagccgttgggcccaggcttcctcccctccaaggtgaaacactgcagtcccggtgtggtggctccccatgcaggacgggccaggctgggagtgccgccttcctgtgccaaattcagtggggactcagtgcccaggccctggccacgagctttggccttggtctacctgccaggccaggcaaagcgcctttacacaggcctcggaaaacaatggagtgagcacaagatgccctgtgcagctgcccgagggtctccgcccaccccggccggactttgatccccccgaagtcttcacaggcactgcatcgggttgtctggcgcccttttcctccagcctaaactgacatcatcctatggactgagccggccactctctggccgaagtggccgcaggctgtgcccccgagctgcccccaccccctcacagggtccctcagattataggtgcccaggctgaggtgaagaggcctgggggccctgccttccgggcgctcctggaccctggggcaaacctgtgacccttttctactggaatagaaatgagttttatcatctttgaaaaataattcactcttgaagtaataaacgtttaaaaaaatgggatgcctgcctctgtgacagccttgtttgctgaggtcgtgggggtgggggcctctgggaagttccgggctcctcttctcttggtcaatagctcctttctggtggctgccaagagcgtctctcccagggccgggctgctggcttaccttcctgttgttttcaaatttcaaccttgtgcaatgttgagtttcatagaaatactgcatgagtacgcccttgtttagaagcagcagggtctgagtcccatcccacagcccccagtgcagacgcttttgccacttttgcatggggccccctggatgtgtttctgtgcatttatctacaaatcctggtgcccataggacatgccccgtgttgttctaggcctttgctttctgctcgttacataaatggtgaagaagagaagcgggtaagagaacagattggagccatctaaaagttctcatcttaagtgtagatcattgcaaaggatggaattttctccgattgtcatcatcgttgatgtttgaatatgagaccatttcatcagtatttaagtgtgcccgctgggatctaactaggagaggagagggtattcactgccgaacatttcaaagaatatacgaacaagctcttttatggtcagaaatgttagcccttttccccttaaacttgtatttcctttcttcttccctcctaaaattttatctaaatgatatttatatttgatgcttttaagccttttattaatcactcctatacttgcctgcaacataaatatataagttgaagc

SEQ ID NO: 9459 - protein, 91 aa, Homo sapiens
MQDGPGWECRLPVPNSVGTQCPGPGHELWPWSTCQARQSAFTQASENNGVSTRCPVQLPEGLRPPRPDFDPPEVFTGTASGCLAPFSSSLN

SEQ ID NO: 9460 - DNA, 3382 bp, Homo sapiens
gctcaggccccgcccctgccgccggaatcctgaagcccaaggctgcccgggggcggtccggcggcgccggcgatggggcataaaaccactggccacctgccgggctgctcctgcgtgcgctgccgtcccggatccaccgtgcctctgcggcctgcgtgcccggagtccccgcctgtgtcgtctctgtcgccgtccccgtctcctgccaggcgcggagccctgcgagccgcgggtgggccccaggcgcgcagacatgggctgctccgccaaagcgcgctgggctgccggggcgctgggcgtcgcggggctactgtgcgctgtgctgggcgctgtcatgatcgtgatggtgccgtcgctcatcaagcagcaggtccttaagaacgtgcgcatcgaccccagtagcctgtccttcaacatgtggaaggagatccctatccccttctatctctccgtctacttctttgacgtcatgaaccccagcgagatcctgaagggcgagaagccgcaggtgcgggagcgcgggccctacgtgtacagggagttcaggcacaaaagcaacatcaccttcaacaacaacgacaccgtgtccttcctcgagtaccgcaccttccagttccagccctccaagtcccacggctcggagagcgactacatcgtcatgcccaacatcctggtcttgggtgcggcggtgatgatggagaataagcccatgaccctgaagctcatcatgaccttggcattcaccaccctcggcgaacgtgccttcatgaaccgcactgtgggtgagatcatgtggggctacaaggacccccttgtgaatctcatcaacaagtactttccaggcatgttccccttcaaggacaagttcggattatttgctgagctcaacaactccgactctgggctcttcacggtgttcacgggggtccagaacatcagcaggatccacctcgtggacaagtggaacgggctgagcaaggttgacttctggcattccgatcagtgcaacatgatcaatggaacttctgggcaaatgtggccgcccttcatgactcctgagtcctcgctggagttctacagcccggaggcctgccgatccatgaagctaatgtacaaggagtcaggggtgtttgaaggcatccccacctatcgcttcgtggctcccaaaaccctgtttgccaacgggtccatctacccacccaacgaaggcttctgcccgtgcctggagtctggaattcagaacgtcagcacctgcaggttcagtgcccccttgtttctctcccatcctcacttcctcaacgctgacccggttctggcagaagcggtgactggcctgcaccctaaccaggaggcacactccttgttcctggacatccacccggtcacgggaatccccatgaactgctctgtgaaactgcagctgagcctctacatgaaatctgtcgcaggcattggacaaactgggaagattgagcctgtggtcctgccgctgctctggtttgcagagagcggggccatggagggggagactcttcacacattctacactcagctggtgttgatgcccaaggtgatgcactatgcccagtacgtcctcctggcgctgggctgcgtcctgctgctggtccctgtcatctgccaaatccggagccaaggtcctgaggacaccgtgagccagccaggcctggccgctgggcctgaccggccccccagcccctacaccccgcttctcccggactctcccagcggacagccccccagccccacagcctgagcctcccagctgccatgtgcctgttgcacacctgcacacacgccctggcacacatacacacatgcgtgcaggcttgtgcagacactcagggatggagctgctgctgaagggacttgtagggagaggctcgtcaacaagcactgttctggaaccttctctccacgtggcccacaggcctgaccacaggggctgtgggtcctgcgtccccttcctcgggtgagcctggcctgtcccgttcagccgttgggcccaggcttcctcccctccaaggtgaaacactgcagtcccggtgtggtggctccccatgcaggacgggccaggctgggagtgccgccttcctgtgccaaattcagtggggactcagtgcccaggccctggccacgagctttggccttggtctacctgccaggccaggcaaagcgcctttacacaggcctcggaaaacaatggagtgagcacaagatgccctgtgcagctgcccgagggtctccgcccaccccggccggactttgatccccccgaagtcttcacaggcactgcatcgggttgtctggcgcccttttcctccagcctaaactgacatcatcctatggactgagccggccactctctggccgaagtggccgcaggctgtgcccccgagctgcccccaccccctcacagggtccctcagattataggtgcccaggctgaggtgaagaggcctgggggccctgccttccgggcgctcctggaccctggggcaaacctgtgacccttttctactggaatagaaatgagttttatcatctttgaaaaataattcactcttgaagtaataaacgtttaaaaaaatgggatgcctgcctctgtgacagccttgtttgctgaggtcgtgggggtgggggcctctgggaagttccgggctcctcttctcttggtcaatagctcctttctggtggctgccaagagcgtctctcccagggccgggctgctggcttaccttcctgttgttttcaaatttcaaccttgtgcaatgttgagtttcatagaaatactgcatgagtacgcccttgtttagaagcagcagggtctgagtcccatcccacagcccccagtgcagacgcttttgccacttttgcatggggccccctggatgtgtttctgtgcatttatctacaaatcctggtgcccataggacatgccccgtgttgttctaggcctttgctttctgctcgttacataaatggtgaagaagagaagcgggtaagagaacagattggagccatctaaaagttctcatcttaagtgtagatcattgcaaaggatggaattttctccgattgtcatcatcgttgatgtttgaatatgagaccatttcatcagtatttaagtgtgcccgctgggatctaactaggagaggagagggtattcactgccgaacatttcaaagaatatacgaacaagctcttttatggtcagaaatgttagcccttttccccttaaacttgtatttcctttcttcttccctcctaaaattttatctaaatgatatttatatttgatgcttttaagccttttattaatcactcctatacttgcctgcaacataaatatataagttgaagc

SEQ ID NO: 9461 - protein, 506 aa, Homo sapiens
MGCSAKARWAAGALGVAGLLCAVLGAVMIVMVPSLIKQQVLKNVRIDPSSLSFNMWKEIPIPFYLSVYFFDVMNPSEILKGEKPQVRERGPYVYREFRHKSNITFNNNDTVSFLEYRTFQFQPSKSHGSESDYIVMPNILVLGAAVMMENKPMTLKLIMTLAFTTLGERAFMNRTVGEIMWGYKDPLVNLINKYFPGMFPFKDKFGLFAELNNSDSGLFTVFTGVQNISRIHLVDKWNGLSKVDFWHSDQCNMINGTSGQMWPPFMTPESSLEFYSPEACRSMKLMYKESGVFEGIPTYRFVAPKTLFANGSIYPPNEGFCPCLESGIQNVSTCRFSAPLFLSHPHFLNADPVLAEAVTGLHPNQEAHSLFLDIHPVTGIPMNCSVKLQLSLYMKSVAGIGQTGKIEPVVLPLLWFAESGAMEGETLHTFYTQLVLMPKVMHYAQYVLLALGCVLLLVPVICQIRSQGPEDTVSQPGLAAGPDRPPSPYTPLLPDSPSGQPPSPTA

SEQ ID NO: 9462 - DNA, 834 bp, Homo sapiens
cgtgagccagccaggcctggccgctgggcctgaccggccccccagcccctacaccccgcttctcccggactctcccagcggacagccccccagccccacagcctgagcctcccagctgccatgtgcctgttgcacacctgcacacacgccctggcacacatacacacatgcgtgcaggcttgtgcagacactcagggatggagctgctgctgaagggacttgtagggagaggctcgtcaacaagcactgttctggaaccttctctccacgtggcccacaggcctgaccacaggggctgtgggtcctgcgtccccttcctcgggtgagcctggcctgtcccgttcagccgttgggcccaggcttcctcccctccaaggtgaaacactgcagtcccggtgtggtggctccccatgcaggacgggccaggctgggagtgccgccttcctgtgccaaattcagtggggactcagtgcccaggccctggccacgagctttggccttggtctacctgccaggccaggcaaagcgcctttacacaggcctcggaaaacaatggagtgagcacaagatgccctgtgcagctgcccgagggtctccgcccactctctggccgaagtggccgcaggctgtgcccccgagctgcccccaccccctcacagggtccctcagattataggtgcccaggctgaggtgaagaggcctgggggccctgccttccgggcgctcctggaccctggggcaaacctgtgacccttttctactggaatagaaatgagttttatcatctttgaaaaataattcactcttgaagtaataaacgtttaaaaaaatggg

SEQ ID NO: 9463 - protein, 92 aa, Homo sapiens; identical to SEQ ID NO: 9455

SEQ ID NO: 9464 - DNA, 1287 bp, Homo sapiens
tcaacacataaacatacgttctcctcctgagggacagagcttgccccggttgttccatgttgactgtgctgcacacaggccgccccccttgctctgcccctcactgtattaagtctctttgggcctcagtttctccatctctaaaggaggtcggggaggccaggcgggtgttgagtgagatgaagaggcccttggagtcattccaggagtctataggtgactccagtctcttctcacttctgacagcctggtggcgggggtggagtctctgctggggatgtgggtacagggctgtggtgggcggggatgagggtggggtttggtgacagggcgtgggtggtcacccagctttgcctttctccacagggtcctgaggacaccgtgagccagccaggcctggccgctgggcctgaccggccccccagcccctacaccccgcttctcccggactctcccagcggacagccccccagccccacagcctgagcctcccagctgccatgtgcctgttgcacacctgcacacacgccctggcacacatacacacatgcgtgcaggcttgtgcagacactcagggatggagctgctgctgaagggacttgtagggagagggtggcccacaggcctgaccacaggggctgtgggtcctgcgtccccttcctcgggtgagcctggcctgtcccgttcagccgttgggcccaggcttcctcccctccaaggtgaaacactgcagtcccggtgtggtggctccccatgcaggacgggccaggctgggagtgccgccttcctgtgccaaattcagtggggactcagtgcccaggccctggccacgagctttggccttggtctacctgccaggccaggcaaagcgcctttacacaggcctcggaaaacaatggagtgagcacaagatgccctgtgcagctgcccgagggtctccgcccaccccggccggactttgatccccccgaagtcttcacaggcactgcatcgggttgtctggcgcccttttcctccagcctaaactgacatcatcctatggactgagccggccactctctggccgaagtggccgcaggctgtgcccccgagctgcccccaccccctcacagggtccctcagattataggtgcccaggctgaggtgaagaggcctgggggccctgccttccgggcgctcctggaccctggggcaaacctgtgacccttttctactggaatagaaatgagttttatcatctttgaaaaataattcactcttgaagtaataaacgtttaaaaaaatggg

SEQ ID NO: 9465 - protein, 118 aa, Homo sapiens; identical to SEQ ID NO: 9457

SEQ ID NO: 9466 - DNA, 1753 bp, Homo sapiens
gtttttatgtaatttgtcctgatttaaaaaaaaaaaatcacatgcgggtaaactcaacatattttaatttctctttagagaaattttccacttgagccaggtatggtggctcttgcctgtaatctgagctactcgggaggttgaggtgggaggatcacttgagcccaggagttggaggctgcagtgagccatgatcgcaccattgcactccagcctggacaacagagtgagatcctgtctcaaaaattaaaaaaagcagtaattttttcttctcaagtcattcttttaaaataaatcaaaagtattttaacagaacaatctgttcctcgttgattttaaacagccccccagctaagtccactggttgtcggtctccatggcccatctccccaccttgcttcctcgctggcttaaattttcaagtggacgagcccttttcagcttggcttgtccacctcccaggtgtgtttcctgaagatgcttgtacttatgtctaagagcggcagctccccacatctcagccacctgcaatcgttgagggttgttggactctaaacttatgtgcctttcctgtttcctctttgccttttgcaaattgaagaaccgtgtaaaaccatttttatgtggcttcaacgtcaactataaattagcttggttatcttctaggagaaatgctatttattttggagtagtagtaaaaagggctcaaaggataaggaggccattcaggcctattctgaatccctgatgacatcagctcccaagggctctgtgctgcaggaagcaaaactgtagggtcctgaggacaccgtgagccagccaggcctggccgctgggcctgaccggccccccagcccctacaccccgcttctcccggactctcccagcggacagccccccagccccacagcctgagcctcccagctgccatgtgcctgttgcacacctgcacacacgccctggcacacatacacacatgcgtgcaggcttgtgcagacactcagggatggagctgctgctgaagggacttgtagggagaggctcgtcaacaagcactgttctggaaccttctctccacgtggcccacaggcctgaccacaggggctgtgggtcctgcgtccccttcctcgggtgagcctggcctgtcccgttcagccgttgggcccaggcttcctcccctccaaggtgaaacactgcagtcccggtgtggtggctccccatgcaggacgggccaggctgggagtgccgccttcctgtgccaaattcagtggggactcagtgcccaggccctggccacgagctttggccttggtctacctgccaggccaggcaaagcgcctttacacaggcctcggaaaacaatggagtgagcacaagatgccctgtgcagctgcccgagggtctccgcccaccccggccggactttgatccccccgaagtcttcacaggcactgcatcgggttgtctggcgcccttttcctccagcctaaactgacatcatcctatggactgagccggccactctctggccgaagtggccgcaggctgtgcccccgagctgcccccaccccctcacagggtccctcagattataggtgcccaggctgaggtgaagaggcctgggggccctgccttccgggcgctcctggaccctggggcaaacctgtgacccttttctactggaatagaaatgagttttatcatctttgaaaaataattcactcttgaagtaataaacgtttaaaaaaatggg

SEQ ID NO: 9467 - protein, 91 aa, Homo sapiens; identical to SEQ ID NO: 9459

SEQ ID NO: 9468 - DNA, 2741 bp, Homo sapiens
gctcaggccccgcccctgccgccggaatcctgaagcccaaggctgcccgggggcggtccggcggcgccggcgatggggcataaaaccactggccacctgccgggctgctcctgcgtgcgctgccgtcccggatccaccgtgcctctgcggcctgcgtgcccggagtccccgcctgtgtcgtctctgtcgccgtccccgtctcctgccaggcgcggagccctgcgagccgcgggtgggccccaggcgcgcagacatgggctgctccgccaaagcgcgctgggctgccggggcgctgggcgtcgcggggctactgtgcgctgtgctgggcgctgtcatgatcgtgatggtgccgtcgctcatcaagcagcaggtccttaagaacgtgcgcatcgaccccagtagcctgtccttcaacatgtggaaggagatccctatccccttctatctctccgtctacttctttgacgtcatgaaccccagcgagatcctgaagggcgagaagccgcaggtgcgggagcgcgggccctacgtgtacagggagttcaggcacaaaagcaacatcaccttcaacaacaacgacaccgtgtccttcctcgagtaccgcaccttccagttccagccctccaagtcccacggctcggagagcgactacatcgtcatgcccaacatcctggtcttgggtgcggcggtgatgatggagaataagcccatgaccctgaagctcatcatgaccttggcattcaccaccctcggcgaacgtgccttcatgaaccgcactgtgggtgagatcatgtggggctacaaggacccccttgtgaatctcatcaacaagtactttccaggcatgttccccttcaaggacaagttcggattatttgctgagctcaacaactccgactctgggctcttcacggtgttcacgggggtccagaacatcagcaggatccacctcgtggacaagtggaacgggctgagcaaggttgacttctggcattccgatcagtgcaacatgatcaatggaacttctgggcaaatgtggccgcccttcatgactcctgagtcctcgctggagttctacagcccggaggcctgccgatccatgaagctaatgtacaaggagtcaggggtgtttgaaggcatccccacctatcgcttcgtggctcccaaaaccctgtttgccaacgggtccatctacccacccaacgaaggcttctgcccgtgcctggagtctggaattcagaacgtcagcacctgcaggttcagtgcccccttgtttctctcccatcctcacttcctcaacgctgacccggttctggcagaagcggtgactggcctgcaccctaaccaggaggcacactccttgttcctggacatccacccggtcacgggaatccccatgaactgctctgtgaaactgcagctgagcctctacatgaaatctgtcgcaggcattggacaaactgggaagattgagcctgtggtcctgccgctgctctggtttgcagagagcggggccatggagggggagactcttcacacattctacactcagctggtgttgatgcccaaggtgatgcactatgcccagtacgtcctcctggcgctgggctgcgtcctgctgctggtccctgtcatctgccaaatccggagccaagagaaatgctatttattttggagtagtagtaaaaagggctcaaaggataaggaggccattcaggcctattctgaatccctgatgacatcagctcccaagggctctgtgctgcaggaagcaaaactgtagggtcctgaggacaccgtgagccagccaggcctggccgctgggcctgaccggccccccagcccctacaccccgcttctcccggactctcccagcggacagccccccagccccacagcctgagcctcccagctgccatgtgcctgttgcacacctgcacacacgccctggcacacatacacacatgcgtgcaggcttgtgcagacactcagggatggagctgctgctgaagggacttgtagggagaggctcgtcaacaagcactgttctggaaccttctctccacgtggcccacaggcctgaccacaggggctgtgggtcctgcgtccccttcctcgggtgagcctggcctgtcccgttcagccgttgggcccaggcttcctcccctccaaggtgaaacactgcagtcccggtgtggtggctccccatgcaggacgggccaggctgggagtgccgccttcctgtgccaaattcagtggggactcagtgcccaggccctggccacgagctttggccttggtctacctgccaggccaggcaaagcgcctttacacaggcctcggaaaacaatggagtgagcacaagatgccctgtgcagctgcccgagggtctccgcccaccccggccggactttgatccccccgaagtcttcacaggcactgcatcgggttgtctggcgcccttttcctccagcctaaactgacatcatcctatggactgagccggccactctctggccgaagtggccgcaggctgtgcccccgagctgcccccaccccctcacagggtccctcagattataggtgcccaggctgaggtgaagaggcctgggggccctgccttccgggcgctcctggaccctggggcaaacctgtgacccttttctactggaatagaaatgagttttatcatctttgaaaaataattcactcttgaagtaataaacgtttaaaaaaatggg

SEQ ID NO: 9469 - protein, 509 aa, Homo sapiens; identical to SEQ ID NO: 1373

SEQ ID NO: 9470 - DNA, 2612 bp, Homo sapiens
gctcaggccccgcccctgccgccggaatcctgaagcccaaggctgcccgggggcggtccggcggcgccggcgatggggcataaaaccactggccacctgccgggctgctcctgcgtgcgctgccgtcccggatccaccgtgcctctgcggcctgcgtgcccggagtccccgcctgtgtcgtctctgtcgccgtccccgtctcctgccaggcgcggagccctgcgagccgcgggtgggccccaggcgcgcagacatgggctgctccgccaaagcgcgctgggctgccggggcgctgggcgtcgcggggctactgtgcgctgtgctgggcgctgtcatgatcgtgatggtgccgtcgctcatcaagcagcaggtccttaagaacgtgcgcatcgaccccagtagcctgtccttcaacatgtggaaggagatccctatccccttctatctctccgtctacttctttgacgtcatgaaccccagcgagatcctgaagggcgagaagccgcaggtgcgggagcgcgggccctacgtgtacagggagttcaggcacaaaagcaacatcaccttcaacaacaacgacaccgtgtccttcctcgagtaccgcaccttccagttccagccctccaagtcccacggctcggagagcgactacatcgtcatgcccaacatcctggtcttgggtgcggcggtgatgatggagaataagcccatgaccctgaagctcatcatgaccttggcattcaccaccctcggcgaacgtgccttcatgaaccgcactgtgggtgagatcatgtggggctacaaggacccccttgtgaatctcatcaacaagtactttccaggcatgttccccttcaaggacaagttcggattatttgctgagctcaacaactccgactctgggctcttcacggtgttcacgggggtccagaacatcagcaggatccacctcgtggacaagtggaacgggctgagcaaggttgacttctggcattccgatcagtgcaacatgatcaatggaacttctgggcaaatgtggccgcccttcatgactcctgagtcctcgctggagttctacagcccggaggcctgccgatccatgaagctaatgtacaaggagtcaggggtgtttgaaggcatccccacctatcgcttcgtggctcccaaaaccctgtttgccaacgggtccatctacccacccaacgaaggcttctgcccgtgcctggagtctggaattcagaacgtcagcacctgcaggttcagtgcccccttgtttctctcccatcctcacttcctcaacgctgacccggttctggcagaagcggtgactggcctgcaccctaaccaggaggcacactccttgttcctggacatccacccggtcacgggaatccccatgaactgctctgtgaaactgcagctgagcctctacatgaaatctgtcgcaggcattggacaaactgggaagattgagcctgtggtcctgccgctgctctggtttgcagagagcggggccatggagggggagactcttcacacattctacactcagctggtgttgatgcccaaggtgatgcactatgcccagtacgtcctcctggcgctgggctgcgtcctgctgctggtccctgtcatctgccaaatccggagccaaggtcctgaggacaccgtgagccagccaggcctggccgctgggcctgaccggccccccagcccctacaccccgcttctcccggactctcccagcggacagccccccagccccacagcctgagcctcccagctgccatgtgcctgttgcacacctgcacacacgccctggcacacatacacacatgcgtgcaggcttgtgcagacactcagggatggagctgctgctgaagggacttgtagggagaggctcgtcaacaagcactgttctggaaccttctctccacgtggcccacaggcctgaccacaggggctgtgggtcctgcgtccccttcctcgggtgagcctggcctgtcccgttcagccgttgggcccaggcttcctcccctccaaggtgaaacactgcagtcccggtgtggtggctccccatgcaggacgggccaggctgggagtgccgccttcctgtgccaaattcagtggggactcagtgcccaggccctggccacgagctttggccttggtctacctgccaggccaggcaaagcgcctttacacaggcctcggaaaacaatggagtgagcacaagatgccctgtgcagctgcccgagggtctccgcccaccccggccggactttgatccccccgaagtcttcacaggcactgcatcgggttgtctggcgcccttttcctccagcctaaactgacatcatcctatggactgagccggccactctctggccgaagtggccgcaggctgtgcccccgagctgcccccaccccctcacagggtccctcagattataggtgcccaggctgaggtgaagaggcctgggggccctgccttccgggcgctcctggaccctggggcaaacctgtgacccttttctactggaatagaaatgagttttatcatctttgaaaaataattcactcttgaagtaataaacgtttaaaaaaatggg

SEQ ID NO: 9471 - protein, 506 aa, Homo sapiens; identical to SEQ ID NO: 9461

SEQ ID NO: 9472 - DNA, 2862 bp, Homo sapiens
gctcaggccccgcccctgccgccggaatcctgaagcccaaggctgcccgggggcggtccggcggcgccggcgatggggcataaaaccactggccacctgccgggctgctcctgcgtgcgctgccgtcccggatccaccgtgcctctgcggcctgcgtgcccggagtccccgcctgtgtcgtctctgtcgccgtccccgtctcctgccaggcgcggagccctgcgagccgcgggtgggccccaggcgcgcagacatgggctgctccgccaaagcgcgctgggctgccggggcgctgggcgtcgcggggctactgtgcgctgtgctgggcgctgtcatgatcgtgatggtgccgtcgctcatcaagcagcaggtccttaagaacgtgcgcatcgaccccagtagcctgtccttcaacatgtggaaggagatccctatccccttctatctctccgtctacttctttgacgtcatgaaccccagcgagatcctgaagggcgagaagccgcaggtgcgggagcgcgggccctacgtgtacagggagttcaggcacaaaagcaacatcaccttcaacaacaacgacaccgtgtccttcctcgagtaccgcaccttccagttccagccctccaagtcccacggctcggagagcgactacatcgtcatgcccaacatcctggtcttgggtgcggcggtgatgatggagaataagcccatgaccctgaagctcatcatgaccttggcattcaccaccctcggcgaacgtgccttcatgaaccgcactgtgggtgagatcatgtggggctacaaggacccccttgtgaatctcatcaacaagtactttccaggcatgttccccttcaaggacaagttcggattatttgctgagctcaacaactccgactctgggctcttcacggtgttcacgggggtccagaacatcagcaggatccacctcgtggacaagtggaacgggctgagcaaggttgacttctggcattccgatcagtgcaacatgatcaatggaacttctgggcaaatgtggccgcccttcatgactcctgagtcctcgctggagttctacagcccggaggcctgccgatccatgaagctaatgtacaaggagtcaggggtgtttgaaggcatccccacctatcgcttcgtggctcccaaaaccctgtttgccaacgggtccatctacccacccaacgaaggcttctgcccgtgcctggagtctggaattcagaacgtcagcacctgcaggttcagtgcccccttgtttctctcccatcctcacttcctcaacgctgacccggttctggcagaagcggtgactggcctgcaccctaaccaggaggcacactccttgttcctggacatccacccggtcacgggaatccccatgaactgctctgtgaaactgcagctgagcctctacatgaaatctgtcgcaggcattggacaaactgggaagattgagcctgtggtcctgccgctgctctggtttgcagagagcggggccatggagggggagactcttcacacattctacactcagctggtgttgatgcccaaggtgatgcactatgcccagtacgtcctcctggcgctgggctgcgtcctgctgctggtccctgtcatctgccaaatccggagccaagtaggtgctggccagagggcagcccgggctgacagccattcgcttgcctgctgggggaaaggggcctcagatcggaccctctggccaaccgcagcctggagcccacctccagcagcagtcctgcgtctctgccggagtgggagcggtcactgctgggggctgcgcagcacgcttgcgtcttttgcatgccgcgttgccactactctgcctgttctggaaggcctgggaccctcccttggagggggcacagggtcctgaggacaccgtgagccagccaggcctggccgctgggcctgaccggccccccagcccctacaccccgcttctcccggactctcccagcggacagccccccagccccacagcctgagcctcccagctgccatgtgcctgttgcacacctgcacacacgccctggcacacatacacacatgcgtgcaggcttgtgcagacactcagggatggagctgctgctgaagggacttgtagggagaggctcgtcaacaagcactgttctggaaccttctctccacgtggcccacaggcctgaccacaggggctgtgggtcctgcgtccccttcctcgggtgagcctggcctgtcccgttcagccgttgggcccaggcttcctcccctccaaggtgaaacactgcagtcccggtgtggtggctccccatgcaggacgggccaggctgggagtgccgccttcctgtgccaaattcagtggggactcagtgcccaggccctggccacgagctttggccttggtctacctgccaggccaggcaaagcgcctttacacaggcctcggaaaacaatggagtgagcacaagatgccctgtgcagctgcccgagggtctccgcccaccccggccggactttgatccccccgaagtcttcacaggcactgcatcgggttgtctggcgcccttttcctccagcctaaactgacatcatcctatggactgagccggccactctctggccgaagtggccgcaggctgtgcccccgagctgcccccaccccctcacagggtccctcagattataggtgcccaggctgaggtgaagaggcctgggggccctgccttccgggcgctcctggaccctggggcaaacctgtgacccttttctactggaatagaaatgagttttatcatctttgaaaaataattcactcttgaagtaataaacgtttaaaaaaatggg

SEQ ID NO: 9473 - protein, 552 aa, Homo sapiens
MGCSAKARWAAGALGVAGLLCAVLGAVMIVMVPSLIKQQVLKNVRIDPSSLSFNMWKEIPIPFYLSVYFFDVMNPSEILKGEKPQVRERGPYVYREFRHKSNITFNNNDTVSFLEYRTFQFQPSKSHGSESDYIVMPNILVLGAAVMMENKPMTLKLIMTLAFTTLGERAFMNRTVGEIMWGYKDPLVNLINKYFPGMFPFKDKFGLFAELNNSDSGLFTVFTGVQNISRIHLVDKWNGLSKVDFWHSDQCNMINGTSGQMWPPFMTPESSLEFYSPEACRSMKLMYKESGVFEGIPTYRFVAPKTLFANGSIYPPNEGFCPCLESGIQNVSTCRFSAPLFLSHPHFLNADPVLAEAVTGLHPNQEAHSLFLDIHPVTGIPMNCSVKLQLSLYMKSVAGIGQTGKIEPVVLPLLWFAESGAMEGETLHTFYTQLVLMPKVMHYAQYVLLALGCVLLLVPVICQIRSQVGAGQRAARADSHSLACWGKGASDRTLWPTAAWSPPPAAVLRLCRSGSGHCWGLRSTLASFACRVATTLPVLEGLGPSLGGGTGS

SEQ ID NO: 9474 - DNA, 1425 bp, Homo sapiens
cgttctgattttatgtggccgccctatctgctgggaacataggctgatgcccctgggggttctgcgtttccttggccaggttcctgtagggctgaggtcatgggggagccgtggccagggatggtgtccttgccaggggaggtgacgggcagagctgcaggccctacaacttggggttgggcagggatgagtcgctctaccgtggtgcctctgataatagctgttattttagtttctgaaaaatgtgctgccctcaagagcttctgaggctaggcctattggctgtctctaactcatctcacttgccagggctggacaaggagatgaaaaagaaaatgccaaggggtgggcaggcaggagcctgttggcgttggcaggcgctgccagccctgtgtcccagtcaagctctggggcgcccttcctgtccatctgggagtagggggtggagtctgaccatgttggggtggagtgttaatattaggagaggatcctccctgggacagggtccccaggcttgggggcaaggccttctgcctggacccccttcctttcctctctcccaggattcctccaggacaccgtagtgctgtgcacggtttggccccatcggtgtgcctgctccttccagccactgctcccttctgcagaaacttgcctgggattcccagggtgcaggggtgggggctggtcaggggctggtcagggcctggtcagtgtagagcagggagcttttcacttttagcatagatagagtggccagggccccatggctgcacctccctggacataaccaggatgtcctgtcatctgccccccaaacaaaactggggtctcccctttattttgccaacagaatccaatttttaggtgatgagacaagtgtttgacttgaaaagaccctcctgccctgcctcctggaaggtctggagcccagcccagcgccccggatcccctaggcatgtgaaacggggaatgcagtgtcctccagtggctggctgcagcttggggtgggcacctgggtggtggctggtggtccccctgcaggccactgctgccccctcttgggtcctgttctgagtctcaggcctgagtccctggggaaggccccacacctttgccctgtacctgggtatggggatggccctgaggggctgccttgcttgggagaaggggggaaaacagatatttttatataaataagaaaaagacagcccctctgggcagatgaggcctgctgtagggcagggggcttggtaaactgtgtgtccactggtctgtaacccttcagctgggtccttttgtgcagtgaacagcctggacaactgtccaggtggcccttcagggatatgttcctggacctttcttagcttctcaccgatctttcttccacgccaagtccatgttcctcagtcaaacaagtggcaa

SEQ ID NO: 9475 - protein, 113 aa, Homo sapiens
MCCPQELLRLGLLAVSNSSHLPGLDKEMKKKMPRGGQAGACWRWQALPALCPSQALGRPSCPSGSRGWSLTMLGWSVNIRRGSSLGQGPQAWGQGLLPGPPSFPLSQDSSRTP

SEQ ID NO: 9476 - DNA, 5799 bp, Homo sapiens
gctcaggccccgcccctgccgccggaatcctgaagcccaaggctgcccgggggcggtccggcggcgccggcgatggggcataaaaccactggccacctgccgggctgctcctgcgtgcgctgccgtcccggatccaccgtgcctctgcggcctgcgtgcccggagtccccgcctgtgtcgtctctgtcgccgtccccgtctcctgccaggcgcggagccctgcgagccgcgggtgggccccaggcgcgcagacatgggctgctccgccaaagcgcgctgggctgccggggcgctgggcgtcgcggggctactgtgcgctgtgctgggcgctgtcatgatcgtgatggtgccgtcgctcatcaagcagcaggtccttaagaacgtgcgcatcgaccccagtagcctgtccttcaacatgtggaaggagatccctatccccttctatctctccgtctacttctttgacgtcatgaaccccagcgagatcctgaagggcgagaagccgcaggtgcgggagcgcgggccctacgtgtacagggagttcaggcacaaaagcaacatcaccttcaacaacaacgacaccgtgtccttcctcgagtaccgcaccttccagttccagccctccaagtcccacggctcggagagcgactacatcgtcatgcccaacatcctggtcttgggtgcggcggtgatgatggagaataagcccatgaccctgaagctcatcatgaccttggcattcaccaccctcggcgaacgtgccttcatgaaccgcactgtgggtgagatcatgtggggctacaaggacccccttgtgaatctcatcaacaagtactttccaggcatgttccccttcaaggacaagttcggattatttgctgagctcaacaactccgactctgggctcttcacggtgttcacgggggtccagaacatcagcaggatccacctcgtggacaagtggaacgggctgagcaaggttgacttctggcattccgatcagtgcaacatgatcaatggaacttctgggcaaatgtggccgcccttcatgactcctgagtcctcgctggagttctacagcccggaggcctgccgatccatgaagctaatgtacaaggagtcaggggtgtttgaaggcatccccacctatcgcttcgtggctcccaaaaccctgtttgccaacgggtccatctacccacccaacgaaggcttctgcccgtgcctggagtctggaattcagaacgtcagcacctgcaggttcagtgcccccttgtttctctcccatcctcacttcctcaacgctgacccggttctggcagaagcggtgactggcctgcaccctaaccaggaggcacactccttgttcctggacatccacccggtcacgggaatccccatgaactgctctgtgaaactgcagctgagcctctacatgaaatctgtcgcaggcattggacaaactgggaagattgagcctgtggtcctgccgctgctctggtttgcagagagcggggccatggagggggagactcttcacacattctacactcagctggtgttgatgcccaaggtgatgcactatgcccagtacgtcctcctggcgctgggctgcgtcctgctgctggtccctgtcatctgccaaatccggagccaagtaggtgctggccagagggcagcccgggctgacagccattcgcttgcctgctgggggaaaggggcctcagatcggaccctctggccaaccgcagcctggagcccacctccagcagcagtcctgcgtctctgccggagtgggagcggtcactgctgggggctgcgcagcacgcttgcgtcttttgcatgccgcgttgccactactctgcctgttctggaaggcctgggaccctcccttggagggggcacaggtgggctttgagtaatgagacctggtacttgcatcatccattcatcaagtcagcacccggggatgccaggttctgttaggggcgaggggacgtacagcagtagaggagacagctgagatccctgctcagggggattgaggggggctggcatcccagccggggagacagatgaaaaccaagtaaatcagcagaaaagataatttcactcatgataggagctgtgaggggttagagccaaatagaaatacagcgtgagccacgtgtgaggttttcagtttaaattttctaatagccacttaacagtcaaaggaaacaggtggaattaattttaatcttatttaacccaaatatatgcaaagtattatcacttcaacatgtaatcagtataaacggcatcaatatttttgcagtgtttttgcatgaagtctttgaaatcctgtgtgtacgatacatgtgcagcaggtctcattttggactggccccgtttcaagggctcaccaactgaatgcagcttccagactggagagtgcatgtctggagcaagtggggacaaggacagatggagcttcaggaaggcctctctgaagaggtagatagtgagctttgacatggaggccagggaggcactcagcacacagccacatgaggaatgctgcctggagcggccactgcaaaggccctgtggcagggacaggcaaggcacattggacggtcaggtagggccagggtggctggaggggagtgagggcagggacagaggtaggaggtggtgtctgagagtggacagggcgggccacccagggcctcgtggtgcacagtgagcagtttggaactgattctgggagtgacagaggcattggaggcttttaaagaggggaatcactaggtcagctgctggctggggaatgggccccgggctgggaggggtggaagcctgggcccagcggggaggccccagtgcgtgaggaagtcgatggcttgaacaggatggggcagctgctatcaggagggaacggaagtggggaagagctccagccctgggcttcagacctccagaagcagcaggaagaggggtgataacagtgtccctccttgcttcggggtcatttatttattcattcatgcattcactgcaaggccctttgcacaggtcaggggatgcagatgaccagaacataagatctgcagcaaagatgggcaaggcaggcctttaggcaagttactacagtcacacgaaggacaggagagctgtgatcacagagctcaaggggcagtggagatgggcgagtggctgccatggcaggggaagggatgctgcccactggcaggtcatcaggaaaggctgtttttggatgcatggaccagaaagccactctctgaggtggcccccacctgcatcatcctagggccacaggccgaggccttctgaggggccttggggctgccccgctgctctgctggtcttggctcctctgcagcacctgcttcctttagcactggtgaatgattcttcctcttcccctgtctcagggaaggcttgcctgcttccatgcttgcatgctgggtgacaataaagcattcctggttcttcaccttggctttcagacctgaaacccgacttcctttcaaaattcctgtcctcggggggaaaaggtttccacaatgtgagatggtagcctggacaccagctgtcatcatgttgctgctctagcgtttgagctcccgatgaacaatgaccattgggtccaaccagcccttttgggagcccccttctctgttactgccccagggggagccagaacccagcagggctgtgactccagcgagcaaaatggaactccctccagtttctagactgaattatgtagggaggacagaaggactcagaacccacactcccagaccatgaataccttcccgtggcagagcatcaccataggtgtccacaagtgacgacgcacagccacatgagggggtccctggggactggctgagggactgggccagaggaggccatgacagcctcatccctctgtctccttctgtctgtctccaaattgtccaccagaatggggacagggaaggagggtcaggaagcacagaaggtctaggctgtggctagggtccctttccctgccgcagcccccaaatcagcatcccaccctcaaatccagtaagaatgctacgatcggcagtgtggctccctccctgcaggtttcactggaggccacgtaagtgaaatttatcccattatgtgtgttttgatgtagcaggaccttaccagttttttttgtttttttatttttattttttttggtttcttttttgagatggagtcttgctgtgttgcccaggctggagtgcagtggcacaatcttggctcactgcaacctccacctcccgggttcaagtgggagcctcagcctcagcctcagcctcagcctcccgagcagttgggattacaggcacctgccaccatgcctggctaatttttgtatattgagtagaggcggggtttcaccatgttggccaggctggtcttgaactcctgacctcatgatctgccgccttggcctcccaaagttctgggattacaggtgtgagccactgtgcctggccggccttatcagtttttatgtaatttgtcctgatttaaaaaaaaaaaatcacatgcgggtaaactcaacatattttaatttctctttagagaaattttccacttgagccaggtatggtggctcttgcctgtaatctgagctactcgggaggttgaggtgggaggatcacttgagcccaggagttggaggctgcagtgagccatgatcgcaccattgcactccagcctggacaacagagtgagatcctgtctcaaaaattaaaaaaagcagtaattttttcttctcaagtcattcttttaaaataaatcaaaagtattttaacagaacaatctgttcctcgttgattttaaacagccccccagctaagtccactggttgtcggtctccatggcccatctccccaccttgcttcctcgctggcttaaattttcaagtggacgagcccttttcagcttggcttgtccacctcccaggtgtgtttcctgaagatgcttgtacttatgtctaagagcggcagctccccacatctcagccacctgcaatcgttgagggttgttggactctaaacttatgtgcctttcctgtttcctctttgccttttgcaaattgaagaaccgtgtaaaaccatttttatgtggcttcaacgtcaactataaattagcttggttatcttctaggagaaatgctatttattttggagtagtagtaaaaagggctcaaaggataaggaggccattcaggcctattctgaatccctgatgacatcagctcccaagggctctgtgctgcaggaagcaaaactgtaggtgggtaccaggtaatgccgtgcgcctccccgccccctcccatatcaagtagaatgctggcggcttaaaacatttggggtcctgctcattccttcagcctcaacttcacctggagtgtctacagactgaagatgcatatttgtgtattttgcttttggagaaactgcccttcctatgttctgagtgaatagcagtttttttgatcccagagggcaacttgtattctgtgggctggtgcctatttgcaaggtcacattagaaagacaggagcaaggcttaggcctgctgcttctggaatctcttgtgcaatagactcccctggggaagtctgctagaaatgcagatccctgggcagccttctagccttctggaataggatcatggtgggaccctggaatctgtattttaatggaccctaatgagattctgatgtagaaacatgtttgagaggcattgatctaaatctgggat

SEQ ID NO: 9477 - protein, 553 aa, Homo sapiens [sequence omitted]

SEQ ID NO: 9478 - DNA, 2347 bp, Homo sapiens
aaatcggggcccatgtgtgccgttgggaatgtaggatggtgcagctgctgtgtggaggcccccccaaaatttaacatagaattaccatatggtggggcaaccccacttctgggtatcaaagaaatggaagtgggaacttgaagaggaatctggccaccgcgttcattgcagcgctgttcacgatggcccaacggtgggagcaacccgagtgtccgctgatgggtggtgggtaagaagctggggcccatccacacgttggaataggattcagcctggaaaaggaaggacgtttggacgcacgctgcgacatgcacgggccttgaggaagttatgcgagtgaaataagccacaacaggacaaataccgtacgattccatttgcatgagctccctagagtagccagatccacagagacagaaaagagaatgaacgtgcgcatcgaccccagtagcctgtccttcaacatgtggaaggagatccctatccccttctatctctccgtctacttctttgacgtcatgaaccccagcgagatcctgaagggcgagaagccgcaggtgcgggagcgcgggccctacgtgtacagggagttcaggcacaaaagcaacatcaccttcaacaacaacgacaccgtgtccttcctcgagtaccgcaccttccagttccagccctccaagtcccacggctcggagagcgactacatcgtcatgcccaacatcctggtcttgggtgcggcggtgatgatggagaataagcccatgaccctgaagctcatcatgaccttggcattcaccaccctcggcgaacgtgccttcatgaaccgcactgtgggtgagatcatgtggggctacaaggacccccttgtgaatctcatcaacaagtactttccaggcatgttccccttcaaggacaagttcggattatttgctgagctcaacaactccgactctgggctcttcacggtgttcacgggggtccagaacatcagcaggatccacctcgtggacaagtggaacgggctgagcaaggttgacttctggcattccgatcagtgcaacatgatcaatggaacttctgggcaaatgtggccgcccttcatgactcctgagtcctcgctggagttctacagcccggaggcctgccgatccatgaagctaatgtacaaggagtcaggggtgtttgaaggcatccccacctatcgcttcgtggctcccaaaaccctgtttgccaacgggtccatctacccacccaacgaaggcttctgcccgtgcctggagtctggaattcagaacgtcagcacctgcaggttcagtgcccccttgtttctctcccatcctcacttcctcaacgctgacccggttctggcagaagcggtgactggcctgcaccctaaccaggaggcacactccttgttcctggacatccacccggtcacgggaatccccatgaactgctctgtgaaactgcagctgagcctctacatgaaatctgtcgcaggcattggacaaactgggaagattgagcctgtggtcctgccgctgctctggtttgcagagagcggggccatggagggggagactcttcacacattctacactcagctggtgttgatgcccaaggtgatgcactatgcccagtacgtcctcctggcgctgggctgcgtcctgctgctggtccctgtcatctgccaaatccggagccaagtaggtgctggccagagggcagcccgggctgacagccattcgcttgcctgctgggggaaaggggcctcagatcggaccctctggccaaccgcagcctggagcccacctccagcagcagtcctgcgtctctgccggagtgggagcggtcactgctgggggctgcgcagcacgcttgcgtcttttgcatgccgcgttgccactactctgcctgttctggaaggcctgggaccctcccttggagggggcacaggtgggctttgagtaatgagacctggtacttgcatcatccattcatcaagtcagcacccggggatgccaggttctgttaggggcgaggggacgtacagcagtagaggagacagctgagatccctgctcagggggattgaggggggctggcatcccagccggggagacagatgaaaaccaagtaaatcagcagaaaagataatttcactcatgataggagctgtgaggggttagagccaaatagaaatacagcgtgagccacgtgtgaggttttcagtttaaattttctaatagccacttaacagtcaaaggaaacaggtggaattaattttaatcttatttaacccaaatatatgcaaagtattatcacttcaacatgtaatcagtataaacggc

SEQ ID NO: 9479 - protein, 512 aa, Homo sapiens
MNVRIDPSSLSFNMWKEIPIPFYLSVYFFDVMNPSEILKGEKPQVRERGPYVYREFRHKSNITFNNNDTVSFLEYRTFQFQPSKSHGSESDYIVMPNILVLGAAVMMENKPMTLKLIMTLAFTTLGERAFMNRTVGEIMWGYKDPLVNLINKYFPGMFPFKDKFGLFAELNNSDSGLFTVFTGVQNISRIHLVDKWNGLSKVDFWHSDQCNMINGTSGQMWPPFMTPESSLEFYSPEACRSMKLMYKESGVFEGIPTYRFVAPKTLFANGSIYPPNEGFCPCLESGIQNVSTCRFSAPLFLSHPHFLNADPVLAEAVTGLHPNQEAHSLFLDIHPVTGIPMNCSVKLQLSLYMKSVAGIGQTGKIEPVVLPLLWFAESGAMEGETLHTFYTQLVLMPKVMHYAQYVLLALGCVLLLVPVICQIRSQVGAGQRAARADSHSLACWGKGASDRTLWPTAAWSPPPAAVLRLCRSGSGHCWGLRSTLASFACRVATTLPVLEGLGPSLGGGTGGL

SEQ ID NO: 9480 - DNA, 2425 bp, Homo sapiens
cggcggctgtgggtaaaggcgcggcgcgcggcccccgagcgcgccaaccttgccctagccggagcccgctgcggcccagcgcacggccctcaccccgcatcgcgaccccgcgccccgccggccgagcatgggcgcgcgcgcctcaggcgggcccctggcccgggccgggctcctgctgctgctgctgctgctgctgctgctcgggctgctggccccgggcgcgcagggggcgcggggccgcggcggcgcggagaagaacagctaccgccgcacggtcaacaccttctcccagagcgtcagcagcctgttcggcgaggacaacgtgcgcgccgctcagaagttcttggccaggctgactgagagatttgtgctgggagtggatatgttcgtggagacactgtggaaagtctggaccgagctcttggatgttcttggacttgacgtctccaacctgtcccagtatttcagcccagcctcggtgtccagcagcccggcccgcgcgctcctgctggtcggcgtcgtcctcctggcctactggttcttgtccctgaccctgggcttcactttcagcgtcctgcacgtggtgttcggccgcttcttctggatcgtgcgggtcgtcctgttttccatgtcctgcgtgtacatcctgcacaagtacgagggcgagccggagaacgcggtgctgccgctgtgcttcgtggtggccgtctacttcatgaccgggcccatgggcttctactggcgaagcagtcccagcggccccagcaaccccagcaaccccagcgtggaggagaagctggagcacctggagaagcaggtcagactgctcaacatccgtctcaaccgggtgctcgagagcctggaccgctccaaggacaagtgaaggtcagccggccgggcgggtccacagttaccagcacgctgtctcagaaaacgaaaacggaggaaaaaaaccccaaaccccaaacaatcttaataaacacgactgagcaagaaagtggcgctgtgtagggctatttccacccacccggcagctcttaggacacattcccagaagagcggaaagatcattgacgtggaactacacacgaagtgtaattagtgggggaaaaaatattttttaaacaaaggatataaccatatttagttgtacagtaagagaaatttatctgtgcatagagcataaagttaattttttcaagcatttaaatacatcttttgtaaggttttttaataaaggcagattgagtcaagtttattaaaactttacatggaggggaagaatatgctaatttgacatttgagaaaagtttaaatgcgagcgtttgttttcacagcttagggattggtgggtgaggtctgtgtgcgttattttcatgttcccaaactgtgagctttatttcatgttatttttggtggatgttgacttagttcatgaatgttgtcacttctaaatgtggacagttgggctgcaggatgcaactcaacctcttttggatcctagagacccctgccaagcccccatcagtcctatttttaaatgaagacatcgccatttctagaagacctgagattttcttccctctgtgcttcgatgtattttaacctcaacattttgaaacggaaaatgcaaggaggggccaagaaatgtcctggggatttgatgccaggaagtacctggtaaggattggagattgctccagaatctactgcatgtcccaatttgcagtttgctcactagggctatatacaaaagctatacccttgagggtttttttttttttcttttgatttcctcaggaccttagagggaaaacaaacagtagcagctaatattctcaagtatattgctgcttagaaagatcctcaggaacaattagcagcaataagcaagcctttgaaaagatctgaattctttttcctgaaatatttacgatacacaggtgctttttatctgaaatctgttgtgtcctccttttaggcagtctctgtgggcagagagtgggacttgcgaggtggacagctgtggggatcctgggcaagggagtttcagaaggtgtggctcaggggctggtagaaacccccttttgttaggacttgttttttaaaaaagaaagccctaggccaggcgcagtggctgatgcctgtaatcccagcgctttgggaggccgaggagtatggatcacctgaggtcaggagttcaagaccagcctggccaacatggtgaaacccccgtctctactaaaaatacaaaaattagtcaggcatggtggtgggtgcctgtagtccagctactcaggaggctgaggcaggagaattgcttgaacctgggaggtggaggttgcggtgagccgagatcacgccactgcactccagcctaggcaacagagcaagacttcatcttaaaaaaaaaaaaaaaagccca

SEQ ID NO: 9481 - protein, 251 aa, Homo sapiens; identical to SEQ ID NO: 1375

SEQ ID NO: 9482 - DNA, 1958 bp, Homo sapiens
ttcttggccaggctgactgagagatttgtgctgggagtggatatgttcgtggagacactgtggaaagtctggaccgagctcttggatgttcttggacttgacgcgtcctgcacgtggtgttcggccgcttcttctggatcgtgcgggtcgtcctgttttccatgtcctgcgtgtacatcctgcacaagtacgagggcgagccggagaacgcggtgctgccgctgtgcttcgtggtggccgtctacttcatgaccgggcccatgggcttctactggcgaagcagtcccagcggccccagcaaccccagcaaccccagcgtggaggagaagctggagcacctggagaagcaggtcagactgctcaacatccgtctcaaccgggtgctcgagagcctggaccgctccaaggacaagtgaaggtcagccggccgggcgggtccacagttaccagcacgctgtctcagaaaacgaaaacggaggaaaaaaaccccaaaccccaaacaatcttaataaacacgactgagcaagaaagtggcgctgtgtagggctatttccacccacccggcagctcttaggacacattcccagaagagcggaaagatcattgacgtggaactacacacgaagtgtaattagtgggggaaaaaatattttttaaacaaaggatataaccatatttagttgtacagtaagagaaatttatctgtgcatagagcataaagttaattttttcaagcatttaaatacatcttttgtaaggttttttaataaaggcagattgagtcaagtttattaaaactttacatggaggggaagaatatgctaatttgacatttgagaaaagtttaaatgcgagcgtttgttttcacagcttagggattggtgggtgaggtctgtgtgcgttattttcatgttcccaaactgtgagctttatttcatgttatttttggtggatgttgacttagttcatgaatgttgtcacttctaaatgtggacagttgggctgcaggatgcaactcaacctcttttggatcctagagacccctgccaagcccccatcagtcctatttttaaatgaagacatcgccatttctagaagacctgagattttcttccctctgtgcttcgatgtattttaacctcaacattttgaaacggaaaatgcaaggaggggccaagaaatgtcctggggatttgatgccaggaagtacctggtaaggattggagattgctccagaatctactgcatgtcccaatttgcagtttgctcactagggctatatacaaaagctatacccttgagggtttttttttttttcttttgatttcctcaggaccttagagggaaaacaaacagtagcagctaatattctcaagtatattgctgcttagaaagatcctcaggaacaattagcagcaataagcaagcctttgaaaagatctgaattctttttcctgaaatatttacgatacacaggtgctttttatctgaaatctgttgtgtcctccttttaggcagtctctgtgggcagagagtgggacttgcgaggtggacagctgtggggatcctgggcaagggagtttcagaaggtgtggctcaggggctggtagaaacccccttttgttaggacttgttttttaaaaaagaaagccctaggccaggcgcagtggctgatgcctgtaatcccagcgctttgggaggccgaggagtatggatcacctgaggtcaggagttcaagaccagcctggccaacatggtgaaacccccgtctctactaaaaatacaaaaattagtcaggcatggtggtgggtgcctgtagtccagctactcaggaggctgaggcaggagaattgcttgaacctgggaggtggaggttgcggtgagccgagatcacgccactgcactccagcctaggcaacagagcaagacttcatcttaaaaaaaaaaaaaaaagccca

SEQ ID NO: 9483 - protein, 152 aa, Homo sapiens [sequence omitted]

SEQ ID NO: 9484 - DNA, 5068 bp, Homo sapiens
gagaacgcggtgctgccgctgtgcttcgtggtggccgtctacttcatgaccgggcccatgggcttctactggcgaagcagtcccagcggccccagcaaccccagcaaccccagcgtggaggagaagctggagcacctggagaagcaggtcagactgctcaacatccgtctcaaccgggtgctcgagagcctggaccgctccaaggacaagtgaaggtcagccggccgggcgggtccacagttaccagcacgctgtctcagaaaacgaaaacggaggaaaaaaaccccaaaccccaaacaatcttaataaacacgactgagcaagaaagtggcgctgtgtagggctatttccacccacccggcagctcttaggacacattcccagaagagcggaaagatcattgacgtggaactacacacgaagtgtaattagtgggggaaaaaatattttttaaacaaaggatataaccatatttagttgtacagtaagagaaatttatctgtgcatagagcataaagttaattttttcaagcatttaaatacatcttttgtaaggttttttaataaaggcagattgagtcaagtttattaaaactttacatggaggggaagaatatgctaatttgacatttgagaaaagtttaaatgcgagcgtttgttttcacagcttagggattggtgggtgaggtctgtgtgcgttattttcatgttcccaaactgtgagctttatttcatgttatttttggtggatgttgacttagttcatgaatgttgtcacttctaaatgtggacagttgggctgcaggatgcaactcaacctcttttggatcctagagacccctgccaagcccccatcagtcctatttttaaatgaagacatcgccatttctagaagacctgagattttcttccctctgtgcttcgatgtattttaacctcaacattttgaaacggaaaatgcaaggaggggccaagaaatgtcctggggatttgatgccaggaagtacctggtaaggattggagattgctccagaatctactgcatgtcccaatttgcagtttgctcactagggctatatacaaaagctatacccttgagggtttttttttttttcttttgatttcctcaggaccttagagggaaaacaaacagtagcagctaatattctcaagtatattgctgcttagaaagatcctcaggaacaattagcagcaataagcaagcctttgaaaagatctgaattctttttcctgaaatatttacgatacacaggtgctttttatctgaaatctgttgtgtcctccttttaggcagtctctgtgggcagagagtgggacttgcgaggtggacagctgtggggatcctgggcaagggagtttcagaaggtgtggctcaggggctggtagaaacccccttttgttaggacttgttttttaaaaaagaaagccctagcccagcattttgcagctttgaagctgctggggatcacgactgtctctgtggcccttacctggccacagatgtaccctggcaacccgctcacagtgccctgcgtgcaggtttatagataacccctgccagacctgctacaaccaagaccttatggtccaggtctcagtttggagaagatttagctgtctaccacttcttgtgtagtgttcctgtgaagttttatttttggttgcaagtatctggaaaacagatgcagatgtttttgtggatgttgttgagacttttgagacttctgtttctaaggtacacatgatgggacccaaactctcctggagagttccattcacttcctgaaacgtgcacctgtttcaggtgcatgtttattcagtgtgcatggatatttaagatttgctggagcatagatcaaatctttatccatgcacattggaacacaggattactgggttgaaatcattctagttttgtcatttagatacttgtagatgaatctattttagcacaaggtataaataactcgggaggtcatctctatcttctttccttttgtgcatttggctataccacgtttaggtactaaaacagctttgcttatgttggccaggggaaaacatggcattctgtgcgcaaagctaatgatcgccagccctgccttggcccctcccttgtttatggtcattgtaagatgcccgcatgttaaggcttaagctgtcactgggctgggtgtaatacccgcttcattcctcctcccaccctcttacccgaaacatgaagggcactgtgctctattgagatctcgataagatcatcattttaacttgtattcaactgagggaggtaacatgatatctgggtgctggtggattgagacctcaagcatcaattcaaaattgctgtcgaaaatatgcactattttttttttccactctggctaagtgtaggctctgaagccagttttatagcttgatacattctggtgaaagatgtcttcatttttaatgaaagaacctacagttagtaggtgtcacctcagggtagaaattctgatagaaattctgattatttgaaactctgatagaaatcctagatgctagatttgaagaaaacctgggttttattgcatagatttcaccttttctggggcacatcttaccccaaaataattggggatttttttgttccttctccattccatggaaccttgtagggtgttgggattgggcctcccctcgccacccgccacatgtctttgtttttttctctcttttgtatgtggaaaaatgtatttttgtaccatatctcatacctggagagaaaccttttttctatcttcagggctgtagaatatattagcgtaacacttcactgaatgtgacgtaaaagcattctgatgaaaactggttctgttataattaagactcagtgtttaaaatatcttaatcagtgttaatttcccagtgtttcagtatcacagtaaatacttgttttactgagaacagaaaataatccagaaaaggaaaaggaccagccctctctagattgctggaattgtatggatgtgttggggttggtttagtgatctcttccttgacaccctagcaaagatgcttttgtggagtgcaaacctttcataaatatactttccaggctgggtgcagtggctcaagcttgtaatcccagcactttgggaggccaaggcgggtggatcacttgcggtcgggagttcgagaccagcctggccaacatagtgaaatcccgtctctaccaaaaaatacaaaaaaaaaaaaaaaaaaaaaaatagccaggtgtggtggtgggttcctgtagtcccagctactcaggaggctgaggtgggagaattgtatgaacctgggaggcagaggttgcagtgaactgagatcacaccactgtactccagttgaggcgacagagtgagacccagtctcaaaaaaaaaaaaaagtgtgtgtgtgtgtatatatatgtatatatatatacacacacacacactttccaataccagtcggcattacccgccctttggtttcttttgctttggatttcagcccccatatcatttctggtaacagagcacagcaatagaatttctgggaagcagaccttgtgaatcgtgcctgtgtcttaattcacaaagggtaagtgaatgccgttgaaaggtgtttcatacacttaccccagaaatgagagcctgtctcatgcaggagtcgggaggcagcgatgtcagggaactgggactatgtctttatgactgtgatggtggtaaccaagtggggtggtcccctctggggagctgagtaagaacgcaaaggtttgggtcagtgattaggaagactataatatgactttgtgcatgcccgggagggctgccttgtagagaggatgtgagcagcttagtcgctcatctggccctgtgattcaggcttatggagcgttaagaataacagctgtcaaatggcctagacatggttaatgcaatttgttgctagtggaaatcctgaattgcttcctttctgtgatcactgctacttcttaagatgcttttgatgaatgtcatctgccttacaagttgacacctgataacttctccctgatgggtttccgaactggctgacttaaccaaaaagccagctcttgccatctatcttgcattaaaaggaattcctgaggctcctaaggggtcagctgccccactcctgacttttttatttttaatggtctataccttctgcaacatttttgtttatggccatttgaatagttggactttgactcctcacttgtgaataataggaatatattttgcagaatctaacataatacccttaaaattcatactggacaaccatcagtgtgatgtatagtatctggtgtaaacaaattttattcagcatattaaattattctgtgttttgcttttccttgatatgtaggaggtgcaccagtaccagtttttctcttgtggtggcttaaaacgctgattgccatttgcattgtctactgaaaagctgtggcagcgagtggtattattgaccatgtgttctcatgtctttttgcagatttaaaggttttattgtagtgtccatttaatatctgcatgtgtgtttaatctctgaataccatgtaattaaactgattaacttgtgatggtgatggtgattagcacacactaaaaacccaatgaagcaattgtctccctcttcttaactggaaatcacacttgtgaggtatggtatccattatcaacagtggattcatgattgacttcatattttgtgtatctggttataaattttgtatagcatttaatttggcacttaatataaatccatttgatttgaatagtgtgtgtgtgtacatggtgtgtgtgtgtgtgtgcactttagtttcgtgagccttgggaaactgattctacaaatatcttatatagagataaatgtatcaggcatttttttgcaaagcgatatatacattcctcttatttattaaatcactggctttggtgttatgtagagatatttgtagatctcagaacagaattaaaatattgtgaaaattacagcttaataaatgtttattgt

SEQ ID NO: 9485 - protein, 30 aa, Homo sapiens [sequence omitted]

SEQ ID NO: 9486 - DNA, 5117 bp, Homo sapiens
gagaacgcggtgctgccgctgtgcttcgtggtggccgtctacttcatgaccgggcccatgggcttctactggcgaagcagtcccagcggccccagcaaccccagcaaccccagcgtggaggagaagctggagcacctggagaagcaggtcagactgctcaacatccgtctcaaccgggtgctcgagagcctggaccgctccaaggacaagtgaaggtcagccggccgggcgggtccacagttaccagcacgctgtctcagaaaacgaaaacggaggaaaaaaaccccaaaccccaaacaatcttaataaacacgactgagcaagaaagtggcgctgtgtagggctatttccacccacccggcagctcttaggacacattcccagaagagcggaaagatcattgacgtggaactacacacgaagtgtaattagtgggggaaaaaatattttttaaacaaaggatataaccatatttagttgtacagtaagagaaatttatctgtgcatagagcataaagttaattttttcaagcatttaaatacatcttttgtaaggttttttaataaaggcagattgagtcaagtttattaaaactttacatggaggggaagaatatgctaatttgacatttgagaaaagtttaaatgcgagcgtttgttttcacagcttagggattggtgggtgaggtctgtgtgcgttattttcatgttcccaaactgtgagctttatttcatgttatttttggtggatgttgacttagttcatgaatgttgtcacttctaaatgtggacagttgggctgcaggatgcaactcaacctcttttggatcctagagacccctgccaagcccccatcagtcctatttttaaatgaagacatcgccatttctagaagacctgagattttcttccctctgtgcttcgatgtattttaacctcaacattttgaaacggaaaatgcaaggaggggccaagaaatgtcctggggatttgatgccaggaagtacctggtaaggattggagattgctccagaatctactgcatgtcccaatttgcagtttgctcactagggctatatacaaaagctatacccttgagggtttttttttttttcttttgatttcctcaggaccttagagggaaaacaaacagtagcagctaatattctcaagtatattgctgcttagaaagatcctcaggaacaattagcagcaataagcaagcctttgaaaagatctgaattctttttcctgaaatatttacgatacacaggtgctttttatctgaaatctgttgtgtcctccttttaggcagtctctgtgggcagagagtgggacttgcgaggtggacagctgtggggatcctgggcaagggagtttcagaaggtgtggctcaggggctggtagaaacccccttttgttaggacttgttttttaaaaaagaaagccctagcccagcattttgcagctttgaagctgctggggatcacgactgtctctgtggcccttacctggccacagatgtaccctggcaacccgctcacagtgccctgcgtgcaggtttatagataacccctgccagacctgctacaaccaagaccttatggtccaggtctcagtttggagaagatttagctgtctaccacttcttgtgtagtgttcctgtgaagttttatttttggttgcaagtatctggaaaacagatgcagatgtttttgtggatgttgttgagacttttgagacttctgtttctaaggtacacatgatgggacccaaactctcctggagagttccattcacttcctgaaacgtgcacctgtttcaggtgcatgtttattcagtgtgcatggatatttaagatttgctggagcatagatcaaatctttatccatgcacattggaacacaggattactgggttgaaatcattctagttttgtcatttagatacttgtagatgaatctattttagcacaaggtataaataactcgggaggtcatctctatcttctttccttttgtgcatttggctataccacgtttaggtactaaaacagctttgcttatgttggccaggggaaaacatggcattctgtgcgcaaagctaatgatcgccagccctgccttggcccctcccttgtttatggtcattgtaagatgcccgcatgttaaggcttaagctgtcactgggctgggtgtaatacccgcttcattcctcctcccaccctcttacccgaaacatgaagggcactgtgctctattgagatctcgataagatcatcattttaacttgtattcaactgagggaggtaacatgatatctgggtgctggtggattgagacctcaagcatcaattcaaaattgctgtcgaaaatatgcactattttttttttccactctggctaagtgtaggctctgaagccagttttatagcttgatacattctggtgaaagatgtcttcatttttaatgaaagaacctacagttagtaggtgtcacctcagggtagaaattctgatagaaattctgattatttgaaactctgatagaaatcctagatgctagatttgaagaaaacctgggttttattgcatagatttcaccttttctggggcacatcttaccccaaaataattggggatttttttgttccttctccattccatggaaccttgtagggtgttgggattgggcctcccctcgccacccgccacatgtctttgtttttttctctcttttgtatgtggaaaaatgtatttttgtaccatatctcatacctggagagaaaccttttttctatcttcagggctgtagaatatattagcgtaacacttcactgaatgtgacgtaaaagcattctgatgaaaactggttctgttataattaagactcagtgtttaaaatatcttaatcagtgttaatttcccagtgtttcagtatcacagtaaatacttgttttactgagaacagaaaataatccagaaaaggaaaaggaccagccctctctagattgctggaattgtatggatgtgttggggttggtttagtgatctcttccttgacaccctagcaaagatgcttttgtggagtgcaaacctttcataaatatactttccaggctgggtgcagtggctcaagcttgtaatcccagcactttgggaggccaaggcgggtggatcacttgcggtcgggagttcgagaccagcctggccaacatagtgaaatcccgtctctaccaaaaaatacaaaaaaaaaaaaaaaaaaaaaaatagccaggtgtggtggtgggttcctgtagtcccagctactcaggaggctgaggtgggagaattgtatgaacctgggaggcagaggttgcagtgaactgagatcacaccactgtactccagttgaggcgacagagtgagacccagtctcaaaaaaaaaaaaaagtgtgtgtgtgtgtatatatatgtatatatatatacacacacacacactttccaataccagtcggcattacccgccctttggtttcttttgctttggatttcagcccccatatcatttctggtaacagagcacagcaatagaatttctgggaagcagaccttgtgaatcgtgcctgtgtcttaattcacaaagggtaagtgaatgccgttgaaaggtgtttcatacacttaccccagaaatgagagcctgtctcatgcaggagtcgggaggcagcgatgtcagggaactgggactatgtctttatgactgtgatggtggtaaccaagtggggtggtcccctctggggagctgagtaagaacgcaaaggtttgggtcagtgattaggaagactataatatgactttgtgcatgcccgggagggctgccttgtagagaggatgtgagcagcttagtcgctcatctggccctgtgattcaggcttatggagcgttaagaataacagctgtcaaatggcctagacatggttaatgcaatttgttgctagtggaaatcctgaattgcttcctttctgtgatcactgctacttcttaagatgcttttgatgaatgtcatctgccttacaagttgacacctgataacttctccctgatgggtttccgaactggctgacttaaccaaaaagccagctcttgccatctatcttgcattaaaaggaattcctgaggctcctaaggggtcagctgccccactcctgacttttttatttttaatggtctataccttctgcaacatttttgtttatggccatttgaatagttggactttgactcctcacttgtgaataataggaatatattttgcagaatctaacataatacccttaaaattcatactggacaaccatcagtgtgatgtatagtatctggtgtaaacaaattttattcagcatattaaattattctgtgttttgcttttccttgatatgtaggaggtgcaccagtaccagtttttctcttgtggtggcttaaaacgctgattgccatttgcattgtctactgaaaagctgtggcagcgagtggtattattgaccatgtgttctcatgtctttttgcagatttaaaggttttattgtagtgtccatttaatatctgcatgtgtgtttaatctctgaataccatgtaattaaactgattaacttgtgatggtgatggtgattagcacacactaaaaacccaatgaagcaattgtctccctcttcttaactggaaatcacacttgtgaggtatggtatccattatcaacagtggattcatgattgacttcatattttgtgtatctggttataaattttgtatagcatttaatttggcacttaatataaatccatttgatttgaatagtgtgtgtgtgtacatggtgtgtgtgtgtgtgtgcactttagtttcgtgagccttgggaaactgattctacaaatatcttatatagagataaatgtatcaggcatttttttgcaaagcgatatatacattcctcttatttattaaatcactggctttggtgttatgtagagatatttgtagatctcagaacagaattaaaatattgtgaaaattacagcttaataaatgtttattgtaattttgttgtatggacttttaaaatatatctcatcacttctaaccaaa

SEQ ID NO: 9487 - protein, 30 aa, Homo sapiens [sequence omitted]

SEQ ID NO: 9488 - DNA, 3328 bp, Homo sapiens
ggcctgcggggcggggcctgggccaagcggcccgcaggaggcggcggcggccgttcagtcccttgttccccgccgccgccgtcgctgacccagcccgccaggcgctcctgaccgtcgcttcctccggtcccaggtccccggccctcgcctcagccccggcccctggtccccagccctcgtcgcagccccggccgcccgccgccgccatgtccaaggaggagcgccccggtcgggaggagatcctggagtgccaggtgatgtgggagcctgacagtaagaagaacacgcagatggaccgcttccgggcggctgtgggcgccgcctgcggcctggcgctggagagttatgatgacttgtaccattggtccgttgagtcatattcagacttctgggcagagttctggaaattcagtggaattgtcttctcacgtgtgtatgatgaggttgtggacacatcgaaaggaatcgcagatgtccccgagtggttcaaaggcagtcggctcaactatgcagaaaacctcctgcggcacaaagagaatgacagagttgccctttacattgcaagggaaggcaaagaggaaattgtgaaggtgacttttgaagagctgaggcaagaagtggctttgtttgcagcagcaatgaggaaaatgggtgtgaagaaaggagatcgggttgttggttatttacccaacagtgagcacgctgtcgaggcgatgctggctgcggcaagcattggtgccatctggagctccacgtccccggacttcggtgtgaatggtgtgctggaccggttttctcaaattcagccaaagctcatcttctctgtggaggctgttgtctataatggcaaagagcacaaccacatggaaaagctgcagcaggtggttaaaggcctaccagacttgaagaaagtggtggtgattccttatgtgtcctccagagagaacatagacctttcaaagattccaaacagtgtgtttctggatgactttcttgccaccggcaccagtgagcaggccccgcagctggagttcgagcagctgcccttcagccacccactgttcatcatgttctcatcgggcaccacgggcgcacccaagtgcatggtgcattccgctgggggcaccctcatccagcatctgaaggagcacctgctgcacggcaacatgaccagcagtgacatcctcctgtgctacaccacggtcggctggatgatgtggaactggatggtgtcccttctggccacaggagcggccatggtcttgtacgatggctcccccctggtgcccacgcccaatgtgctctgggacctggttgacaggataggcatcactgtcctggtaactggggccaagtggctgtcagtgctggaagagaaggccatgaagccggtggaaacccacagtctccagatgctccacacgatcctgtccactggctccccactgaaagcccagagctacgagtatgtctacaggtgcatcaagagcagcatcctcctgggctccatctcaggaggcaccgacatcatctcctgcttcatgggccacaatttttctcttcctgtgtataaaggggagattcaggcccggaacctgggcatggccgtggaagcgtggaacgaggaaggaaaggcggtctggggagagagcggcgagctggtgtgtactaagccgatcccttgccagcccacacacttctggaacgatgagaacggcaacaagtacaggaaggcgtatttctccaaattcccaggtatctgggctcatggcgactactgcagaatcaaccccaagaccgggggcatcgtcatgcttggccggagtgacggcaccctcaaccccaacggggtgcggttcggcagctcggaaatctataacattgtggaatccttcgaggaggtggaggacagcctgtgtgtcccccagtataacaagtacagggaggagagggtgatcctcttcctgaagatggcctccgggcacgccttccagcctgacttggttaagaggatccgtgacgccatccgcatgggcttgtctgcgcgacacgtgcccagcctcatcctggaaaccaagggcatcccgtatacgctcaacggcaagaaagtggaagttgccgtcaaacagatcatcgctggaaaagccgtggagcaaggaggtgctttctcgaaccccgagaccctggatctgtaccgggacatccctgagctgcagggcttctgagtcagactggctggcgtgtcactcagccgcacccgtgtgcactgtaacttttgtgtgctcaagaaattatacagaaacctacagctgttgtaaaaggatgctcgcaccaagtgttctgtaggcttggggagggatcgtttctctgttttgttaaatctggtgggtacctggatcttccacacgagtgggattctggccttcagagaccaggagggagtgtctgggccgcaggtgtggcactgtggtgagagtgtgtgtctttgcacacacagtgcagcgggaacggtggggctggctggtgctgaagacagacacactcctgagccaaggtcttgtcttcaacctccccgtcccgttgtcccattttgctctgtgaaggtgcaaatccctttcttcccttcccatctcaggctctcctgttttccctcagggtccagtatgcctttgagctttagctgttagaaaggaacccccgtgacttgacacagctttcacagctggctgctaggaccggcgggctgggtgttcacgtgtgtctgtgtcatggatgcaatgcaggccctggaggactgtgcgtcacccgtcaaccagagcgtgcctccgggccagcttccctccaaggaatgagtggatttcatacaggatctctttattgcacagactgaatggctttacatgtttctaatgtgaattaggcatgtgaagcagtgggtgtccacccgtgtccctcatgggtgagccctccagctgtgagcccaggcagtgtggtcaccgagtgaggaccctcctcaccaggaaccgcatccctgtgctgcctccacctgagagttgctagggggttcttgtcgagatcatgtcatcagcacccctaagtcaagtcacgggtttccatagccaggcagttggtatgtacaattcagttcagcgtatgaacttgtatctctaatctgatgtccatttttatattttttgaaactgagcacaatgaaatcctttcttgaatcattttccttttggattataaaaatatgggggaaagtgctatgatgaattttatgcaataaatgtatacatgtgtgcacatgcacccatgctgtgtgtgc

SEQ ID NO: 9489 - protein, 672 aa, Homo sapiens; identical to SEQ ID NO: 1377

SEQ ID NO: 9490 - DNA, 3117 bp, Homo sapiens
gggcggggcctgggccaagcggcccgcaggaggcggcggcggccgttcagtcccttgttccccgccgccgccgtcgctgacccagcccgccaggcgctcctgaccgtcgcttcctccggtcccaggtccccggccctcgcctcagccccggcccctggtccccagccctcgtcgcagccccggccgcccgccgccgccatgtccaaggaggagcgccccggtcgggaggagatcctggagtgccaggtgatgtgggagcctgacagtaagaagaacacgcagatggaccgcttccgggcggctgtgggcgccgcctgcggcctggcgctggagagttatgatgacttgtaccattggtccgttgagtcatattcagacttctgggcagagttctggaaattcagtggaattgtcttctcacgtgtgtatgatgaggttgtggacacatcgaaaggaatcgcagatgtccccgagtggttcaaaggcagtcggctcaactatgcagaaaacctcctgcggcacaaagagaatgacagagttgccctttacattgcaagggaaggcaaagaggaaattgtgaaggtgacttttgaagagctgaggcaagaagtggctttgtttgcagcagcaatgaggaaaatgggtgtgaagaaaggagatcgggttgttggttatttacccaacagtgagcacgctgtcgaggcgatgctggctgcggcaagcattggtgccatctggagctccacgtccccggacttcggtgtgaatggtgtgctggaccggttttctcaaattcagccaaagctcatcttctctgtggaggctgttgtctataatggcaaagagcacaaccacatggaaaagctgcagcaggtggttaaaggcctaccagacttgaagaaagtggtggtgattccttatgtgtcctccagagagaacatagacctttcaaagattccaaacagtgtgtttctggatgactttcttgccaccggcaccagtgagcaggccccgcagctggagttcgagcagctgcccttcagccacccactgttcatcatgttctcatcgggcaccacgggcgcacccaagtgcatggtgcattccgctgggggcaccctcatccagcatctgaaggagcacctgctgcacggcaacatgaccagcagtgacatcctcctgtgctacaccacggtcggctggatgatgtggaactggatggtgtcccttctggccacaggagcggccatggtcttgtacgatggctcccccctggtgcccacgcccaatgtgctctgggacctggttgacaggataggcatcactgtcctggtaactggggccaagtggctgtcagtgctggaagagaaggccatgaagccggtggaaacccacagtctccagatgctccacacgatcctgtccactggctccccactgaaagcccagagctacgagtatgtctacaggtgcatcaagagcagcatcctcctgggctccatctcaggaggcaccgacatcatctcctgcttcatgggccacaatttttctcttcctgtgtataaaggggagattcaggcccggaacctgggcatggccgtggaagcgtggaacgaggaaggaaaggcggtctggggagagagcggcgagctggtgtgtactaagccgatcccttgccagcccacacacttctggaacgatgagaacggcaacaagtacaggaaggcgtatttctccaaattcccaggtatctgggctcatggcgactactgcagaatcaaccccaagaccgggggcatcgtcatgcttggccggagtgacggcaccctcaaccccaacggggtgcggttcggcagctcggaaatctataacattgtatacgctcaacggcaagaaagtggaagttgccgtcaaacagatcatcgctggaaaagccgtggagcaaggaggtgctttctcgaaccccgagaccctggatctgtaccgggacatccctgagctgcagggcttctgagtcagactggctggcgtgtcactcagccgcacccgtgtgcactgtaacttttgtgtgctcaagaaattatacagaaacctacagctgttgtaaaaggatgctcgcaccaagtgttctgtaggcttggggagggatcgtttctctgttttgttaaatctggtgggtacctggatcttccacacgagtgggattctggccttcagagaccaggagggagtgtctgggccgcaggtgtggcactgtggtgagagtgtgtgtctttgcacacacagtgcagcgggaacggtggggctggctggtgctgaagacagacacactcctgagccaaggtcttgtcttcaacctccccgtcccgttgtcccattttgctctgtgaaggtgcaaatccctttcttcccttcccatctcaggctctcctgttttccctcagggtccagtatgcctttgagctttagctgttagaaaggaacccccgtgacttgacacagctttcacagctggctgctaggaccggcgggctgggtgttcacgtgtgtctgtgtcatggatgcaatgcaggccctggaggactgtgcgtcacccgtcaaccagagcgtgcctccgggccagcttccctccaaggaatgagtggatttcatacaggatctctttattgcacagactgaatggctttacatgtttctaatgtgaattaggcatgtgaagcagtgggtgtccacccgtgtccctcatgggtgagccctccagctgtgagcccaggcagtgtggtcaccgagtgaggaccctcctcaccaggaaccgcatccctgtgctgcctccacctgagagttgctagggggttcttgtcgagatcatgtcatcagcacccctaagtcaagtcacgggtttccatagccaggcagttggtatgtacaattcagttcagcgtatgaacttgtatctctaatctgatgtccatttttatattttttgaaactgagcacaatgaaatcctttcttgaatcattttccttttggattataaaaatatgggggaaagtgctatgatgaattttatgcaataaatgtatacatgtgtgcacatgcacccatgctgtgtgtgc

SEQ ID NO: 9491 - protein, 599 aa, Homo sapiens
MSKEERPGREEILECQVMWEPDSKKNTQMDRFRAAVGAACGLALESYDDLYHWSVESYSDFWAEFWKFSGIVFSRVYDEVVDTSKGIADVPEWFKGSRLNYAENLLRHKENDRVALYIAREGKEEIVKVTFEELRQEVALFAAAMRKMGVKKGDRVVGYLPNSEHAVEAMLAAASIGAIWSSTSPDFGVNGVLDRFSQIQPKLIFSVEAVVYNGKEHNHMEKLQQVVKGLPDLKKVVVIPYVSSRENIDLSKIPNSVFLDDFLATGTSEQAPQLEFEQLPFSHPLFIMFSSGTTGAPKCMVHSAGGTLIQHLKEHLLHGNMTSSDILLCYTTVGWMMWNWMVSLLATGAAMVLYDGSPLVPTPNVLWDLVDRIGITVLVTGAKWLSVLEEKAMKPVETHSLQMLHTILSTGSPLKAQSYEYVYRCIKSSILLGSISGGTDIISCFMGHNFSLPVYKGEIQARNLGMAVEAWNEEGKAVWGESGELVCTKPIPCQPTHFWNDENGNKYRKAYFSKFPGIWAHGDYCRINPKTGGIVMLGRSDGTLNPNGVRFGSSEIYNIVYAQRQESGSCRQTDHRWKSRGARRCFLEPRDPGSVPGHP

SEQ ID NO: 9492 - DNA, 436 bp, Homo sapiens
gtggaattgtcttctcacgtgtgtatgatgaggttgtggacacatcgaaaggaatcgcagatgtccccgagtggttcaaaggcagtcggctcaactatgcagaaaacctcctgcggcacaaagagaatgacagagttgccctttacattgcaagggaaggcaaagaggaaattgtgaaggtgacttttgaagagctgaggcaagaagtggctttgtttgcagcagcaatgaggaaaatggttggtatgtacaattcagttcagcgtatgaacttgtatctctaatctgatgtccatttttatattttttgaaactgagcacaatgaaatcctttcttgaatcattttccttttggattataaaaatatgggggaaagtgctatgatgaattttatgcaataaatgtatacatgtgtgcacatgcacccatgctgtg

SEQ ID NO: 9493 - protein, 50 aa, Homo sapiens
MMRLWTHRKESQMSPSGSKAVGSTMQKTSCGTKRMTELPFTLQGKAKRKL

SEQ ID NO: 9494 - DNA, 521 bp, Homo sapiens
aaatagagagaaaagggtttccttttgttctctcctggagctgggacactcttcatctcctgaactttggacattagaattccattctccctggccttgagactctgagacttacacaagcagccccacccaggttctcaggccttcggactcacattgagaattacaccatcagcttccctggttctgattctttagaacttggactgagccacgctactatcatcccagggtctccagcttacaagtgtcctgccatgggacttctcagcctccataatcatatagatgataccaaagcggccaacgagtttaaaactctttttgcgcagtaggaatgactccatgaagatttctcatcatggagcccagactagatggacccaaatctccagactcccagctcttctgtaaaccccatcctgattctctgagtctctgaatcttttatcctcattttcttcccaactgtccataatgtagaatttaaataaaagattaaatgtaatctttataacatt

SEQ ID NO: 9495 - protein, 41 aa, Homo sapiens
MIPKRPTSLKLFLRSRNDSMKISHHGAQTRWTQISRLPALL

SEQ ID NO: 9496 - DNA, 2102 bp, Homo sapiens
cagagtggcccttcctccggctctggaggacagacgtccgggctcccggtgtcagcagaagtggcccttcctccggctctggaggacagacgtctgggctcgcggtgtcacagagtggcccttcctccggctctggagcacagacgtctgggatcgcagtgtcagcagagtggcccttcctccggctctggaggacagacgtccgggctcgcggtgtcacagagtggcccttcctccggctctggaggacagacgtccgggctcgcggtgtcacagagtggcccttcctccggctctggaggacagacgtccgggatcgcggtgtcagcagagtggcccttcctccggctctggaggacagacgtccgggctcgcggtgtcacagagtggcccttcctccggctctggaggacagacgtccgggatcgcggtgtcagcagagtggcccttcctccggctctggaggacagacgtccgggctcgcggtgtcacagagtggcccttcctccggctctggaggacagacgtccgggctcgcggtgtcagcagagtggcccttcctccggctctggaggacagacgtccgggctcgcggtgtcacagagtggcccttcctccggctctggaggacagacgtccgggctcgcggtgtcagcagagtggcccttcctccagctctggaggacagaagtctgggctcgcggtgtcacagagtggcccttcctccggctctggaggacagaagtctgggctcgcggtgtcagcagagtggcccttcctccggctctggaggacagacgtctgggctcgcggtgtcacagagtggcccttcctccggctctggaagacagacatctgggatcacggtgtcagcagagtggcccttcctctggctctggaggacagacgtctgggatcacggtgtcagtagaggggcccttcctctggagcctctagtggggaacctgttagttgcatcttttggcttctggtggctggtgtttcttttttcttttttcatctttttttttttttaatttaattagagacagggtctgcctgtgtagcccaggctggtctcaaactcctggcctcaagcagtcctcctgctctgtcctcacaaagtgctgtggttacaggcgtgagtcatggggcccagcctgttggtgtttcctgacttgtggccccatcactgcagtctctgccttcagggtcacatggccttctcctctgctggagcatcccctcctgtaagtttcttttttttttttttttttttgagatggagcctagctctgtcacccaggctggaatgctgtggcgggatcttggctcactgcaacctccacctccagggttcaagcaactctcgtgcctcagccccccaagtagctgggactaccagtgagcaccactacacctggctaatttttgtatttttagtagagatgaggtttcaccatgttggccaggctgatctcaaactcctaaccttaggtgatctgcttgcttcagcctctcaaaatgctgggattacaggcgtgggccagcacgcccagcctcctgtaagtttattgtaaaggcactcatcatgtgatttcgggcatgctgggcaatctaggatgatttcctcatcttaagatccctattttagttacaacaaaaatcactttttctcataatgtcactgttgtggtttgaatgatggtgtcctctctaaaactgatgctgaaactgaatcctcaatgcaacagcattaagaggtggggcctttaggtggtgattaggctattagagctctgccctcatggatatggttagtgtcttatcaaatgtcttcgggggtgagttcattccttctacctcctctgctatggaggatgcagcgttcatcccctcaaaggtcttcgggggtgagctcattccttctacctcctctgctatggaggacacagtgttcctcccctctggaagatgctgcaataaggcaacattgtggaagcagagagcagcctcacctgcccccaggtctgctgctgccttgatcttgaacttcccagcctctagaactgtgagaaataaattcccattgtttgaaaatc

SEQ ID NO: 9497 - protein, 143 aa, Homo sapiens
MGPSLLVFPDLWPHHCSLCLQGHMAFSSAGASPPVSFFFFFFFLRWSLALSPRLECCGGILAHCNLHLQGSSNSRASAPQVAGTTSEHHYTWLIFVFLVEMRFHHVGQADLKLLTLGDLLASASQNAGITGVGQHAQPPVSLL

SEQ ID NO: 9498 - DNA, 421 bp, Homo sapiens
gcctcaaaaaggtaaagtgggaatgaagaaagccatgacatgggataaccaccgtcagtggcaggtctccggcctccctacgcagcatggtgacccccaggcttatcaagatataaaagtccatcctggagggcacattcggctccgcaggcttctcccagtctctctacagcttatgagtggttgaaccagattcagaactgctctccagaggacttttggaaatttggggatggagaaggaaatttgttgtcagaatgattaaggaatgtcgtcaatatttcacaactaggcccagaagttttaacaccttgcaacgtataggacatccctgcctaaagaaaaaatgcttttccccaaatgccagtagatacctgtattagtcagggttctccaaggaaacagaactaatgggaaattc

SEQ ID NO: 9499 - protein, 54 aa, Homo sapiens
MKKAMTWDNHRQWQVSGLPTQHGDPQAYQDIKVHPGGHIRLRRLLPVSLQLMSG

SEQ ID NO: 9500 - DNA, 3012 bp, Homo sapiens
ggaacctgcgagctggggcgcggcctcggggaggggcgggcgggacagacccagccgccccggctcccccgccgtccgcgtctgcgccggccccggggcctggtcggcggcggcggggccggtcgatggcccgggcggcggcggcggcatgcggctcctgttcctggcggtgctgcggccacacaccggcaacgcggtcacggcccagcgcgttcgggcccatctagaggctgcagggcacgtgtgcgttttgaaggatgcctttgactttgaaagccgatctgagattgcaaacctcatcttggctgagaactgcgaggctgccctggctcttcatctctataggggaggcaggcttttgcaaggccaccgaatcccttttggagtcatctttggtggaactgatgtaaatgaagatgccaaccaggcggaaaaaaacacagtcatgggcagagttcttgaggaagccagccgcatgctaagggtaaggtctatgtccagagtcaaggaattgcaacaacaccaaacgccgcttttaactggaatacctttcttcaacgctctgagattaaccaaagtgctgataatttgcacatatttcttctgatatgtggacttcgacaagttaaggatcctctctatctggtggacgcattttcagcctggcatcaggaggagcccaatgtgcacctggtgattgtgggtcctgaagtcgatccagtgtttacaagggaagtgaaagccaaagtgaaaagagccgctggggtacgattgattggagagatgcctcaagaagatctgcacgcggtggtgaagaattgcttcgcggtggtgaatagctctgtctctgaaggcatgtcagctgcaattttggaggcaatggatttagaagtaccggtattggccaggaacatccccgggaatgctgccgtggtgaagcatgaagtcacagggctactgttttccaatcctcaggagtttgttcatctggcaaagagactggttagtgatcctgcattagaaaaggaaatcgtagtgaacggaagggaatacgtgagaatgtatcattcatggcaggtggaaagagacacctaccaacagctcatcaggaagctggaaggaagcactgaagattgagggccccgcctcatcagacacctgctctctgacacacagctctgggtgcacactcagagacagagttctggatcacgtgggcccagtgcagttcaaataaaaccagcctcagcggaatcctagaaaatgttagtcgtgagtccccagagccactgcattcatcccatatccttctgtgcgttcagatgctgtcccaggcgtgttcaccagccagtcctgatggaggtgcatgagtgactgggttgactgggacagggaaaggggaactggttttcagggaatttgggagagaatttgattacctgccttagggctttggtgtggacaatagaggcttattttcaagcagtcatggttcagactcctcccgcctgccttctgaccaacctctccccatcgttgccagtttgaaaggcaaaagcaaaacagacgtgtcagctgagccgagtcctcgcaggatttttgttgtgatctcaggactctgacaggcacgtgggtgacccgaggcttctctgaacactagaaagcgctgtgagtgagctcacgcccggcacagctcacttttcaatggtggaattgaaagttgtgctttttagaaaagtggccaggctgcccgcaggccccgcccacctcttggctgaatttgagtggaaaaccaggaaggaacaagcgccacgtcacgcatagcctgcaaatcgcccgcgtgaccctgagatggaggcctgaggctttgggtccagggtgggctcttccccttcccacatcagggacccggggatggatgtcggaagggtcaccagcctccagcctttggcaggatggagcttgggtctgcagggctttgcagccacacagcgaggtcagtccggggccagccgcgccatcatggtaatggtggcctcgccccatccatgtcatccatgtcacatgaggacgtgcagtcttccttgtcctctcctagtggaatttgcctgggagaacctccactgaatactgaaattgttgcatgcctgtggattccttacgacaatggggaacgcggtgtttcccacctcttgtgggtagaaagcagtctgctttgaggaggcgagaaggcaaagccagggcagggcgttgctgtgggaagcgttcggtgaaagcgggtttcgacgcttaggagggccgagggagaagattccaccagcattgtccttgcttcaagttttaggatgtctgaactttcagctttcatgttttcaaccatcatttttttaatggcacaacctacatcttgtttttaaaagaagtagcctcaaattaaactccttaaactctgatgccctggggatgagaacaactagcttggatctcgtgccgtgtaattcaatgtttcattccgctgcctccatcatgtaatagaatcgctttccagaaaggcagttaactggaagcagcagaggctcccagccgtgagaggactgctcaacaatgccccccatcgccgcccccccacccctcgcaccccttgtgttttccctctgaggggcccaagggttatggctttcatgtctaggtgtggggacagaggagggagaggcagatcctgggccgggagaggatggcctggtctgaatctggagtaattaatgccacccaaagaaaaggccctgccaggtccaatgttgtcttagatctgatgatgctgctatttacaaaacactgatcgtccgaaagcttgaatctgttcctcctcgaatgaccctgtagatgcctgacctccaccgtacctccacatcactattcatgtccttctaggaaaatgtgcacatgcctcacgcactatgtgggaagggcgtgtttttaaattaataaagtgtgtcaccattagccatacga

SEQ ID NO: 9501 - protein, 152 aa, Homo sapiens
MRLLFLAVLRPHTGNAVTAQRVRAHLEAAGHVCVLKDAFDFESRSEIANLILAENCEAALALHLYRGGRLLQGHRIPFGVIFGGTDVNEDANQAEKNTVMGRVLEEASRMLRVRSMSRVKELQQHQTPLLTGIPFFNALRLTKVLIICTYFF

SEQ ID NO: 9502 - DNA, 2722 bp, Homo sapiens
gtcggcggcggcggggccggtcgatggcccgggcggcggcggcggcatgcggctcctgttcctggcggtgctgcggccacacaccggcaacgcggtcacggcccagcgcgttcgggcccatctagaggctgcagggcacgtgtgcgttttgaaggatgcctttgactttgaaagccgatctgagattgcaaacctcatcttggctgagaactgcgaggctgccctggctcttcatctctataggggaggcaggcttttgcaaggccaccgaatcccttttggagtcatctttggtggaactgatgtaaatgaagatgccaaccaggcggaaaaaaacacagtcatgggcagagttcttgaggaagccagatttgctgtcgctttcacagagtcaatgaaggaaatggcacaagcgcagtgggtcgatccagtgtttacaagggaagtgaaagccaaagtgaaaagagccgctggggtacgattgattggagagatgcctcaagaagatctgcacgcggtggtgaagaattgcttcgcggtggtgaatagctctgtctctgaaggcatgtcagctgcaattttggaggcaatggatttagaagtaccggtattggccaggaacatccccgggaatgctgccgtggtgaagcatgaagtcacagggctactgttttccaatcctcaggagtttgttcatctggcaaagagactggttagtgatcctgcattagaaaaggaaatcgtagtgaacggaagggaatacgtgagaatgtatcattcatggcaggtggaaagagacacctaccaacagctcatcaggaagctggaaggaagcactgaagattgagggccccgcctcatcagacacctgctctctgacacacagctctgggtgcacactcagagacagagttctggatcacgtgggcccagtgcagttcaaataaaaccagcctcagcggaatcctagaaaatgttagtcgtgagtccccagagccactgcattcatcccatatccttctgtgcgttcagatgctgtcccaggcgtgttcaccagccagtcctgatggaggtgcatgagtgactgggttgactgggacagggaaaggggaactggttttcagggaatttgggagagaatttgattacctgccttagggctttggtgtggacaatagaggcttattttcaagcagtcatggttcagactcctcccgcctgccttctgaccaacctctccccatcgttgccagtttgaaaggcaaaagcaaaacagacgtgtcagctgagccgagtcctcgcaggatttttgttgtgatctcaggactctgacaggcacgtgggtgacccgaggcttctctgaacactagaaagcgctgtgagtgagctcacgcccggcacagctcacttttcaatggtggaattgaaagttgtgctttttagaaaagtggccaggctgcccgcaggccccgcccacctcttggctgaatttgagtggaaaaccaggaaggaacaagcgccacgtcacgcatagcctgcaaatcgcccgcgtgaccctgagatggaggcctgaggctttgggtccagggtgggctcttccccttcccacatcagggacccggggatggatgtcggaagggtcaccagcctccagcctttggcaggatggagcttgggtctgcagggctttgcagccacacagcgaggtcagtccggggccagccgcgccatcatggtaatggtggcctcgccccatccatgtcatccatgtcacatgaggacgtgcagtcttccttgtcctctcctagtggaatttgcctgggagaacctccactgaatactgaaattgttgcatgcctgtggattccttacgacaatggggaacgcggtgtttcccacctcttgtgggtagaaagcagtctgctttgaggaggcgagaaggcaaagccagggcagggcgttgctgtgggaagcgttcggtgaaagcgggtttcgacgcttaggagggccgagggagaagattccaccagcattgtccttgcttcaagttttaggatgtctgaactttcagctttcatgttttcaaccatcatttttttaatggcacaacctacatcttgtttttaaaagaagtagcctcaaattaaactccttaaactctgatgccctggggatgagaacaactagcttggatctcgtgccgtgtaattcaatgtttcattccgctgcctccatcatgtaatagaatcgctttccagaaaggcagttaactggaagcagcagaggctcccagccgtgagaggactgctcaacaatgccccccatcgccgcccccccacccctcgcaccccttgtgttttccctctgaggggcccaagggttatggctttcatgtctaggtgtggggacagaggagggagaggcagatcctgggccgggagaggatggcctggtctgaatctggagtaattaatgccacccaaagaaaaggccctgccaggtccaatgttgtcttagatctgatgatgctgctatttacaaaacactgatcgtccgaaagcttgaatctgttcctcctcgaatgaccctgtagatgcctgacctccaccgtacctccacatcactattcatgtccttctaggaaaatgtgcacatgcctcacgcactatgtgggaagggcgtgtttttaaattaataaagtgtgtcaccattagccatacga

SEQ ID NO: 9503 - protein, 266 aa, Homo sapiens; identical to SEQ ID NO: 1381

SEQ ID NO: 9504 - DNA, 4174 bp, Homo sapiens
cagccccgggacagcccgcctggcgcgcggggctctgcgcgctgcgaccctccccggcagtcccgcccgcctctcctcgccctctctctgcctggcctccaactttgcctctcgctatcctctccgccggcgccccctttcccggcggtccccgggatggtccccggcaccccgaggacgccgaggttacgggaagttcggggactggcgggagaaggggtttgggggtggtccgcggcgaggggcgcggggtgcatcttctcttccttttatgggctgccacacttgtgtatcccttcttccttgaatttaaccaggagtgagcagtggacagcttcttccctatgagaaggaggtgaagcaggacctgaaatcccgtgctcagctcccacatgccccgtgtccaggacaagtcctttgctgaatcagcggcagacaccacccggagccctgcgggagcctttccctgttcttccagcatggatctgaaactcccttcccactttctgcagcctcccagagatagttcaggctccagcctcatgtgatagcatgaagagaaactggttccaacagctgtgtgctctgctgccctcatcccaaacaacagtttaaatgcacaattacgcttttctctaaggcccaaaataggataggaaagatcgttttgctatccctgaatgcctgtcacccttgtttcgtaagcaggaagtcagtcccagaatagttgttctgctccctcccttctaataagtgctgcgctgagtgtgcttgctttgccagatggttaaaacagagcaggggatagaaggacagatgtcttcaccctcatggagttcaccttccagtaggaggaggcgataggccggggtctgcacatgtgcgtgctacagcctgttccacggtgcgtggcgtgcggggcagtagagacaggatttcaccatgttggctaggatggtctcgatctcctgaccttgtgatccgcccctccctcagcctcccaaagtgctgggattacaggcgtgagccactgcaccctgccagaaaactcattcttctactccatcctacagttttccctaagagagaaacaataaaacgccaccacgaccaatggcaaaaagctggcacccactccacgacttttcatatctacacgtttgtacagctttatttttaagcattctgaaattctatgcaggagagaccccagctaggtttagggagtcctagggtttgtggagtaaatgaagtttctccctagaattagggagggtagagacaggcagagaactgacaatcctaacagctgctgtcctcagagccactgtttctgagagctgctcgctgagtgcttctagcgagttaaatggtgttcgcccaaaagacctgttcacgtcctgatcctgggaacctgtggctgtgatcttatttggaaaaagctctacattacgtctttgcagaagtaatcatgttaaggatcttgagaggacgtgaccctgaattatccggctgtgcttgacatccaatgactggtgatgttgtaagagaaagacggagggagatgtaagatatgagagaaggccacgccgagactggagtgatgtggccgtgagccgaggaatgcctggagccaccagaagctggcaaaggcagaaggagcctcctctggaccctgtggtgggtacgcagcctggcagatatattcattttggacttctggcctccagggctgtgagagaatacatttctgcagttttaagccacgcaatctgtgtccctgggaagcccaaatagggcgagaccttttgccaagtggtctccaagtgtcacgtcatcgaatccttctcccgggcttgtgccatagtctttccactttagagaggaggaaacggaggctctggggcacaaagccagtcagtggcggggcctgactttcaacccagcctgcatggggtcagagaacccactttccccgtggggcctgcggcctatgctaaggatgcttgttcatctctcctgggcccgggagtggttcttctggcctagaaggcaagagaagccagtctttcggtttcaaggtttcccattagtggagtcaagcaaaaatggtgtgttgcgcttcttcctgagctcagcctgggagcacggccttaacatgctcagtggatcccaagacggcagcatggcggtgccagcctggcagccttagctccttgcagctgtgcttgtgaagggagcagtgagtggcttccctctgtgaccaccttgggtcctaagtttcactggggctgggatccatgcgtcttgcaattggctaggaatttcccgggctttccctcccttccctgttcagggcactgggtgtgaggcattgcatccgttcttctgctcacctgcttccccctaagagtgtgagctgtataaaggcaggaaccaaacaggagcctccacgtgttcccagttcaagggcagtgtcccttgtgtgtttcttcaataattcagtggatgacttattctgcacggacactgcacacactcggccctgccgtctccggagctgggaggtgtggagctggctcctgacctatttacacactgaggagggatgtggaaaacaggaggagtcccagggctccaatgcaaagaggagcctcttcattccctctgccgtggccgtgcaagggacagcgccttgtgggattgtgtcctccacccaattatccttagcattagtttgctaaggataatggcctccagctccacccatgtccctgcaaaggacatgatctcattcctttctgtgtctgcatagtattccatggtgtatatgtaccgcgttttctttatcgagtctatcattgatgggcgcttcagttgattccatgtctttgctactgtgactcgtgctgcaatgagcattcgcgtgcatgcctttatggtggaattatttctattcctttgggtgcatacccagtcatgggattgctgggtcaaatggcatttctgcctctaggtctttaaggaattgccacgctgtcttccacaatgcaagcaagacgttattgaaagtgtaaagggggctgctaattacgctggggcaggcggggcaaaccaggaccctgccaggcgagtctaggccatggccccacaccagaagatgagggctggagactcctggagaggaatctgagtggcgagaccacctgcattcattatgtgtcaactctgccaggtgacagtccccagtgagcccatcaaacatgaacctaggtgctgttgggaaggtctttggatgccattaacatctacaatcagttggttttcagtagaggagattatcctcaagaatgtgggcgggcctcatccagtgagctgaaaggccttgagagcagaactaggattttggaggaggatgaagtgttgcctccggaccgcagcgtcacctcttgcctgggaatttccagcttccttttcagacttcggacttgcctccaagctccctgaatcttttcatatatttatgtcctattgcagattgtgtttctctggctggactgtaactgatgaggaggactgaaattccaggcttggttgtatagcatataagtgaggtcatttgggtctggggagctggggggggggtccttcagctgcatgagtgtgacctgcaccaaggtgcctggctacctggggcgagggggctgccatctagcccacaccccactcctaggccgtgcaccctggcatgggtctatgtctggctcaaggaagggttccctcctccctccaatgtgcacagagaccttgagatcccatccacctaaccctgtgccctcagaagcctcctctgagagggggcaccttttcctaattctcacaaaggctagtggctaccttgtagatagccttggatgtgttaggacacttttctgaacatcagttccttatctgtaagatgggagttgtgtcctcaatgggtaattagagattattcatgggaaatcctatcacggtatctaccacggggagactcacaagtgctgatctttgctggtgttgctgcatttgttattgaatgcattcgttaggagtcttgttagtaagtgacaaaaatccaactcaaattggcttacactaaacaagtttcctgcatctgggagtataaagggtg

SEQ ID NO: 9505 - protein, 63 aa, Homo sapiens
MVPGTPRTPRLREVRGLAGEGVWGWSAARGAGCIFSSFYGLPHLCIPSSLNLTRSEQWTASSL

SEQ ID NO: 9506 - DNA, 5597 bp, Homo sapiens
ggcagcctcctccccgccgccccgccgcgggctcccgggccccgcgggggccgatcccccccggcctgcagcccagcctgcggggggcgcagcgcctagtcccgcccgcgtcgcccgccagccccgggacagcccgcctggcgcgcggggctctgcgcgctgcgaccctccccggcagtcccgcccgcctctcctcgccctctctctgcctggcctccaactttgcctctcgctatcctctccgccggcgccccctttcccggcggtccccgggatggtccccggcaccccgaggacgccgaggttacgggaagttcggggactggcgggagaaggggtttgggggtggtccgcggcgaggggcgcggggtgcatcttctcttccttttatggtgagtcccgggcggagggcgctttcaaagggaggtgggatttgcgttttatagcctgggccataaagtaggcccttgcttgtaaacctgcccgcatcttcctgaggctggggaggtgctaccagccccgggctccgggctccgaggagggattttctttgaaatttcaaagagacgagctaaggggagggggaggggctcgagaatccggattttagggccgctcatccgaggtctcctctaagaaggcgggaagggggaggggcgggaagcgtcccgggactttgaacaccgcctcccaccccgcgggaagtgcgggcttggtttgtaccgcggtgacccccgccccctccgaagccgcagagccggggcctcgcgccagcagggctggagatgccttcttggcggctgagtttatttattataggaagtcattcgctcgtggggtatttatgtgatttggcgagtgatgtgcccggccagcgccctccttggctgcagccccgcaggaggacccggagtagggtgggatggagtgggtcgtgggaggagcgcgtcagcgcctgcccggggacccccagctcccgcgaggacacggaggcgcgcacgccgctcggttttcctggaaagtggagaaggagcgtcctgggcaggtcctctgagctcatcccccctcggattggggcgggtctgtgacggggtcacttaggacacgacgtccccccgccattcccttcccccgcccagggcgttcgcggtgggcgcccaccgccaagccccactgttcccaaggatgcgccaggtgcttcccgtagcgtcctgggttgacccttaaaaaaacagcacccctaggaggtggccggccctctcctcccagggtctctccgggtcacgatcttccaaagttcggaaactcgcaggatcgcgtgtgcaatctcccgctacctcccggggggccggggagaggtcagaggagcgagtcccgcgtccaccggcctcgcttgccccctgcccgtttgaggatagttccagggagcagggtggagtgtgcggacatctttggaggcagtgctggggcttcccgcgttggcggcgctccacccggcgtggggggcggctgcacgggcccccgcggtggggacgctgcgcacggggcaaggtctccctaggaagcgcccgggaaggagatggggcccgccaggaacccccctcactgaccagctttctgcacgccgtgcaggagggggccacttcctcggagagtattggcttttaattaaaacaagccctacaatttttacatcgggctgccacacttgtgtatcccttcttccttgaatttaaccaggagtgagcagtggacagcttcttccctatgagaaggaggtgaagcaggacctgaaatcccgtgctcagctcccacatgccccgtgtccaggacaagtcctttgctgaatcagcggcagacaccacccggagccctgcgggagcctttccctgttcttccagcatggatctgaaactcccttcccactttctgcagcctcccagagatagttcaggctccagcctcatgtgatagcatgaagagaaactggttccaacagctgtgtgctctgctgccctcatcccaaacaacagtttaaatgcacaattacgcttttctctaaggcccaaaataggataggaaagatcgttttgctatccctgaatgcctgtcacccttgtttcgtaagcaggaagtcagtcccagaatagttgttctgctccctcccttctaataagtgctgcgctgagtgtgcttgctttgccagatggttaaaacagagcaggggatagaaggacagatgtcttcaccctcatggagttcaccttccagtaggaggaggcgataggccggggtctgcacatgtgcgtgctacagcctgttccacggtgcgtggcgtgcggggcagtagagacaggatttcaccatgttggctaggatggtctcgatctcctgaccttgtgatccgcccctccctcagcctcccaaagtgctgggattacaggcgtgagccactgcaccctgccagaaaactcattcttctactccatcctacagttttccctaagagagaaacaataaaacgccaccacgaccaatggcaaaaagctggcacccactccacgacttttcatatctacacgtttgtacagctttatttttaagcattctgaaattctatgcaggagagaccccagctaggtttagggagtcctagggtttgtggagtaaatgaagtttctccctagaattagggagggtagagacaggcagagaactgacaatcctaacagctgctgtcctcagagccactgtttctgagagctgctcgctgagtgcttctagcgagttaaatggtgttcgcccaaaagacctgttcacgtcctgatcctgggaacctgtggctgtgatcttatttggaaaaagctctacattacgtctttgcagaagtaatcatgttaaggatcttgagaggacgtgaccctgaattatccggctgtgcttgacatccaatgactggtgatgttgtaagagaaagacggagggagatgtaagatatgagagaaggccacgccgagactggagtgatgtggccgtgagccgaggaatgcctggagccaccagaagctggcaaaggcagaaggagcctcctctggaccctgtggtgggtacgcagcctggcagatatattcattttggacttctggcctccagggctgtgagagaatacatttctgcagttttaagccacgcaatctgtgtccctgggaagcccaaatagggcgagaccttttgccaagtggtctccaagtgtcacgtcatcgaatccttctcccgggcttgtgccatagtctttccactttagagaggaggaaacggaggctctggggcacaaagccagtcagtggcggggcctgactttcaacccagcctgcatggggtcagagaacccactttccccgtggggcctgcggcctatgctaaggatgcttgttcatctctcctgggcccgggagtggttcttctggcctagaaggcaagagaagccagtctttcggtttcaaggtttcccattagtggagtcaagcaaaaatggtgtgttgcgcttcttcctgagctcagcctgggagcacggccttaacatgctcagtggatcccaagacggcagcatggcggtgccagcctggcagccttagctccttgcagctgtgcttgtgaagggagcagtgagtggcttccctctgtgaccaccttgggtcctaagtttcactggggctgggatccatgcgtcttgcaattggctaggaatttcccgggctttccctcccttccctgttcagggcactgggtgtgaggcattgcatccgttcttctgctcacctgcttccccctaagagtgtgagctgtataaaggcaggaaccaaacaggagcctccacgtgttcccagttcaagggcagtgtcccttgtgtgtttcttcaataattcagtggatgacttattctgcacggacactgcacacactcggccctgccgtctccggagctgggaggtgtggagctggctcctgacctatttacacactgaggagggatgtggaaaacaggaggagtcccagggctccaatgcaaagaggagcctcttcattccctctgccgtggccgtgcaagggacagcgccttgtgggattgtgtcctccacccaattatccttagcattagtttgctaaggataatggcctccagctccacccatgtccctgcaaaggacatgatctcattcctttctgtgtctgcatagtattccatggtgtatatgtaccgcgttttctttatcgagtctatcattgatgggcgcttcagttgattccatgtctttgctactgtgactcgtgctgcaatgagcattcgcgtgcatgcctttatggtggaattatttctattcctttgggtgcatacccagtcatgggattgctgggtcaaatggcatttctgcctctaggtctttaaggaattgccacgctgtcttccacaatgcaagcaagacgttattgaaagtgtaaagggggctgctaattacgctggggcaggcggggcaaaccaggaccctgccaggcgagtctaggccatggccccacaccagaagatgagggctggagactcctggagaggaatctgagtggcgagaccacctgcattcattatgtgtcaactctgccaggtgacagtccccagtgagcccatcaaacatgaacctaggtgctgttgggaaggtctttggatgccattaacatctacaatcagttggttttcagtagaggagattatcctcaagaatgtgggcgggcctcatccagtgagctgaaaggccttgagagcagaactaggattttggaggaggatgaagtgttgcctccggaccgcagcgtcacctcttgcctgggaatttccagcttccttttcagacttcggacttgcctccaagctccctgaatcttttcatatatttatgtcctattgcagattgtgtttctctggctggactgtaactgatgaggaggactgaaattccaggcttggttgtatagcatataagtgaggtcatttgggtctggggagctggggggggggtccttcagctgcatgagtgtgacctgcaccaaggtgcctggctacctggggcgagggggctgccatctagcccacaccccactcctaggccgtgcaccctggcatgggtctatgtctggctcaaggaagggttccctcctccctccaatgtgcacagagaccttgagatcccatccacctaaccctgtgccctcagaagcctcctctgagagggggcaccttttcctaattctcacaaaggctagtggctaccttgtagatagccttggatgtgttaggacacttttctgaacatcagttccttatctgtaagatgggagttgtgtcctcaatgggtaattagagattattcatgggaaatcctatcacggtatctaccacggggagactcacaagtgctgatctttgctggtgttgctgcatttgttattgaatgcattcgttaggagtcttgttagtaagtgacaaaaatccaactcaaattggcttacactaaacaagtttcctgcatctgggagtataaagggtg

SEQ ID NO: 9507 - protein, 100 aa, Homo sapiens
MPSWRLSLFIIGSHSLVGYLCDLASDVPGQRPPWLQPRRRTRSRVGWSGSWEERVSACPGTPSSREDTEARTPLGFPGKWRRSVLGRSSELIPPRIGAGL

SEQ ID NO: 9508 - DNA, 788 bp, Homo sapiens
cagccccgggacagcccgcctggcgcgcggggctctgcgcgctgcgaccctccccggcagtcccgcccgcctctcctcgccctctctctgcctggcctccaactttgcctctcgctatcctctccgccggcgccccctttcccggcggtccccgggatggtccccggcaccccgaggacgccgaggttacgggaagttcggggactggcgggagaaggggtttgggggtggtccgcggcgaggggcgcggggtgcatcttctcttccttttatgggctgccacacttgtgtatcccttcttccttgaatttaaccaggagtgagcagtggacagcttcttccctatgagaaggaggtgaagcaggacctgaaatcccgtgctcagctcccacatgccccgtgtccaggacaagtcctttgctgaatcagcggcagacaccacccggagccctgcgggagcctttccctgttcttccagcatggatctgaaactcccttcccactttctgcagcctcccagagatagttcaggctccagcctcatgtgatagcatgaagagaaactggttccaacagctgtgtgctctgctgccctcatcccaaacaacagtttaaatgcacaattacgcttttctctaaggcccaaaataggataggaaagatcgttttgctatccctgaatgcctgtcacccttgtttcgtaaggtaagattgggaagggcttggccattgcccttgcagctgagaaaccaactttaggaataaagacactctctccatgtctgaca

SEQ ID NO: 9509 - protein, 63 aa, Homo sapiens; identical to SEQ ID NO: 9505

SEQ ID NO: 9510 - DNA, 976 bp, Homo sapiens
agtcccgcccgcgtcgcccgccagccccgggacagcccgcctggcgcgcggggctctgcgcgctgcgaccctccccggcagtcccgcccgcctctcctcgccctctctctgcctggcctccaactttgcctctcgctatcctctccgccggcgccccctttcccggcggtccccgggatggtccccggcaccccgaggacgccgaggttacgggaagttcggggactggcgggagaaggggtttgggggtggtccgcggcgaggggcgcggggtgcatcttctcttccttttatgctgagtgggtcagctcatcacaggcctgcggcccctgcatgggtgacagaggaggcaaagatgacacagagaaactatcccttcagggacagagtggggacacccacgagcttggctctgccttacaaagaaatgagaaggaaccccgttcctgcttttcaccttagggctgccacacttgtgtatcccttcttccttgaatttaaccaggagtgagcagtggacagcttcttccctatgagaaggaggtgaagcaggacctgaaatcccgtgctcagctcccacatgccccgtgtccaggacaagtcctttgctgaatcagcggcagacaccacccggagccctgcgggagcctttccctgttcttccagcatggatctgaaactcccttcccactttctgcagcctcccagagatagttcaggctccagcctcatgtgatagcatgaagagaaactggttccaacagctgtgtgctctgctgccctcatcccaaacaacagtttaaatgcacaattacgcttttctctaaggcccaaaataggataggaaagatcgttttgctatccctgaatgcctgtcacccttgtttcgtaaggtaagattgggaagggcttggccattgcccttgcagctgagaaaccaactttaggaataaagacactctctccatgtctgaca

SEQ ID NO: 9511 - protein, 94 aa, Homo sapiens
MVPGTPRTPRLREVRGLAGEGVWGWSAARGAGCIFSSFYAEWVSSSQACGPCMGDRGGKDDTEKLSLQGQSGDTHELGSALQRNEKEPRSCFSP

SEQ ID NO: 9512 - DNA, 3282 bp, Homo sapiens
cgagtcttctcatcccgggacgcaaacctcgaaacagctgccggctggtcccggccgaggccggcgcagggagggaggagccgcccgggctgtgggggcgccgcgagctgggccggcctcggtgtgcccgcgccgccagcccgctccagacgcgccacctgggcgctccaagaagaggccgaagtttgccgcggccgtgagttggagctcgcgccgggccgctgcgccgggagctccgggggcttccctcgcttcccggtattgtttgcaaactttgctgctctccgccgcggcccccaactcggcggacgccgggcgcggagagccgagccgggggcgctgtgcgcagcgctcgggccaggccgggcgggcatgggcgggggcccgagcaggggtggagagccggggccagcagcagcccgtgcccgggagcggcggcgctgaggggcgcggagctccccgcgaggacacgtccaacgccagcatgcagcgcccgggcccccgcctgtggctggtcctgcaggtgatgggctcgtgcgccgccatcagctccatggacatggagcgcccgggcgacggcaaatgccagcccatcgagatcccgatgtgcaaggacatcggctacaacatgactcgtatgcccaacctgatgggccacgagaaccagcgcgaggcagccatccagttgcacgagttcgcgccgctggtggagtacggctgccacggccacctccgcttcttcctgtgctcgctgtacgcgccgatgtgcaccgagcaggtctctacccccatccccgcctgccgggtcatgtgcgagcaggcccggctcaagtgctccccgattatggagcagttcaacttcaagtggcccgactccctggactgccggaaactccccaacaagaacgaccccaactacctgtgcatggaggcgcccaacaacggctcggacgagcccacccggggctcgggcctgttcccgccgctgttccggccgcagcggccccacagcgcgcaggagcacccgctgaaggacgggggccccgggcgcggcggctgcgacaacccgggcaagttccaccacgtggagaagagcgcgtcgtgcgcgccgctctgcacgcccggcgtggacgtgtactggagccgcgaggacaagcgcttcgcagtggtctggctggccatctgggcggtgctgtgcttcttctccagcgccttcaccgtgctcaccttcctcatcgacccggcccgcttccgctaccccgagcgccccatcatcttcctctccatgtgctactgcgtctactccgtgggctacctcatccgcctcttcgccggcgccgagagcatcgcctgcgaccgggacagcggccagctctatgtcatccaggagggactggagagcaccggctgcacgctggtcttcctggtcctctactacttcggcatggccagctcgctgtggtgggtggtcctcacgctcacctggttcctggccgccggcaagaagtggggccacgaggccatcgaagccaacagcagctacttccacctggcagcctgggccatcccggcggtgaagaccatcctgatcctggtcatgcgcagggtggcgggggacgagctcaccggggtctgctacgtgggcagcatggacgtcaacgcgctcaccggcttcgtgctcattcccctggcctgctacctggtcatcggcacgtccttcatcctctcgggcttcgtggccctgttccacatccggagggtgatgaagacgggcggcgagaacacggacaagctggagaagctcatggtgcgtatcgggctcttctctgtgctgtacaccgtgccggccacctgtgtgatcgcctgctacttttacgaacgcctcaacatggattactggaagatcctggcggcgcagcacaagtgcaaaatgaacaaccagactaaaacgctggactgcctgatggccgcctccatccccgccgtggagatcttcatggtgaagatctttatgctgctggtggtggggatcaccagcgggatgtggatttggacctccaagactctgcagtcctggcagcaggtgtgcagccgtaggttaaagaagaagagccggagaaaaccggccagcgtgatcaccagcggtgggatttacaaaaaagcccagcatccccagaaaactcaccacgggaaatatgagatccctgcccagtcgcccacctgcgtgtgaacagggctggagggaagggcacaggggcgcccggagctaagatgtggtgcttttcttggttgtgtttttctttcttcttcttctttttttttttttataaaagcaaaagagaaatacataaaaaagtgtttaccctgaaattcaggatgctgtgatacactgaaaggaaaaatgtacttaaagggttttgttttgttttggttttccagcgaagggaagctcctccagtgaagtagcctcttgtgtaactaatttgtggtaaagtagttgattcagccctcagaagaaaacttttgtttagagccctccctaaatatacatctgtgtatttgagttggctttgctacccatttacaaataagaggacagataactgctttgcaaattcaagagcctcccctgggttaacaaatgagccatccccagggcccacccccaggaaggccacagtgctgggcggcatccctgcagaggaaagacaggacccggggcccgcctcacaccccagtggatttggagttgcttaaaatagactccggccttcaccaatagtctctctgcaagacagaaacctccatcaaacctcacatttgtgaactcaaacgatgtgcaatacatttttttctctttccttgaaaataaaaagagaaacaagtattttgctatatataaagacaacaaaagaaatctcctaacaaaagaactaagaggcccagccctcagaaacccttcagtgctacattttgtggctttttaatggaaaccaagccaatgttatagacgtttggactgatttgtggaaaggaggggggaagagggagaaggatcattcaaaagttacccaaagggcttattgactctttctattgttaaacaaatgatttccacaaacagatcaggaagcactaggttggcagagacactttgtctagtgtattctcttcacagtgccaggaaagagtggtttctgcgtgtgtatatttgtaatatatgatatttttcatgctccactattttattaaaaataaaatatgttctttagtttgctgcta

SEQ ID NO: 9513 - protein, 581 aa, Homo sapiens; identical to SEQ ID NO: 1385

SEQ ID NO: 9514 - DNA, 4736 bp, Homo sapiens
gctgggcggggagccagagactgattcgctgcggtcctgggcccagcggctgggaggtcccgccctggccgaggaaatgaagagggcgcagggcatgggggcggcgcgcacccgggacagtttccagtcggcttctccgtgaccttcctcccccttccagctcggagcgggatgctgggatccctccaaggaccctctgaggacgtaggagggatgctgagacaggcaacttcaaaccttgtcaagctctgacaagggaagatgaagcctagttccagctaggggtgacctgtctatctgcattttttgagctgcagagtgatgggagtcatattcgctgcctgtgcagcaccacaggcctgatgaaaatgaaatggcaacaccgtgcagatggcaaagcgtaggcctcacaaacatcctggccgtgaagagcttgtcttcaagagtagctggtgcagaaactcgcccgtggccacccaggagcccgatgtgcaaggcaggtgtgagtgccaggacggcattcctggagatgaaggcctggagctgcggtctgcggactcggcagtgcccgtggccatgacccaggctgccgtgcggccctgggcaccctgcctggagaacatgaccactgccccaaacggcctcgggccaggccccgcagccccctgtgcaggctcggacctgaaagacgccaagatggtgacctcccttgcgtgtggaaatggagtctgtggctgcagccctggtggcgacacggacacccaggaagccaaactcagcccagccaagcttgtgcgcctcttttccaccagtcggaagaggacgggtgcccaccccgagcggccccactccatggtcctggtggggaactcctccacatggaacaccctcgcctccttccggaaaatgggatcctttaagaaactgaagtcctcagtcctgaaaggaattcagagccgagaggggtcaaatgcctgttcaaagggagaggcttcggagcatggcctgggaaagtccatcccaaatggcgctgtcccaggagcccaggcaagcaggggctcccccttagcaccgggaccagcatgtggtgccctcaggccagcagagtggggcacattggatggctccgacctcgaggacacggacgatgccttccagcggagcacacaccgctcccgcagcctccgcagagcctacggcctgggccgcatctgcctgctggatgcgccccagaaccatgcgacacccacgatagccactggccaggtgcccgccgtgtgtgagattctcgtgagggaccctgaaaacaacagcatgggctacaggaggagcaagagcacggacaatcttgcctttctgaagaagagctcctttaagcggaagtccacctccaatcttgcagacctcaggacggcccatgacgcacgggtaccacagaggaccctgagcagttcctccactgactcccaaaagcttgggtcaggaaggaccaaacgctggaggagcccgataagggccaaggactttgacagagtcttcaaacttgtgagcaatgtgactgaggctgcctggaggagggagagtcctaggagtggggccccatcccctggagaggccagcctgagacttcaggcacacagccggctgcatgacgactactcccgccgcgtctccaggagcactgagcaggacagcaggcggggcggggcggtcatgcatgggaccactgcaacctgcaccgtggcccccggtttcggctcagccacctctaaggggccccacctagacgctgacactgccgtatttcctcttgaaaccaaaagttcctgggcggtggaaagcgacagttcctgcacttgcagctctttgccaagcccgattgtccaggatgtgttgagcaaagactcctgtgacccaaacgctggcagccagttgacatttgaccctgagcagcctcccacccctctaaggcccaccacacccaagccccagagccctcagagcccccagagccccggggcaggaagtgccagctgtcacagcaatcacagtgccctgtccgcgaattcagaggaaagtgaaggaagggcagaagagcctgctcagagagagccagggcctgtgtccttgcaggatcccctggaagccacacatggtgatgagggcagcaaggaccttctggtgaacattggtgtggcagccggcccagaagaaaaggagaaggaggagccggcttccaggccgcccatgcctgctcaccaggtgccaccctacaaggctgtgtcggcccggttccggcccttcacattctcccagagcacccccattgggttggaccgtgtgggacgccggcggcagatgagagcatccaacgtttcttcagatggaggtactgagccctctgccttagtggatgacaacggtagtgaggaggacttcagctatgaagacctctgccaggccagccctcggtacctgcagcccggcggggagcagctggccatcaatgagctgatcagtgatggcaacgtggtctgcgcagaagccctgtgggaccatgtgaccatggatgaccaggaactgggcttcaaagccggggatgtcatccaggttctggaagcctccaacaaggactggtggtggggccgcagtgaagataaggaagcctggttccccgcgagcttcgtcagattgcgagtgaatcaggaagagctgtcggaaaactccagcagcacccccagtgaggagcaggacgaggaggccagccagagccgccacagacactgtgagaacaagcagcagatgcggaccaacgtcatccgggagatcatggacaccgagcgggtgtacatcaaacacctcagggacatctgtgagggctatatccgacagtgccgcaagcacacaggaatgttcaccgttgcgcagctagccactatttttggaaacattgaagatatttacaaattccaaagaaagtttctgaaagaccttgagaaacagtacaacaaagaggaacctcacttaagtgaaataggatcttgctttcttcaaaatcaagagggctttgccatctattccgagtactgcaacaaccacccgggcgcctgcctggagctcgccaacctcatgaagcagggcaagtacagacatttctttgaagcctgccgcctgctgcagcagatgattgacatcgccatcgacgggttcctgctcacaccagtgcagaagatctgcaaatacccgctgcagctggccgagctgctcaagtataccacacaggaacacggtgattacagcaacataaaggcagcatatgaggccatgaagaatgtggcctgtctgatcaacgagcgcaagcgcaagctggagagcatcgacaagatagctcgctggcaggtgtctatcgtgggctgggagggactggatatcttagaccgaagctcagaattgattcattctggggagctgaccaaaatcactaagcaaggcaaaagccagcagcggacgttcttcctgtttgaccaccagctggtgtcctgcaagaaggacctgctgcgcagggacatgctgtactacaagggccggctggacatggatgagatggagcttgtggacctgggggatgggcgcgacaaggactgcaacctcagcgtgaaaaatgccttcaagctcgtcagtaggaccacagacgaggtttatttgttttgtgccaaaaaacaagaagacaaggcgaggtggctgcaggcctgtgcagatgaaaggaggcgggtgcaagaggacaaggagatgggaatggaaatttcagaaaaccagaagaaacttgccatgttaaatgctcaaaaggcaggacatggaaagtcaaaagttcagagtctgtcatctgaaccatgaggatctggtggcttctgcttgccattgaaatctgcacagggaacataaactcacaggacacctgcaggcaagggcaccctggaatccctgggaaccccggtcacaatggtctgcctggaagagatggacgagacggagcgaagggtgacaaaggcgatgcaggagaaccaggacgtcctggcagcccggggaaggatgggacgagtggagagaagggagaacgaggagcagatggaaaagttgaagcaaaaggcatcaaaggtgatcaaggctcacggtgctgagcaagtttccttcttcagatatgcccattaaatttgataagatcctgtataacgaattcaaccattatgatacagcagcggggaaattcacgtgccacattgctggggtctattacttcacctaccacatcactgttttctccagaaatgttcaggtgtctttggtcaaaaatggagtaaaaatactgcacaccaaagatgcttacatgagctctgaggaccaggcctctggcggcattgtcctgcagctgaagctcggggatgaggtgtggctgcaggtgacaggaggagagaggttcaatggcttgtttgctgatgaggacgatgacacaactttcacagggttccttctgttcagcagcccgtgacagaggagagtttaaaaatccgccacaccatccatcagaatcagcttgggatgaacttattcagatggttttactttattaattcctccaattattacaataatcataaaaaggtgaaaatggaaaagttattcccaaaactgattctgtgtaacttactatttttccaggagtaaatatttaaaatagc

SEQ ID NO: 9515 - protein, 1167 aa, Homo sapiens
MAKRRPHKHPGREELVFKSSWCRNSPVATQEPDVQGRCECQDGIPGDEGLELRSADSAVPVAMTQAAVRPWAPCLENMTTAPNGLGPGPAAPCAGSDLKDAKMVTSLACGNGVCGCSPGGDTDTQEAKLSPAKLVRLFSTSRKRTGAHPERPHSMVLVGNSSTWNTLASFRKMGSFKKLKSSVLKGIQSREGSNACSKGEASEHGLGKSIPNGAVPGAQASRGSPLAPGPACGALRPAEWGTLDGSDLEDTDDAFQRSTHRSRSLRRAYGLGRICLLDAPQNHATPTIATGQVPAVCEILVRDPENNSMGYRRSKSTDNLAFLKKSSFKRKSTSNLADLRTAHDARVPQRTLSSSSTDSQKLGSGRTKRWRSPIRAKDFDRVFKLVSNVTEAAWRRESPRSGAPSPGEASLRLQAHSRLHDDYSRRVSRSTEQDSRRGGAVMHGTTATCTVAPGFGSATSKGPHLDADTAVFPLETKSSWAVESDSSCTCSSLPSPIVQDVLSKDSCDPNAGSQLTFDPEQPPTPLRPTTPKPQSPQSPQSPGAGSASCHSNHSALSANSEESEGRAEEPAQREPGPVSLQDPLEATHGDEGSKDLLVNIGVAAGPEEKEKEEPASRPPMPAHQVPPYKAVSARFRPFTFSQSTPIGLDRVGRRRQMRASNVSSDGGTEPSALVDDNGSEEDFSYEDLCQASPRYLQPGGEQLAINELISDGNVVCAEALWDHVTMDDQELGFKAGDVIQVLEASNKDWWWGRSEDKEAWFPASFVRLRVNQEELSENSSSTPSEEQDEEASQSRHRHCENKQQMRTNVIREIMDTERVYIKHLRDICEGYIRQCRKHTGMFTVAQLATIFGNIEDIYKFQRKFLKDLEKQYNKEEPHLSEIGSCFLQNQEGFAIYSEYCNNHPGACLELANLMKQGKYRHFFEACRLLQQMIDIAIDGFLLTPVQKICKYPLQLAELLKYTTQEHGDYSNIKAAYEAMKNVACLINERKRKLESIDKIARWQVSIVGWEGLDILDRSSELIHSGELTKITKQGKSQQRTFFLFDHQLVSCKKDLLRRDMLYYKGRLDMDEMELVDLGDGRDKDCNLSVKNAFKLVSRTTDEVYLFCAKKQEDKARWLQACADERRRVQEDKEMGMEISENQKKLAMLNAQKAGHGKSKVQSLSSEP

SEQ ID NO: 9516 - DNA, 8301 bp, Homo sapiens
gcgcacccgggacagtttccagtcggcttctccgtgaccttcctcccccttccagctcggagcgggatgctgggatccctccaaggaccctctgaggacgtaggagggatgctgagacaggcaacttcaaaccttgtcaagctctgacaagggaagatgaagcctagttccagctaggggtgacctgtctatctgcattttttgagctgcagagtgatgggagtcatattcgctgcctgtgcagcaccacaggcctgatgaaaatgaaatggcaacaccgtgcagatggcaaagcgtaggcctcacaaacatcctggccgtgaagagcttgtcttcaagagtagctggtgcagaaactcgcccgtggccacccaggagcccgatgtgcaaggcaggtgtgagtgccaggacggcattcctggagatgaaggcctggagctgcggtctgcggactcggcagtgcccgtggccatgacccaggctgccgtgcggccctgggcaccctgcctggagaacatgaccactgccccaaacggcctcgggccaggccccgcagccccctgtgcaggctcggacctgaaagacgccaagatggtgacctcccttgcgtgtggaaatggagtctgtggctgcagccctggtggcgacacggacacccaggaagccaaactcagcccagccaagcttgtgcgcctcttttccaccagtcggaagaggacgggtgcccaccccgagcggccccactccatggtcctggtggggaactcctccacatggaacaccctcgcctccttccggaaaatgggatcctttaagaaactgaagtcctcagtcctgaaaggaattcagagccgagaggggtcaaatgcctgttcaaagggagaggcttcggagcatggcctgggaaagtccatcccaaatggcgctgtcccaggagcccaggcaagcaggggctcccccttagcaccgggaccagcatgtggtgccctcaggccagcagagtggggcacattggatggctccgacctcgaggacacggacgatgccttccagcggagcacacaccgctcccgcagcctccgcagagcctacggcctgggccgcatctgcctgctggatgcgccccagaaccatgcgacacccacgatagccactggccaggtgcccgccgtgtgtgagattctcgtgagggaccctgaaaacaacagcatgggctacaggaggagcaagagcacggacaatcttgcctttctgaagaagagctcctttaagcggaagtccacctccaatcttgcagacctcaggacggcccatgacgcacgggtaccacagaggaccctgagcagttcctccactgactcccaaaagcttgggtcaggaaggaccaaacgctggaggagcccgataagggccaaggactttgacagagtcttcaaacttgtgagcaatgtgactgaggctgcctggaggagggagagtcctaggagtggggccccatcccctggagaggccagcctgagacttcaggcacacagccggctgcatgacgactactcccgccgcgtctccaggagcactgagcaggacagcaggcggggcggggcggtcatgcatgggaccactgcaacctgcaccgtggcccccggtttcggctcagccacctctaaggggccccacctagacgctgacactgccgtatttcctcttgaaaccaaaagttcctgggcggtggaaagcgacagttcctgcacttgcagctctttgccaagcccgattgtccaggatgtgttgagcaaagactcctgtgacccaaacgctggcagccagttgacatttgaccctgagcagcctcccacccctctaaggcccaccacacccaagccccagagccctcagagcccccagagccccggggcaggaagtgccagctgtcacagcaatcacagtgccctgtccgcgaattcagaggaaagtgaaggaagggcagaagagcctgctcagagagagccagggcctgtgtccttgcaggatcccctggaagccacacatggtgatgagggcagcaaggaccttctggtgaacattggtgtggcagccggcccagaagaaaaggagaaggaggaggtcgtccctgatggcccctggaggcgaagctcatcacaggatgaggaaaggacagaggcacagagaacccccaagaggagatggggctctgggagacggccaaggcctcggccattctctgactacggccagctggccagccgcagtttgtctattcctgaagactcggttgctgcagacccccagaaggaagaccgtgtggacgaggacccccaggcaagcatgacttctgccagccctgaagaccagaatgctccagtgggctgccccaaaggagcccggagaaggcgccccatttccgtgataggtggggtcagcttgtatgggaccaaccagacggaggaactggacaatcttctgacccaaccggcttccaggccgcccatgcctgctcaccaggtgccaccctacaaggctgtgtcggcccggttccggcccttcacattctcccagagcacccccattgggttggaccgtgtgggacgccggcggcagatgagagcatccaacgtttcttcagatggaggtactgagccctctgccttagtggatgacaacggtagtgaggaggacttcagctatgaagacctctgccaggccagccctcggtacctgcagcccggcggggagcagctggccatcaatgagctgatcagtgatggcaacgtggtctgcgcagaagccctgtgggaccatgtgaccatggatgaccaggaactgggcttcaaagccggggatgtcatccaggttctggaagcctccaacaaggactggtggtggggccgcagtgaagataaggaagcctggttccccgcgagcttcgtcagattgcgagtgaatcaggaagagctgtcggaaaactccagcagcacccccagtgaggagcaggacgaggaggccagccagagccgccacagacactgtgagaacaagcagcagatgcggaccaacgtcatccgggagatcatggacaccgagcgggtgtacatcaaacacctcagggacatctgtgagggctatatccgacagtgccgcaagcacacaggaatgttcaccgttgcgcagctagccactatttttggaaacattgaagatatttacaaattccaaagaaagtttctgaaagaccttgagaaacagtacaacaaagaggaacctcacttaagtgaaataggatcttgctttcttcaaaatcaagagggctttgccatctattccgagtactgcaacaaccacccgggcgcctgcctggagctcgccaacctcatgaagcagggcaagtacagacatttctttgaagcctgccgcctgctgcagcagatgattgacatcgccatcgacgggttcctgctcacaccagtgcagaagatctgcaaatacccgctgcagctggccgagctgctcaagtataccacacaggaacacggtgattacagcaacataaaggcagcatatgaggccatgaagaatgtggcctgtctgatcaacgagcgcaagcgcaagctggagagcatcgacaagatagctcgctggcaggtgtctatcgtgggctgggagggactggatatcttagaccgaagctcagaattgattcattctggggagctgaccaaaatcactaagcaaggcaaaagccagcagcggacgttcttcctgtttgaccaccagctggtgtcctgcaagaaggacctgctgcgcagggacatgctgtactacaagggccggctggacatggatgagatggagcttgtggacctgggggatgggcgcgacaaggactgcaacctcagcgtgaaaaatgccttcaagctcgtcagtaggaccacagacgaggtttatttgttttgtgccaaaaaacaagaagacaaggcgaggtggctgcaggcctgtgcagatgaaaggaggcgggtgcaagaggacaaggagatgggaatggaaatttcagaaaaccagaagaaacttgccatgttaaatgctcaaaaggcaggacatggaaagtcaaaaggctacaacaggtgccctgtggccccaccgcaccagggcctgcaccccatccaccagcgccacatcactatgcccacaagcgtcccccagcagcaggtctttggcctggcggaacccaagaggaagtcctcgctcttctggcacaccttcaacaggctcacccccttccggaaatgaaaacaggaggctgtgcttccatggagctgggtgtcaagagaagaactgtctttgtttcttgtgtgcttcaatccagggaaagtttcttggacccagtgataaaaacttccttttagggatcaatgaaggagagaaggtcttggaatcaccttcagtctttggagacccagctgcctttgtggaagggaggagacggtcatgacacaaagctttatcctacacagaaacacccgtgacccactatgagatggcccagatgtgggacccggtaccatgctctaaagcgagtgattaggcagcagctgaagccacccctgctgatgatgagcaagtgcctgctgcaggtccaaacacagcatccagggctttgcagttcctaaggagtgatgaggttagaggatcacttctgcatttgattttcaaggatgccgtcaagacggggttgacacaatgctgcacgtgtctggtcacacttagaaattgagctcttactctcttctgtaatactgggggacctacagctgccgtggggctgaccacggtgttccctggcatcgtctgtgtccacacagatgctaactggtagtgcaaatgtcatcctgcaaggttcctcttcctgcaagcaaagtggagagaaagaagatgcatctgtcaccttcatcagggtcctcagtgcagagcaacttacgcatcctcaagaatccactgcttttcaggcaaggagggagaaatcctgctgcacactggctttgtcccggagtcggattccctcctgcctgcacgccttcagtaactccgagcagaaatcacatcttgcccacatgctgtaacctaagaaactgctatgcaacattcaaacaactgtttgcaatataaaaagctcatttactgtaatatttatgatacagtgaatatgaaaatgcactggtcagaaggcactctcaaagagccgcactgctcctgacatcgtccttagcaatgaagtcacaaagacagccaaagcagtcctgcttcttggaaatcagaagctgcctttatcacatataaagccaaacagggcataaccatgtcacgtgagcatgtcatcaggcttctgaggacttgttctttataaaaaaagaccttcacaaaatatcttggcttagagatagcagtctttattaacaaaggccacctaggctgacacctgcagataatcatctccttttctttgtctatgttgtacattttcatgatataacttttaactatgtctagagaaggcaggctctgcaagagaggtgccctttcaacccgctcagtgccctggacaggagatgctgtgttaaactgttaatggatatctatatgagaagctcatttttgtatgctatccctgcagtttttttttttctaacaggcccatgtttgagaataaacaagtctgtgatgtcagagacaaaggtgtattcttcagtctgcaggtgtgtggcacctcccttctcccctgcagccccccacatccagagccgttcctgagagtgacatcatgcatcaagaaaacataaccttggtcctcaggtgaacccttggaacattctgtgaccgcctgatgtccattctgagccaccttggcacacatgcttacaggcagcactgctaagggttcaggtgccccatggctgacagcccgagttgcttctgtggaccatcatgccgctcggcacgtcctgagacagaagttgctgcaggaaggagcttctggagaggtcctgtggcatgtgtgggggtgtgtgtgtgtatgtttccttcttgaacagacattccaactttagatgtgtttatagaactgacctttttactaacaaaatacaatgatatatgttggaaactacttaatatgcttttcctgcacaccttagcaataactgtaggggtctctgctagagttgtttgtatgtacagcaattttgaacaaattgttttaaatgtaatataagagaattagtttaaggaagtaaagagaatcatttgcttgtgttacattttcagtgaggattcagtttaagagtcattcttaggacttccatttcctaatatttattcatgggtaatgaagaaatggtttgcattttgtggccagtcctaatttattttccagctgagccctaacttccggctcccacctacctccacggacttcctaacagagacttatgaataccaggatgtgtttttgttaagtcaggttcaattcgttgcccctgtcagttttatagagtgtgagggtcactccattaaagatctctcctgggtggatcctacttggatgttcaggtgattttgaaaactgctaacatttttaaaaggctagaacatcctttgacttcttgaaaatctgcatgtctggcttgggttttattaccacatgcctgagttcttcaagaatggaaggctcaagtattctcatcttccatttgccaaacttccttcctgatttgagtcacgtgttccacttggaaagaaagggaacagagagcctcctccatggacagtgtatgaatttcattgggaatcttgctctctcccgcctctatgcctttctctctttttaaccttactttacataatattatagatgggccaagaaaagaaaagatgacataacattttgatgaatttcacctattccattcttcacgtttcagaattggtcgactttgttagaagataattgaagtagccttgggtcaaaagcaaccttttcaattgtgatcatacctaaaacatataaaaaccctgccgtagattaaaagcaattataaaatcataaaattgaatgtttgcagaatcctggagcagtagatttctttgtctttggcctgcggactagaaagagggcagcagtagtatgctggagcttccctgggataccagccacatggtttcttttcattagatctgatttttgtttcccactgtagatctgattttgtagttgaaaacatttcaccaccatcaaacactatttctgaatattgtgcctttttatacctagcctagatgaaaaccgatgccattcttattcagaaaatccccccatcctacatgactgttatctagacataaagcaaagtgcatttaattcaaaatttggttcacaatataagtattttgtaaaagccagctgaaccagcattttatcaggtggaaatctctgcaagccaaattgctgatactccttcatgcagatcaacttggtgtcccagtcagaatagaacagcataattacctggagttagggggagtatttctgcactattacttgtcagggagagaagaaacttagaattgtccctcaaaggagtgtcaagaagtatgaataaatgtcctttcaccagctcacaggccagaaatggaggacccaagtcaactaggtgaaactactagcagacccagctttcccataataacctaatctgcaaattgttctattaaagtctcattgttttcaggatgcaatgaaagtggatttcaaaaggctttggaaaaataagtggaacatgactgatcttgaaaaaaaaagcaaaagcttaaatatttgatacaagtttacttagctacaacatactttacattgttgcctttagttatctcacaggcactgacattttatatttagaaaatacttttaatctttctaatctttttttgtaaatattagtgtccattctgtatgactcgctaacctactttgcaaggctttgggcaacattttagctcattaacttcaagatgatgtgtcatctgtataggtcaaagaatgggacttctgaactgaggaatttgctgttgacagccaaagtatagtgtacaagattgatgtaacttgatatgtatttttgttgaagttttttgtaaaaaaaaattatttacaatgttatttgaatgatttttttaaatgctgtgaatctatatttgttgttttgtatattaaaattcatttgccaaactcgt

SEQ ID NO: 9517 - protein, 1339 aa, Homo sapiens
MAKRRPHKHPGREELVFKSSWCRNSPVATQEPDVQGRCECQDGIPGDEGLELRSADSAVPVAMTQAAVRPWAPCLENMTTAPNGLGPGPAAPCAGSDLKDAKMVTSLACGNGVCGCSPGGDTDTQEAKLSPAKLVRLFSTSRKRTGAHPERPHSMVLVGNSSTWNTLASFRKMGSFKKLKSSVLKGIQSREGSNACSKGEASEHGLGKSIPNGAVPGAQASRGSPLAPGPACGALRPAEWGTLDGSDLEDTDDAFQRSTHRSRSLRRAYGLGRICLLDAPQNHATPTIATGQVPAVCEILVRDPENNSMGYRRSKSTDNLAFLKKSSFKRKSTSNLADLRTAHDARVPQRTLSSSSTDSQKLGSGRTKRWRSPIRAKDFDRVFKLVSNVTEAAWRRESPRSGAPSPGEASLRLQAHSRLHDDYSRRVSRSTEQDSRRGGAVMHGTTATCTVAPGFGSATSKGPHLDADTAVFPLETKSSWAVESDSSCTCSSLPSPIVQDVLSKDSCDPNAGSQLTFDPEQPPTPLRPTTPKPQSPQSPQSPGAGSASCHSNHSALSANSEESEGRAEEPAQREPGPVSLQDPLEATHGDEGSKDLLVNIGVAAGPEEKEKEEVVPDGPWRRSSSQDEERTEAQRTPKRRWGSGRRPRPRPFSDYGQLASRSLSIPEDSVAADPQKEDRVDEDPQASMTSASPEDQNAPVGCPKGARRRRPISVIGGVSLYGTNQTEELDNLLTQPASRPPMPAHQVPPYKAVSARFRPFTFSQSTPIGLDRVGRRRQMRASNVSSDGGTEPSALVDDNGSEEDFSYEDLCQASPRYLQPGGEQLAINELISDGNVVCAEALWDHVTMDDQELGFKAGDVIQVLEASNKDWWWGRSEDKEAWFPASFVRLRVNQEELSENSSSTPSEEQDEEASQSRHRHCENKQQMRTNVIREIMDTERVYIKHLRDICEGYIRQCRKHTGMFTVAQLATIFGNIEDIYKFQRKFLKDLEKQYNKEEPHLSEIGSCFLQNQEGFAIYSEYCNNHPGACLELANLMKQGKYRHFFEACRLLQQMIDIAIDGFLLTPVQKICKYPLQLAELLKYTTQEHGDYSNIKAAYEAMKNVACLINERKRKLESIDKIARWQVSIVGWEGLDILDRSSELIHSGELTKITKQGKSQQRTFFLFDHQLVSCKKDLLRRDMLYYKGRLDMDEMELVDLGDGRDKDCNLSVKNAFKLVSRTTDEVYLFCAKKQEDKARWLQACADERRRVQEDKEMGMEISENQKKLAMLNAQKAGHGKSKGYNRCPVAPPHQGLHPIHQRHITMPTSVPQQQVFGLAEPKRKSSLFWHTFNRLTPFRK

SEQ ID NO: 9518 - DNA, 966 bp, Homo sapiens
atggagcgctttgtccgtgttccctatggcttgtaccagggttatgggagcacagtgcctttgggccagcctggactctcagggcacaaacagcccgactggaggcaaaatatgggtcctcccacttttctggccaggccagggctgctggtgcccgcgaacgcccctgactactgcattgacccttacaagagggcgcagcttaaggccattctctcccagatgaaccccagcctgagcccgcggctgtgcaagcccaacaccaaggaggtgggcgtgcaggtgagcccgcgggtggacaaggctgtgcagtgctctctggggcctcgcaccctcagcagctgctccccctgggacggcagagacccccaggagcccctgccagcctgtggggtcacttcgcccgccaccggccgcaggggcttgatccgcctgcggagagatggggacgaagcggagagcaaggcgctcccgggccctgcggaggccagccagccgcagccaccatcacggaggtcaggagctgacaggcaggaggagcccgggcagctggaggaatcgggggagaaagacgccccgtgccctcaggagacgaagagcaagcaggtgcctggagacgccgcctccgagccgctccggaggcccaacttccagtttttggaaccaaaatatggctatttccactgtaaagattgtaagaccaggtgggagagtgcttacgtgtggtgcatttctggaacgaacaaggtttatttcaaacaactctgttgtaaatgccaaaagagttttaacccttatcgagtagaagcaatccaatgtcagacctgctcaaagtctcattgttcctgtcctcaaaagaagagacacattgatctaaggaggcctcatcgacaggaactgtgtggtcgctgcaaagacaagagattctcctgtggcaatatttacagctttaaatatgtgatgtga

SEQ ID NO: 9519 - protein, 321 aa, Homo sapiens; identical to SEQ ID NO: 1387

SEQ ID NO: 9520 - DNA, 497 bp, Homo sapiens
cccctgactactgcattgacccttacaagagggcgcagcttaaggccattctctcccagatgaaccccagcctgagcccgcggctgtgcaagcccaacaccaaggaggtgggcgtgcaggtgagcccgcgggtggacaaggctgtgcagtgctctctggggcctcgcaccctcagcagctgctccccctgggacggcagagacccccaggagcccctgccagcctgtggggtcacttcgcccgccaccggccgcaggggcttgatccgcctgcggagagatggggacgaagcggagagcaaggcgctcccgggccctgcggaggccagccagccgcagccaccatcacggaggtcaggagctgacaggcaggaggagcccgggcagctggaggaatcgggggagaaagacgccccgtgccctcaggagacgaagagcaagcaggtgcctggagacgccgcctccgagccgctccggaggcccaacttccagttttgg

SEQ ID NO: 9521 - protein, 145 aa, Homo sapiens
MNPSLSPRLCKPNTKEVGVQVSPRVDKAVQCSLGPRTLSSCSPWDGRDPQEPLPACGVTSPATGRRGLIRLRRDGDEAESKALPGPAEASQPQPPSRRSGADRQEEPGQLEESGEKDAPCPQETKSKQVPGDAASEPLRRPNFQF

SEQ ID NO: 9522 - DNA, 2038 bp, Homo sapiens
gggcttgtggcgcgagcttctgaaactaggcggcagaggcggagccgctgtggcactgctgcgcctctgctgcgcctcgggtgtcttttgcggcggtgggtcgccgccgggagaagcgtgaggggacagatttgtgaccggcgcggtttttgtcagcttactccggccaaaaaagaactgcacctctggagcggacttatttaccaagcattggaggaatatcgtaggtaaaaatgcctattggatccaaagagaggccaacattttttgaaatttttaagacacgctgcaacaaagcagatttaggaccaataagtcttaattggtttgaagaactttcttcagaagctccaccctataattctgaacctgcagaagaatctgaacataaaaacaacaattacgaaccaaacctatttaaaactccacaaaggaaaccatcttataatcagctggcttcaactccaataatattcaaagagcaagggctgactctgccgctgtaccaatctcctgtaaaagaattagataaattcaaattagacttaggaaggaatgttcccaatagtagacataaaagtcttcgcacagtgaaaactaaaatggatcaagcagatgatgtttcctgtccacttctaaattcttgtcttagtgaaagtcctgttgttctacaatgtacacatgtaacaccacaaagagataagtcagtggtatgtgggagtttgtttcatacaccaaagtttgtgaagggtcgtcagacaccaaaacatatttctgaaagtctaggagctgaggtggatcctgatatgtcttggtcaagttctttagctacaccacccacccttagttctactgtgctcatagtcagaaatgaagaagcatctgaaactgtatttcctcatgatactactgctaatgtgaaaagctatttttccaatcatgatgaaagtctgaagaaaaatgatagatttatcgcttctgtgacagacagtgaaaacacaaatcaaagagaagctgcaagtcatggatttggaaaaacatcagggaattcatttaaagtaaatagctgcaaagaccacattggaaagtcaatgccaaatgtcctagaagatgaagtatatgaaacagttgtagatacctctgaagaagatagtttttcattatgtttttctaaatgtagaacaaaaaatctacaaaaagtaagaactagcaagactaggaaaaaaattttccatgaagcaaacgctgatgaatgtgaaaaatctaaaaaccaagtgaaagaaaaatactcatttgtatctgaagtggaaccaaatgatactgatccattagattcaaatgtagcaaatcagaagccctttgagagtggaagtgacaaaatctccaaggaagttgtaccgtctttggcctgtgaatggtctcaactaaccctttcaggtctaaatggagcccagatggagaaaatacccctattgcatatttcttcatgtgaccaaaatatttcagaaaaagacctattagacacagagaacaaaagaaagaaagattttcttacttcagagaattctttgccacgtatttctagcctaccaaaatcagagaagccattaaatgaggaaacagtggtaaataagagagatgaagagcagcatcttgaatctcatacagactgcattcttgcagtaaagcaggcaatatctggaacttctccagtggcttcttcatttcagggtatcaaaaagtctatattcagaataagagaatcacctaaagagactttcaatgcaagtttttcaggtcatatgactgatccaaactttaaaaaagaaactgaagcctctgaaagtggactggaaatacatactgtttgctcacagaaggaggactccttatgtccaaatttaattgataatggaagctggccagccaccaccacacagaattctgtagctttgaagaatgcaggtttaatatccactttgaaaaagaaaacaaataagtttatttatgctatacatgatgaaacatcttataaagg

SEQ ID NO: 9523 - protein, 600 aa, Homo sapiens
MPIGSKERPTFFEIFKTRCNKADLGPISLNWFEELSSEAPPYNSEPAEESEHKNNNYEPNLFKTPQRKPSYNQLASTPIIFKEQGLTLPLYQSPVKELDKFKLDLGRNVPNSRHKSLRTVKTKMDQADDVSCPLLNSCLSESPVVLQCTHVTPQRDKSVVCGSLFHTPKFVKGRQTPKHISESLGAEVDPDMSWSSSLATPPTLSSTVLIVRNEEASETVFPHDTTANVKSYFSNHDESLKKNDRFIASVTDSENTNQREAASHGFGKTSGNSFKVNSCKDHIGKSMPNVLEDEVYETVVDTSEEDSFSLCFSKCRTKNLQKVRTSKTRKKIFHEANADECEKSKNQVKEKYSFVSEVEPNDTDPLDSNVANQKPFESGSDKISKEVVPSLACEWSQLTLSGLNGAQMEKIPLLHISSCDQNISEKDLLDTENKRKKDFLTSENSLPRISSLPKSEKPLNEETVVNKRDEEQHLESHTDCILAVKQAISGTSPVASSFQGIKKSIFRIRESPKETFNASFSGHMTDPNFKKETEASESGLEIHTVCSQKEDSLCPNLIDNGSWPATTTQNSVALKNAGLISTLKKKTNKFIYAIHDETSY

SEQ ID NO: 9524 - DNA, 10856 bp, Homo sapiens
gggcttgtggcgcgagcttctgaaactaggcggcagaggcggagccgctgtggcactgctgcgcctctgctgcgcctcgggtgtcttttgcggcggtgggtcgccgccgggagaagcgtgaggggacagatttgtgaccggcgcggtttttgtcagcttactccggccaaaaaagaactgcacctctggagcggacttatttaccaagcattggaggaatatcgtaggtaaaaatgcctattggatccaaagagaggccaacattttttgaaatttttaagacacgctgcaacaaagcagatttaggaccaataagtcttaattggtttgaagaactttcttcagaagctccaccctataattctgaacctgcagaagaatctgaacataaaaacaacaattacgaaccaaacctatttaaaactccacaaaggaaaccatcttataatcagctggcttcaactccaataatattcaaagagcaagggctgactctgccgctgtaccaatctcctgtaaaagaattagataaattcaaattagacttaggaaggaatgttcccaatagtagacataaaagtcttcgcacagtgaaaactaaaatggatcaagcagatgatgtttcctgtccacttctaaattcttgtcttagtgaaagtcctgttgttctacaatgtacacatgtaacaccacaaagagataagtcagtggtatgtgggagtttgtttcatacaccaaagtttgtgaagggtcgtcagacaccaaaacatatttctgaaagtctaggagctgaggtggatcctgatatgtcttggtcaagttctttagctacaccacccacccttagttctactgtgctcatagtcagaaatgaagaagcatctgaaactgtatttcctcatgatactactgctaatgtgaaaagctatttttccaatcatgatgaaagtctgaagaaaaatgatagatttatcgcttctgtgacagacagtgaaaacacaaatcaaagagaagctgcaagtcatggatttggaaaaacatcagggaattcatttaaagtaaatagctgcaaagaccacattggaaagtcaatgccaaatgtcctagaagatgaagtatatgaaacagttgtagatacctctgaagaagatagtttttcattatgtttttctaaatgtagaacaaaaaatctacaaaaagtaagaactagcaagactaggaaaaaaattttccatgaagcaaacgctgatgaatgtgaaaaatctaaaaaccaagtgaaagaaaaatactcatttgtatctgaagtggaaccaaatgatactgatccattagattcaaatgtagcaaatcagaagccctttgagagtggaagtgacaaaatctccaaggaagttgtaccgtctttggcctgtgaatggtctcaactaaccctttcaggtctaaatggagcccagatggagaaaatacccctattgcatatttcttcatgtgaccaaaatatttcagaaaaagacctattagacacagagaacaaaagaaagaaagattttcttacttcagagaattctttgccacgtatttctagcctaccaaaatcagagaagccattaaatgaggaaacagtggtaaataagagagatgaagagcagcatcttgaatctcatacagactgcattcttgcagtaaagcaggcaatatctggaacttctccagtggcttcttcatttcagggtatcaaaaagtctatattcagaataagagaatcacctaaagagactttcaatgcaagtttttcaggtcatatgactgatccaaactttaaaaaagaaactgaagcctctgaaagtggactggaaatacatactgtttgctcacagaaggaggactccttatgtccaaatttaattgataatggaagctggccagccaccaccacacagaattctgtagctttgaagaatgcaggtttaatatccactttgaaaaagaaaacaaataagtttatttatgctatacatgatgaaacatcttataaaggaaaaaaaataccgaaagaccaaaaatcagaactaattaactgttcagcccagtttgaagcaaatgcttttgaagcaccacttacatttgcaaatgctgattcaggtttattgcattcttctgtgaaaagaagctgttcacagaatgattctgaagaaccaactttgtccttaactagctcttttgggacaattctgaggaaatgttctagaaatgaaacatgttctaataatacagtaatctctcaggatcttgattataaagaagcaaaatgtaataaggaaaaactacagttatttattaccccagaagctgattctctgtcatgcctgcaggaaggacagtgtgaaaatgatccaaaaagcaaaaaagtttcagatataaaagaagaggtcttggctgcagcatgtcacccagtacaacattcaaaagtggaatacagtgatactgactttcaatcccagaaaagtcttttatatgatcatgaaaatgccagcactcttattttaactcctacttccaaggatgttctgtcaaacctagtcatgatttctagaggcaaagaatcatacaaaatgtcagacaagctcaaaggtaacaattatgaatctgatgttgaattaaccaaaaatattcccatggaaaagaatcaagatgtatgtgctttaaatgaaaattataaaaacgttgagctgttgccacctgaaaaatacatgagagtagcatcaccttcaagaaaggtacaattcaaccaaaacacaaatctaagagtaatccaaaaaaatcaagaagaaactacttcaatttcaaaaataactgtcaatccagactctgaagaacttttctcagacaatgagaataattttgtcttccaagtagctaatgaaaggaataatcttgctttaggaaatactaaggaacttcatgaaacagacttgacttgtgtaaacgaacccattttcaagaactctaccatggttttatatggagacacaggtgataaacaagcaacccaagtgtcaattaaaaaagatttggtttatgttcttgcagaggagaacaaaaatagtgtaaagcagcatataaaaatgactctaggtcaagatttaaaatcggacatctccttgaatatagataaaataccagaaaaaaataatgattacatgaacaaatgggcaggactcttaggtccaatttcaaatcacagttttggaggtagcttcagaacagcttcaaataaggaaatcaagctctctgaacataacattaagaagagcaaaatgttcttcaaagatattgaagaacaatatcctactagtttagcttgtgttgaaattgtaaataccttggcattagataatcaaaagaaactgagcaagcctcagtcaattaatactgtatctgcacatttacagagtagtgtagttgtttctgattgtaaaaatagtcatataacccctcagatgttattttccaagcaggattttaattcaaaccataatttaacacctagccaaaaggcagaaattacagaactttctactatattagaagaatcaggaagtcagtttgaatttactcagtttagaaaaccaagctacatattgcagaagagtacatttgaagtgcctgaaaaccagatgactatcttaaagaccacttctgaggaatgcagagatgctgatcttcatgtcataatgaatgccccatcgattggtcaggtagacagcagcaagcaatttgaaggtacagttgaaattaaacggaagtttgctggcctgttgaaaaatgactgtaacaaaagtgcttctggttatttaacagatgaaaatgaagtggggtttaggggcttttattctgctcatggcacaaaactgaatgtttctactgaagctctgcaaaaagctgtgaaactgtttagtgatattgagaatattagtgaggaaacttctgcagaggtacatccaataagtttatcttcaagtaaatgtcatgattctgttgtttcaatgtttaagatagaaaatcataatgataaaactgtaagtgaaaaaaataataaatgccaactgatattacaaaataatattgaaatgactactggcacttttgttgaagaaattactgaaaattacaagagaaatactgaaaatgaagataacaaatatactgctgccagtagaaattctcataacttagaatttgatggcagtgattcaagtaaaaatgatactgtttgtattcataaagatgaaacggacttgctatttactgatcagcacaacatatgtcttaaattatctggccagtttatgaaggagggaaacactcagattaaagaagatttgtcagatttaacttttttggaagttgcgaaagctcaagaagcatgtcatggtaatacttcaaataaagaacagttaactgctactaaaacggagcaaaatataaaagattttgagacttctgatacattttttcagactgcaagtgggaaaaatattagtgtcgccaaagagtcatttaataaaattgtaaatttctttgatcagaaaccagaagaattgcataacttttccttaaattctgaattacattctgacataagaaagaacaaaatggacattctaagttatgaggaaacagacatagttaaacacaaaatactgaaagaaagtgtcccagttggtactggaaatcaactagtgaccttccagggacaacccgaacgtgatgaaaagatcaaagaacctactctattgggttttcatacagctagcgggaaaaaagttaaaattgcaaaggaatctttggacaaagtgaaaaacctttttgatgaaaaagagcaaggtactagtgaaatcaccagttttagccatcaatgggcaaagaccctaaagtacagagaggcctgtaaagaccttgaattagcatgtgagaccattgagatcacagctgccccaaagtgtaaagaaatgcagaattctctcaataatgataaaaaccttgtttctattgagactgtggtgccacctaagctcttaagtgataatttatgtagacaaactgaaaatctcaaaacatcaaaaagtatctttttgaaagttaaagtacatgaaaatgtagaaaaagaaacagcaaaaagtcctgcaacttgttacacaaatcagtccccttattcagtcattgaaaattcagccttagctttttacacaagttgtagtagaaaaacttctgtgagtcagacttcattacttgaagcaaaaaaatggcttagagaaggaatatttgatggtcaaccagaaagaataaatactgcagattatgtaggaaattatttgtatgaaaataattcaaacagtactatagctgaaaatgacaaaaatcatctctccgaaaaacaagatacttatttaagtaacagtagcatgtctaacagctattcctaccattctgatgaggtatataatgattcaggatatctctcaaaaaataaacttgattctggtattgagccagtattgaagaatgttgaagatcaaaaaaacactagtttttccaaagtaatatccaatgtaaaagatgcaaatgcatacccacaaactgtaaatgaagatatttgcgttgaggaacttgtgactagctcttcaccctgcaaaaataaaaatgcagccattaaattgtccatatctaatagtaataattttgaggtagggccacctgcatttaggatagccagtggtaaaatcgtttgtgtttcacatgaaacaattaaaaaagtgaaagacatatttacagacagtttcagtaaagtaattaaggaaaacaacgagaataaatcaaaaatttgccaaacgaaaattatggcaggttgttacgaggcattggatgattcagaggatattcttcataactctctagataatgatgaatgtagcacgcattcacataaggtttttgctgacattcagagtgaagaaattttacaacataaccaaaatatgtctggattggagaaagtttctaaaatatcaccttgtgatgttagtttggaaacttcagatatatgtaaatgtagtatagggaagcttcataagtcagtctcatctgcaaatacttgtgggatttttagcacagcaagtggaaaatctgtccaggtatcagatgcttcattacaaaacgcaagacaagtgttttctgaaatagaagatagtaccaagcaagtcttttccaaagtattgtttaaaagtaacgaacattcagaccagctcacaagagaagaaaatactgctatacgtactccagaacatttaatatcccaaaaaggcttttcatataatgtggtaaattcatctgctttctctggatttagtacagcaagtggaaagcaagtttccattttagaaagttccttacacaaagttaagggagtgttagaggaatttgatttaatcagaactgagcatagtcttcactattcacctacgtctagacaaaatgtatcaaaaatacttcctcgtgttgataagagaaacccagagcactgtgtaaactcagaaatggaaaaaacctgcagtaaagaatttaaattatcaaataacttaaatgttgaaggtggttcttcagaaaataatcactctattaaagtttctccatatctctctcaatttcaacaagacaaacaacagttggtattaggaaccaaagtgtcacttgttgagaacattcatgttttgggaaaagaacaggcttcacctaaaaacgtaaaaatggaaattggtaaaactgaaactttttctgatgttcctgtgaaaacaaatatagaagtttgttctacttactccaaagattcagaaaactactttgaaacagaagcagtagaaattgctaaagcttttatggaagatgatgaactgacagattctaaactgccaagtcatgccacacattctctttttacatgtcccgaaaatgaggaaatggttttgtcaaattcaagaattggaaaaagaagaggagagccccttatcttagtgggagaaccctcaatcaaaagaaacttattaaatgaatttgacaggataatagaaaatcaagaaaaatccttaaaggcttcaaaaagcactccagatggcacaataaaagatcgaagattgtttatgcatcatgtttctttagagccgattacctgtgtaccctttcgcacaactaaggaacgtcaagagatacagaatccaaattttaccgcacctggtcaagaatttctgtctaaatctcatttgtatgaacatctgactttggaaaaatcttcaagcaatttagcagtttcaggacatccattttatcaagtttctgctacaagaaatgaaaaaatgagacacttgattactacaggcagaccaaccaaagtctttgttccaccttttaaaactaaatcacattttcacagagttgaacagtgtgttaggaatattaacttggaggaaaacagacaaaagcaaaacattgatggacatggctctgatgatagtaaaaataagattaatgacaatgagattcatcagtttaacaaaaacaactccaatcaagcagtagctgtaactttcacaaagtgtgaagaagaacctttagatttaattacaagtcttcagaatgccagagatatacaggatatgcgaattaagaagaaacaaaggcaacgcgtctttccacagccaggcagtctgtatcttgcaaaaacatccactctgcctcgaatctctctgaaagcagcagtaggaggccaagttccctctgcgtgttctcataaacagctgtatacgtatggcgtttctaaacattgcataaaaattaacagcaaaaatgcagagtcttttcagtttcacactgaagattattttggtaaggaaagtttatggactggaaaaggaatacagttggctgatggtggatggctcataccctccaatgatggaaaggctggaaaagaagaattttatagggctctgtgtgacactccaggtgtggatccaaagcttatttctagaatttgggtttataatcactatagatggatcatatggaaactggcagctatggaatgtgcctttcctaaggaatttgctaatagatgcctaagcccagaaagggtgcttcttcaactaaaatacagatatgatacggaaattgatagaagcagaagatcggctataaaaaagataatggaaagggatgacacagctgcaaaaacacttgttctctgtgtttctgacataatttcattgagcgcaaatatatctgaaacttctagcaataaaactagtagtgcagatacccaaaaagtggccattattgaacttacagatgggtggtatgctgttaaggcccagttagatcctcccctcttagctgtcttaaagaatggcagactgacagttggtcagaagattattcttcatggagcagaactggtgggctctcctgatgcctgtacacctcttgaagccccagaatctcttatgttaaagatttctgctaacagtactcggcctgctcgctggtataccaaacttggattctttcctgaccctagaccttttcctctgcccttatcatcgcttttcagtgatggaggaaatgttggttgtgttgatgtaattattcaaagagcataccctatacagtggatggagaagacatcatctggattatacatatttcgcaatgaaagagaggaagaaaaggaagcagcaaaatatgtggaggcccaacaaaagagactagaagccttattcactaaaattcaggaggaatttgaagaacatgaagaaaacacaacaaaaccatatttaccatcacgtgcactaacaagacagcaagttcgtgctttgcaagatggtgcagagctttatgaagcagtgaagaatgcagcagacccagcttaccttgagggttatttcagtgaagagcagttaagagccttgaataatcacaggcaaatgttgaatgataagaaacaagctcagatccagttggaaattaggaaggccatggaatctgctgaacaaaaggaacaaggtttatcaagggatgtcacaaccgtgtggaagttgcgtattgtaagctattcaaaaaaagaaaaagattcagttatactgagtatttggcgtccatcatcagatttatattctctgttaacagaaggaaagagatacagaatttatcatcttgcaacttcaaaatctaaaagtaaatctgaaagagctaacatacagttagcagcgacaaaaaaaactcagtatcaacaactaccggtttcagatgaaattttatttcagatttaccagccacgggagccccttcacttcagcaaatttttagatccagactttcagccatcttgttctgaggtggacctaataggatttgtcgtttctgttgtgaaaaaaacaggacttgcccctttcgtctatttgtcagacgaatgttacaatttactggcaataaagttttggatagaccttaatgaggacattattaagcctcatatgttaattgctgcaagcaacctccagtggcgaccagaatccaaatcaggccttcttactttatttgctggagatttttctgtgttttctgctagtccaaaagagggccactttcaagagacattcaacaaaatgaaaaatactgttgagaatattgacatactttgcaatgaagcagaaaacaagcttatgcatatactgcatgcaaatgatcccaagtggtccaccccaactaaagactgtacttcagggccgtacactgctcaaatcattcctggtacaggaaacaagcttctgatgtcttctcctaattgtgagatatattatcaaagtcctttatcactttgtatggccaaaaggaagtctgtttccacacctgtctcagcccagatgacttcaaagtcttgtaaaggggagaaagagattgatgaccaaaagaactgcaaaaagagaagagccttggatttcttgagtagactgcctttacctccacctgttagtcccatttgtacatttgtttctccggctgcacagaaggcatttcagccaccaaggagttgtggcaccaaatacgaaacacccataaagaaaaaagaactgaattctcctcagatgactccatttaaaaaattcaatgaaatttctcttttggaaagtaattcaatagctgacgaagaacttgcattgataaatacccaagctcttttgtctggttcaacaggagaaaaacaatttatatctgtcagtgaatccactaggactgctcccaccagttcagaagattatctcagactgaaacgacgttgtactacatctctgatcaaagaacaggagagttcccaggccagtacggaagaatgtgagaaaaataagcaggacacaattacaactaaaaaatatatctaagcatttgcaaaggcgacaataaattattgacgcttaacctttccagtttataagactggaatataatttcaaaccacacattagtacttatgttgcacaatgagaaaagaaattagtttcaaatttacctcagcgtttgtgtatcgggcaaaaatcgttttgcccgattccgtattggtatacttttgcttcagttgcatatcttaaaactaaatgtaatttattaactaatcaagaaaaacatctttggggaaaagaaaatcttttaaatctttggatttgatcactacaagtattattttacaagtgaaaaaatggtcatccaaactcaaacttgagaaaatatcttgctttcaaattggcact

SEQ ID NO: 9525 - protein, 3418 aa, Homo sapiens [sequence omitted]

SEQ ID NO: 9526 - DNA, 11500 bp, Homo sapiens
gggcttgtggcgcgagcttctgaaactaggcggcagaggcggagccgctgtggcactgctgcgcctctgctgcgcctcgggtgtcttttgcggcggtgggtcgccgccgggagaagcgtgaggggacagatttgtgaccggcgcggtttttgtcagcttactccggccaaaaaagaactgcacctctggagcggacttatttaccaagcattggaggaatatcgtaggtaaaaatgcctattggatccaaagagaggccaacattttttgaaatttttaagacacgctgcaacaaagcagatttaggaccaataagtcttaattggtttgaagaactttcttcagaagctccaccctataattctgaacctgcagaagaatctgaacataaaaacaacaattacgaaccaaacctatttaaaactccacaaaggaaaccatcttataatcagctggcttcaactccaataatattcaaagagcaagggctgactctgccgctgtaccaatctcctgtaaaagaattagataaattcaaattagacttaggaaggaatgttcccaatagtagacataaaagtcttcgcacagtgaaaactaaaatggatcaagcagatgatgtttcctgtccacttctaaattcttgtcttagtgaaagtcctgttgttctacaatgtacacatgtaacaccacaaagagataagtcagtggtatgtgggagtttgtttcatacaccaaagtttgtgaagggtcgtcagacaccaaaacatatttctgaaagtctaggagctgaggtggatcctgatatgtcttggtcaagttctttagctacaccacccacccttagttctactgtgctcatagtcagaaatgaagaagcatctgaaactgtatttcctcatgatactactgctaatgtgaaaagctatttttccaatcatgatgaaagtctgaagaaaaatgatagatttatcgcttctgtgacagacagtgaaaacacaaatcaaagagaagctgcaagtcatggatttggaaaaacatcagggaattcatttaaagtaaatagctgcaaagaccacattggaaagtcaatgccaaatgtcctagaagatgaagtatatgaaacagttgtagatacctctgaagaagatagtttttcattatgtttttctaaatgtagaacaaaaaatctacaaaaagtaagaactagcaagactaggaaaaaaattttccatgaagcaaacgctgatgaatgtgaaaaatctaaaaaccaagtgaaagaaaaatactcatttgtatctgaagtggaaccaaatgatactgatccattagattcaaatgtagcaaatcagaagccctttgagagtggaagtgacaaaatctccaaggaagttgtaccgtctttggcctgtgaatggtctcaactaaccctttcaggtctaaatggagcccagatggagaaaatacccctattgcatatttcttcatgtgaccaaaatatttcagaaaaagacctattagacacagagaacaaaagaaagaaagattttcttacttcagagaattctttgccacgtatttctagcctaccaaaatcagagaagccattaaatgaggaaacagtggtaaataagagagatgaagagcagcatcttgaatctcatacagactgcattcttgcagtaaagcaggcaatatctggaacttctccagtggcttcttcatttcagggtatcaaaaagtctatattcagaataagagaatcacctaaagagactttcaatgcaagtttttcaggtcatatgactgatccaaactttaaaaaagaaactgaagcctctgaaagtggactggaaatacatactgtttgctcacagaaggaggactccttatgtccaaatttaattgataatggaagctggccagccaccaccacacagaattctgtagctttgaagaatgcaggtttaatatccactttgaaaaagaaaacaaataagtttatttatgctatacatgatgaaacatcttataaaggaaaaaaaataccgaaagaccaaaaatcagaactaattaactgttcagcccagtttgaagcaaatgcttttgaagcaccacttacatttgcaaatgctgattcaggtttattgcattcttctgtgaaaagaagctgttcacagaatgattctgaagaaccaactttgtccttaactagctcttttgggacaattctgaggaaatgttctagaaatgaaacatgttctaataatacagtaatctctcaggatcttgattataaagaagcaaaatgtaataaggaaaaactacagttatttattaccccagaagctgattctctgtcatgcctgcaggaaggacagtgtgaaaatgatccaaaaagcaaaaaagtttcagatataaaagaagaggtcttggctgcagcatgtcacccagtacaacattcaaaagtggaatacagtgatactgactttcaatcccagaaaagtcttttatatgatcatgaaaatgccagcactcttattttaactcctacttccaaggatgttctgtcaaacctagtcatgatttctagaggcaaagaatcatacaaaatgtcagacaagctcaaaggtaacaattatgaatctgatgttgaattaaccaaaaatattcccatggaaaagaatcaagatgtatgtgctttaaatgaaaattataaaaacgttgagctgttgccacctgaaaaatacatgagagtagcatcaccttcaagaaaggtacaattcaaccaaaacacaaatctaagagtaatccaaaaaaatcaagaagaaactacttcaatttcaaaaataactgtcaatccagactctgaagaacttttctcagacaatgagaataattttgtcttccaagtagctaatgaaaggaataatcttgctttaggaaatactaaggaacttcatgaaacagacttgacttgtgtaaacgaacccattttcaagaactctaccatggttttatatggagacacaggtgataaacaagcaacccaagtgtcaattaaaaaagatttggtttatgttcttgcagaggagaacaaaaatagtgtaaagcagcatataaaaatgactctaggtcaagatttaaaatcggacatctccttgaatatagataaaataccagaaaaaaataatgattacatgaacaaatgggcaggactcttaggtccaatttcaaatcacagttttggaggtagcttcagaacagcttcaaataaggaaatcaagctctctgaacataacattaagaagagcaaaatgttcttcaaagatattgaagaacaatatcctactagtttagcttgtgttgaaattgtaaataccttggcattagataatcaaaagaaactgagcaagcctcagtcaattaatactgtatctgcacatttacagagtagtgtagttgtttctgattgtaaaaatagtcatataacccctcagatgttattttccaagcaggattttaattcaaaccataatttaacacctagccaaaaggcagaaattacagaactttctactatattagaagaatcaggaagtcagtttgaatttactcagtttagaaaaccaagctacatattgcagaagagtacatttgaagtgcctgaaaaccagatgactatcttaaagaccacttctgaggaatgcagagatgctgatcttcatgtcataatgaatgccccatcgattggtcaggtagacagcagcaagcaatttgaaggtacagttgaaattaaacggaagtttgctggcctgttgaaaaatgactgtaacaaaagtgcttctggttatttaacagatgaaaatgaagtggggtttaggggcttttattctgctcatggcacaaaactgaatgtttctactgaagctctgcaaaaagctgtgaaactgtttagtgatattgagaatattagtgaggaaacttctgcagaggtacatccaataagtttatcttcaagtaaatgtcatgattctgttgtttcaatgtttaagatagaaaatcataatgataaaactgtaagtgaaaaaaataataaatgccaactgatattacaaaataatattgaaatgactactggcacttttgttgaagaaattactgaaaattacaagagaaatactgaaaatgaagataacaaatatactgctgccagtagaaattctcataacttagaatttgatggcagtgattcaagtaaaaatgatactgtttgtattcataaagatgaaacggacttgctatttactgatcagcacaacatatgtcttaaattatctggccagtttatgaaggagggaaacactcagattaaagaagatttgtcagatttaacttttttggaagttgcgaaagctcaagaagcatgtcatggtaatacttcaaataaagaacagttaactgctactaaaacggagcaaaatataaaagattttgagacttctgatacattttttcagactgcaagtgggaaaaatattagtgtcgccaaagagtcatttaataaaattgtaaatttctttgatcagaaaccagaagaattgcataacttttccttaaattctgaattacattctgacataagaaagaacaaaatggacattctaagttatgaggaaacagacatagttaaacacaaaatactgaaagaaagtgtcccagttggtactggaaatcaactagtgaccttccagggacaacccgaacgtgatgaaaagatcaaagaacctactctattgggttttcatacagctagcgggaaaaaagttaaaattgcaaaggaatctttggacaaagtgaaaaacctttttgatgaaaaagagcaaggtactagtgaaatcaccagttttagccatcaatgggcaaagaccctaaagtacagagaggcctgtaaagaccttgaattagcatgtgagaccattgagatcacagctgccccaaagtgtaaagaaatgcagaattctctcaataatgataaaaaccttgtttctattgagactgtggtgccacctaagctcttaagtgataatttatgtagacaaactgaaaatctcaaaacatcaaaaagtatctttttgaaagttaaagtacatgaaaatgtagaaaaagaaacagcaaaaagtcctgcaacttgttacacaaatcagtccccttattcagtcattgaaaattcagccttagctttttacacaagttgtagtagaaaaacttctgtgagtcagacttcattacttgaagcaaaaaaatggcttagagaaggaatatttgatggtcaaccagaaagaataaatactgcagattatgtaggaaattatttgtatgaaaataattcaaacagtactatagctgaaaatgacaaaaatcatctctccgaaaaacaagatacttatttaagtaacagtagcatgtctaacagctattcctaccattctgatgaggtatataatgattcaggatatctctcaaaaaataaacttgattctggtattgagccagtattgaagaatgttgaagatcaaaaaaacactagtttttccaaagtaatatccaatgtaaaagatgcaaatgcatacccacaaactgtaaatgaagatatttgcgttgaggaacttgtgactagctcttcaccctgcaaaaataaaaatgcagccattaaattgtccatatctaatagtaataattttgaggtagggccacctgcatttaggatagccagtggtaaaatcgtttgtgtttcacatgaaacaattaaaaaagtgaaagacatatttacagacagtttcagtaaagtaattaaggaaaacaacgagaataaatcaaaaatttgccaaacgaaaattatggcaggttgttacgaggcattggatgattcagaggatattcttcataactctctagataatgatgaatgtagcacgcattcacataaggtttttgctgacattcagagtgaagaaattttacaacataaccaaaatatgtctggattggagaaagtttctaaaatatcaccttgtgatgttagtttggaaacttcagatatatgtaaatgtagtatagggaagcttcataagtcagtctcatctgcaaatacttgtgggatttttagcacagcaagtggaaaatctgtccaggtatcagatgcttcattacaaaacgcaagacaagtgttttctgaaatagaagatagtaccaagcaagtcttttccaaagtattgtttaaaagtaacgaacattcagaccagctcacaagagaagaaaatactgctatacgtactccagaacatttaatatcccaaaaaggcttttcatataatgtggtaaattcatctgctttctctggatttagtacagcaagtggaaagcaagtttccattttagaaagttccttacacaaagttaagggagtgttagaggaatttgatttaatcagaactgagcatagtcttcactattcacctacgtctagacaaaatgtatcaaaaatacttcctcgtgttgataagagaaacccagagcactgtgtaaactcagaaatggaaaaaacctgcagtaaagaatttaaattatcaaataacttaaatgttgaaggtggttcttcagaaaataatcactctattaaagtttctccatatctctctcaatttcaacaagacaaacaacagttggtattaggaaccaaagtgtcacttgttgagaacattcatgttttgggaaaagaacaggcttcacctaaaaacgtaaaaatggaaattggtaaaactgaaactttttctgatgttcctgtgaaaacaaatatagaagtttgttctacttactccaaagattcagaaaactactttgaaacagaagcagtagaaattgctaaagcttttatggaagatgatgaactgacagattctaaactgccaagtcatgccacacattctctttttacatgtcccgaaaatgaggaaatggttttgtcaaattcaagaattggaaaaagaagaggagagccccttatcttagtgggagaaccctcaatcaaaagaaacttattaaatgaatttgacaggataatagaaaatcaagaaaaatccttaaaggcttcaaaaagcactccagatggcacaataaaagatcgaagattgtttatgcatcatgtttctttagagccgattacctgtgtaccctttcgcacaactaaggaacgtcaagagatacagaatccaaattttaccgcacctggtcaagaatttctgtctaaatctcatttgtatgaacatctgactttggaaaaatcttcaagcaatttagcagtttcaggacatccattttatcaagtttctgctacaagaaatgaaaaaatgagacacttgattactacaggcagaccaaccaaagtctttgttccaccttttaaaactaaatcacattttcacagagttgaacagtgtgttaggaatattaacttggaggaaaacagacaaaagcaaaacattgatggacatggctctgatgatagtaaaaataagattaatgacaatgagattcatcagtttaacaaaaacaactccaatcaagcagtagctgtaactttcacaaagtgtgaagaagaacctttagatttaattacaagtcttcagaatgccagagatatacaggatatgcgaattaagaagaaacaaaggcaacgcgtctttccacagccaggcagtctgtatcttgcaaaaacatccactctgcctcgaatctctctgaaagcagcagtaggaggccaagttccctctgcgtgttctcataaacagctgtatacgtatggcgtttctaaacattgcataaaaattaacagcaaaaatgcagagtcttttcagtttcacactgaagattattttggtaaggaaagtttatggactggaaaaggaatacagttggctgatggtggatggctcataccctccaatgatggaaaggctggaaaagaagaattttatagggctctgtgtgacactccaggtgtggatccaaagcttatttctagaatttgggtttataatcactatagatggatcatatggaaactggcagctatggaatgtgcctttcctaaggaatttgctaatagatgcctaagcccagaaagggtgcttcttcaactaaaatacagatatgatacggaaattgatagaagcagaagatcggctataaaaaagataatggaaagggatgacacagctgcaaaaacacttgttctctgtgtttctgacataatttcattgagcgcaaatatatctgaaacttctagcaataaaactagtagtgcagatacccaaaaagtggccattattgaacttacagatgggtggtatgctgttaaggcccagttagatcctcccctcttagctgtcttaaagaatggcagactgacagttggtcagaagattattcttcatggagcagaactggtgggctctcctgatgcctgtacacctcttgaagccccagaatctcttatgttaaagatttctgctaacagtactcggcctgctcgctggtataccaaacttggattctttcctgaccctagaccttttcctctgcccttatcatcgcttttcagtgatggaggaaatgttggttgtgttgatgtaattattcaaagagcataccctatacagtggatggagaagacatcatctggattatacatatttcgcaatgaaagagaggaagaaaaggaagcagcaaaatatgtggaggcccaacaaaagagactagaagccttattcactaaaattcaggaggaatttgaagaacatgaagaaaacacaacaaaaccatatttaccatcacgtgcactaacaagacagcaagttcgtgctttgcaagatggtgcagagctttatgaagcagtgaagaatgcagcagacccagcttaccttgagggttatttcagtgaagagcagttaagagccttgaataatcacaggcaaatgttgaatgataagaaacaagctcagatccagttggaaattaggaaggccatggaatctgctgaacaaaaggaacaaggtttatcaagggatgtcacaaccgtgtggaagttgcgtattgtaagctattcaaaaaaagaaaaagattcagttatactgagtatttggcgtccatcatcagatttatattctctgttaacagaaggaaagagatacagaatttatcatcttgcaacttcaaaatctaaaagtaaatctgaaagagctaacatacagttagcagcgacaaaaaaaactcagtatcaacaactaccggtttcagatgaaattttatttcagatttaccagccacgggagccccttcacttcagcaaatttttagatccagactttcagccatcttgttctgaggtggacctaataggatttgtcgtttctgttgtgaaaaaaacaggacttgcccctttcgtctatttgtcagacgaatgttacaatttactggcaataaagttttggatagaccttaatgaggacattattaagcctcatatgttaattgctgcaagcaacctccagtggcgaccagaatccaaatcaggccttcttactttatttgctggagatttttctgtgttttctgctagtccaaaagagggccactttcaagagacattcaacaaaatgaaaaatactgttgagaatattgacatactttgcaatgaagcagaaaacaagcttatgcatatactgcatgcaaatgatcccaagtggtccaccccaactaaagactgtacttcagggccgtacactgctcaaatcattcctggtacaggaaacaagcttctgatgtcttctcctaattgtgagatatattatcaaagtcctttatcactttgtatggccaaaaggaagtctgtttccacacctgtctcagcccagatgacttcaaagtcttgtaaaggggagaaagagattgatgaccaaaagaactgcaaaaagagaagagccttggatttcttgagtagactgcctttacctccacctgttagtcccatttgtacatttgtttctccggctgcacagaaggcatttcagccaccaaggagttgtggcaccaaatacgaaacacccataaagaaaaaagaactgaattctcctcagatgactccatttaaaaaattcaatgaaatttctcttttggaaagtaattcaatagctgacgaagaacttgcattgataaatacccaagctcttttgtctggttcaacaggagaaaaacaatttatatctgtcagtgaatccactaggactgctcccaccagttcagaagattatctcagactgaaacgacgttgtactacatctctgatcaaagaacaggagagttcccaggccagtacggaagaatgtgagaaaaataagcaggacacaattacaactaaaaaatatatctaagcatttgcaaaggcgacaataaattattgacgcttaacctttccagtttataagactggaatataatttcaaaccacacattagtacttatgttgcacaatgagaaaagaaattagtttcaaatttacctcagcgtttgtgtatcgggcaaaaatcgttttgcccgattccgtattggtatacttttgcttcagttgcatatcttaaaactaaatgtaatttattaactaatcaagaaaaacatctttggggaaaagaaaatcttttaaatctttggatttgatcactacaagtattattttacaagtgaaataaacataccattttcttttagattgtgtcattaaatggaatgaggtctcttagtacagttattttgatgcagataattccttttagtttagctactattttaggggattttttttagaggtaactcactatgaaatagttctccttaatgcaaatatgttggttctgctatagttccatcctgttcaaaagtcaggatgaatatgaagagtggtgtttccttttgagcaattcttcatccttaagtcagcatgattataagaaaaatagaaccctcagtgtaactctaattcctttttactattccagtgtgatctctgaaattaaattacttcaactaaaaattcaaatactttaaatcagaagatttcatagttaatttattttttttttcaacaaaatggtcatccaaactcaaacttgagaaaatatcttgctttcaaattggcactgattctgcctgctttatttttagcgctatcacaggacccagagcctatgcccttttaaacttaccacaaaagcagaagattaattcaatttaagatgatactctcatttgttacgtcctttttttttttttttggagatggagtcttgctttgtcgcccatgctggagtgcagtggcatgatcctggctcactgcagcctccacttcccgggttcacgtaattctcccacctcaagcctccctagt

SEQ ID NO: 9527 - protein, 3418 aa, Homo sapiens [sequence omitted]

SEQ ID NO: 9528 - DNA, 1989 bp, Homo sapiens
ttcatttctgcttttaaaggaaatacttttggaaacataaatatgtgggtttgcaatttataaagcagcttttccacttattttcttagaatattgacatactttgcaatgaagcagaaaacaagcttatgcatatactgcatgcaaatgatcccaagtggtccaccccaactaaagactgtacttcagggccgtacactgctcaaatcattcctggtacaggaaacaagcttctgatgtcttctcctaattgtgagatatattatcaaagtcctttatcactttgtatggccaaaaggaagtctgtttccacacctgtctcagcccagatgacttcaaagtcttgtaaaggggagaaagagattgatgaccaaaagaactgcaaaaagagaagagccttggatttcttgagtagactgcctttacctccacctgttagtcccatttgtacatttgtttctccggctgcacagaaggcatttcagccaccaaggagttgtggcaccaaatacgaaacacccataaagaaaaaagaactgaattctcctcagatgactccatttaaaaaattcaatgaaatttctcttttggaaagtaattcaatagctgacgaagaacttgcattgataaatacccaagctcttttgtctggttcaacaggagaaaaacaatttatatctgtcagtgaatccactaggactgctcccaccagttcagaagattatctcagactgaaacgacgttgtactacatctctgatcaaagaacaggagagttcccaggccagtacggaagaatgtgagaaaaataagcaggacacaattacaactaaaaaatatatctaagcatttgcaaaggcgacaataaattattgacgcttaacctttccagtttataagactggaatataatttcaaaccacacattagtacttatgttgcacaatgagaaaagaaattagtttcaaatttacctcagcgtttgtgtatcgggcaaaaatcgttttgcccgattccgtattggtatacttttgcttcagttgcatatcttaaaactaaatgtaatttattaactaatcaagaaaaacatctttggctgagctcggtggctcatgcctgtaatcccaacactttgagaagctgaggtgggaggagtgcttgaggccaggagttcaagaccagcctgggcaacatagggagacccccatctttacaaagaaaaaaaaaaggggaaaagaaaatcttttaaatctttggatttgatcactacaagtattattttacaagtgaaataaacataccattttcttttagattgtgtcattaaatggaatgaggtctcttagtacagttattttgatgcagataattccttttagtttagctactattttaggggattttttttagaggtaactcactatgaaatagttctccttaatgcaaatatgttggttctgctatagttccatcctgttcaaaagtcaggatgaatatgaagagtggtgtttccttttgagcaattcttcatccttaagtcagcatgattataagaaaaatagaaccctcagtgtaactctaattcctttttactattccagtgtgatctctgaaattaaattacttcaactaaaaattcaaatactttaaatcagaagatttcatagttaatttattttttttttcaacaaaatggtcatccaaactcaaacttgagaaaatatcttgctttcaaattggcactgattctgcctgctttatttttagcgctatcacaggacccagagcctatgcccttttaaacttaccacaaaagcagaagattaattcaatttaagatgatactctcatttgttacgtcctttttttttttttttggagatggagtcttgctttgtcgcccatgctggagtgcagtggcatgatcctggctcactgcagcctccacttcccgggttcacgtaattctcccacctcaagcctccctagt

SEQ ID NO: 9529 - protein, 238 aa, Homo sapiens [sequence omitted]

SEQ ID NO: 9530 - DNA, 2662 bp, Homo sapiens
gccaccgcgcccggcctcattttactttttatcttctggatatgtataatctttttcagccatcctcagctattaattcgacttagaaatgagaggtttccggttgtgttatttaaatccttcccagttgagaagcgcccatctcaagaatgaaaaggaaacctttttgcttagctctttccactctatgttttataaacacaataaattatagtgataatagaaaattcagtttgagataaagtagtagtcaatttatgaatgcaaagaatatttggatgtttataaggaaattataatagttttctaaactcaaggaaatggggcccagagcattgacccaaattgtattgcataatggggagagctacttttggaaggaagatgatgtgaagtatgtgactatcacttttatttcaccagttatgttcctatggtactcccactttctaaaggaaggcatgaggaataggacaaggcatctgacaagtaaatctacaaaaatcccataagtgactttgagacgtcactgagttcattcataccggtgttcaggacgttttaaactagctcagtcatctatttttaaagatgtccaaaacaaagaacctttacaaatttcctacatactagataaaattgagcaaaatttatcatggagaattatgagagtggctaagtatgggaatgaaacaactgcatttattgtgataaattaaggcattggattactggtaaaacaaaaggaattctgaaaagatttgtagtaaatgttaaatggcagcataaacattcccaaacatacatactatgtcttcaatgttttatgtacttttgaaaaatcaggcacttgaaaataactatgaagttatattccgagaacctgacactcgctggaaattcaacgttcaagagttagcaaggtacttctttgtttttctagttcctcattatgtatcctgctattttcaggtatttcagaccgaacaaaagaatcttttcaggctggaaatggacatggtagttttcaggccagaaatgaagaaacattcatggtgtctcaagagaaaaaatccaccgaatgaaagaacggtatgaacacgatgttacttttcacagtgtgcttcatgcagaaaagccaagcagaatgaacagaaaccaggacaggaataatgcattgccttccaacaatgccagatactggaattcctacacagagtttccaaaccggagggcccacggtggatttacaaatgagagctcctatcacagaaggggcggttgtcaccatggatattagaggcctatcttacagccaggcagaattttcctaagtcagtttctacttcagtttttgttattttttgttgcattttagtcagagctccaattccagtgtaaatagctgaactcaaaagtttctgagcaaagtcattatattcactttcttcaccaaaatttgttaaagtgcttctatatgcatggtctgatgctgggaattctgcagatttgagtaaacagtctctttctctagggtaagaatttgaaaccaaaacttgagaacacacccaagaatatatttacataggttcatagatgaaataaagtgtttatattatatataagcttcagtaccatttgctctgaagtgatctatttattttttcaggaaattcatctccatcggtaaagttgggaaggtggagagaagtggtgggggggcattgctacttatcaaagtgccattgctactttgataatctatgtatctaaaaatgtgagatgtgcgactcttatgatactgattttcctttaatgttaatatgccagaaagcatacatctaagggaacattgtccttcaaagtagacactttgggaagttatttctttattttaatgatgtatcattgttaaaaatgctgtcaaatccttaatagctacaggagctactgagggaaatcagtgtcattatttaaagtcacgccttgtgtttttactactttattcagcaggattaaacctgaataacttttggctgttgtgctaatagtgtaaataaaataagcctgccttcataaaacactaacttttaaaaggaataaacgacttctaaaattatgcctattaacatgtgtaattagtcggcagctcaaatgtttgggagtgcaagaaattaggcaccccaggatataggtcatacagggatatataaaagccatgctcattacaaaatgagcagttgatgttttatgtggcattaagacaatcaagtcctcacaactctggaatgtcttcttatactgatgctgaatttatgaatccaaattaatttccaacaggttggaatcagatttaatgtgagatcatgatagacaagaccacagaggacgtatgctctatttcttgttggccaacagcttctttctaatgttctgtgaaaaattattttaagtgtcttatataatggtgcttttatggttattaaaaattgtaaatggtatcacatttatatggatttgtcattggatctttttttggttcaacaataaaaaaatttaattacctaaatgccaagaaactcaacaatataccagtttttctgtatcacaggcttatttaccagtcttttttttaataaataggaatcgtaaaggtaatgac

SEQ ID NO: 9531 - protein, 95 aa, Homo sapiens
MSSMFYVLLKNQALENNYEVIFREPDTRWKFNVQELARYFFVFLVPHYVSCYFQVFQTEQKNLFRLEMDMVVFRPEMKKHSWCLKRKNPPNERTV

SEQ ID NO: 9532 - DNA, 3828 bp, Homo sapiens
cagatttaggattaacactgtaaccttattgagatggtagaatgcaaatataaataaaaacaactcagctctcattgtcagaatagcaaagaacagtacgatgcctgtaacagtgtgcacattatcctttaattgtgaagtctatttggtcttttttcatacatattccatctcttgtgatcattttactttttatcttctggatatgtataatctttttcagccatcctcagctattaattcgacttagaaatgagaggtttccggttgtgttatttaaatccttcccagttgagaagcgcccatctcaagaatgaaaaggaaacctttttgcttagctctttccactctatgttttataaacacaataaattatagtgataatagaaaattcagtttgagataaagtagtagtcaatttatgaatgcaaagaatatttggatgtttataaggaaattataatagttttctaaactcaaggaaatggggcccagagcattgacccaaattgtattgcataatggggagagctacttttggaaggaagatgatgtgaagtatgtgactatcacttttatttcaccagttatgttcctatggtactcccactttctaaaggaaggcatgaggaataggacaaggcatctgacaagtaaatctacaaaaatcccataagtgactttgagacgtcactgagttcattcataccggtgttcaggacgttttaaactagctcagtcatctatttttaaagatgtccaaaacaaagaacctttacaaatttcctacatactagataaaattgagcaaaatttatcatggagaattatgagagtggctaagtatgggaatgaaacaactgcatttattgtgataaattaaggcattggattactggtaaaacaaaaggaattctgaaaagatttgtagtaaatgttaaatggcagcataaacattcccaaacatacatactatgtcttcaatgttttatgtacttttgaaaaatcaggcacttgaaaataactatgaagttatattccgagaacctgacactcgctggaaattcaacgttcaagagttagcaaggtacttctttgtttttctagttcctcattatgtatcctgctattttcaggtatttcagaccgaacaaaagaatcttttcaggctggaaatggacatggtagttttcaggccagaaatggtaattcttggaaattgataactttggaattattaatgtgaagactttagttttgggtcagttttctaatataatgctaaatgctaaatcttggcttggacttggtcctttaaaaggatgcatttaacattctgctaaaatgcttcttcatcaaggaacatttaaaagcactttatctgcatgggactgcacatgtcaatggtgtttttgcatttaggctaaagatctttagaggttgagcagtctgcgattcatttatgatctagatgctgcttctaatttataaagcaataaatgttcaaataatactaacttgttgattgaatgcatgggttcagatattctctgtctgtattatttgataatgtcattgacttaaaatagccagtgaggtaagaatttacttcttaggagtaaggctggttcctcttatggtaataggcagatagtgtcttcaaagtggatctgtggactactccatcagaattgcctcaggtggctattaaaatccgagttcatggaccccattcagtagttggaatctctggtaattatatttctaactatatccccagttgattcttctgcccactagaatttaagattgttttaataagtatctcctagaaatatatctcagggactgattaacataagtagatagatatatgcatgacattaacaggcaaatgtatgattttttaaaaatctcatggtgttcttttatgtcttgaagcacgtaattgagaggaccagaaacaaagcatttctgaagctttagctccttgctagcctcagggtggtttgggggtgtgcagggcagcatgaaaaacatgagtggaggctgaaagagaactgctgaacaagatgtttgttatgcttttgccagagctaggtcctgagaacagggactgcaatatctgcaatactagaggacttgtaaaatataagtaactcattgtggtatcctgccttaactaaatgcattttttttccatgtagaagaaacattcatggtgtctcaagagaaaaaatccaccgaatgaaagaacggtatgaacacgatgttacttttcacagtgtgcttcatgcagaaaagccaagcagaatgaacagaaaccaggacaggaataatgcattgccttccaacaatgccagatactggaattcctacacagagtttccaaaccggagggcccacggtggatttacaaatgagagctcctatcacagaaggggcggttgtcaccatggatattagaggcctatcttacagccaggcagaattttcctaagtcagtttctacttcagtttttgttattttttgttgcattttagtcagagctccaattccagtgtaaatagctgaactcaaaagtttctgagcaaagtcattatattcactttcttcaccaaaatttgttaaagtgcttctatatgcatggtctgatgctgggaattctgcagatttgagtaaacagtctctttctctagggtaagaatttgaaaccaaaacttgagaacacacccaagaatatatttacataggttcatagatgaaataaagtgtttatattatatataagcttcagtaccatttgctctgaagtgatctatttattttttcaggaaattcatctccatcggtaaagttgggaaggtggagagaagtggtgggggggcattgctacttatcaaagtgccattgctactttgataatctatgtatctaaaaatgtgagatgtgcgactcttatgatactgattttcctttaatgttaatatgccagaaagcatacatctaagggaacattgtccttcaaagtagacactttgggaagttatttctttattttaatgatgtatcattgttaaaaatgctgtcaaatccttaatagctacaggagctactgagggaaatcagtgtcattatttaaagtcacgccttgtgtttttactactttattcagcaggattaaacctgaataacttttggctgttgtgctaatagtgtaaataaaataagcctgccttcataaaacactaacttttaaaaggaataaacgacttctaaaattatgcctattaacatgtgtaattagtcggcagctcaaatgtttgggagtgcaagaaattaggcaccccaggatataggtcatacagggatatataaaagccatgctcattacaaaatgagcagttgatgttttatgtggcattaagacaatcaagtcctcacaactctggaatgtcttcttatactgatgctgaatttatgaatccaaattaatttccaacaggttggaatcagatttaatgtgagatcatgatagacaagaccacagaggacgtatgctctatttcttgttggccaacagcttctttctaatgttctgtgaaaaattattttaagtgtcttatataatggtgcttttatggttattaaaaattgtaaatggtatcacatttatatggatttgtcattggatctttttttggttcaacaataaaaaaatttaattacctaaatgccaagaaactcaacaatataccagtttttctgtatcacaggcttatttaccagtcttttttttaataaataggaatcgtaaaggtaatgac

SEQ ID NO: 9533 - protein, 49 aa, Homo sapiens
MPVTVCTLSFNCEVYLVFFHTYSISCDHFTFYLLDMYNLFQPSSAINST

SEQ ID NO: 9534 - DNA, 4061 bp, Homo sapiens
tcatatttgctaacagtggttctcccagggagaaggtaacgaggttttattttagtgtttctctgctgttcaatggctgaagtttgctgagatgctaatctcacttgaggatacaatttaaaaatagtccttggcaaatggtctttggtgtgaatccttgataacttttctgtcttaattactttcctacggcaaggcatacagagaagcacccaccgaaatgttcagatcaatactaatactgaattagatggcgctcgtagtggagctacaggtcacaacaggacggttctgcctctggtgagccgggaatttccacactgtgtgctgttgctccctgggagttccagggcaacagaatattttagtctaaagacagatttagggccaggtgtgagccaccgcgcccggcctcattttactttttatcttctggatatgtataatctttttcagccatcctcagctattaattcgacttagaaatgagaggtttccggttgtgttatttaaatccttcccagttgagaagcgcccatctcaagaatgaaaaggaaacctttttgcttagctctttccactctatgttttataaacacaataaattatagtgataatagaaaattcagtttgagataaagtagtagtcaatttatgaatgcaaagaatatttggatgtttataaggaaattataatagttttctaaactcaaggaaatggggcccagagcattgacccaaattgtattgcataatggggagagctacttttggaaggaagatgatgtgaagtatgtgactatcacttttatttcaccagttatgttcctatggtactcccactttctaaaggaaggcatgaggaataggacaaggcatctgacaagtaaatctacaaaaatcccataagtgactttgagacgtcactgagttcattcataccggtgttcaggacgttttaaactagctcagtcatctatttttaaagatgtccaaaacaaagaacctttacaaatttcctacatactagataaaattgagcaaaatttatcatggagaattatgagagtggctaagtatgggaatgaaacaactgcatttattgtgataaattaaggcattggattactggtaaaacaaaaggaattctgaaaagatttgtagtaaatgttaaatggcagcataaacattcccaaacatacatactatgtcttcaatgttttatgtacttttgaaaaatcaggcacttgaaaataactatgaagttatattccgagaacctgacactcgctggaaattcaacgttcaagagttagcaaggtacttctttgtttttctagttcctcattatgtatcctgctattttcaggtatttcagaccgaacaaaagaatcttttcaggctggaaatggacatggtagttttcaggccagaaatggtaattcttggaaattgataactttggaattattaatgtgaagactttagttttgggtcagttttctaatataatgctaaatgctaaatcttggcttggacttggtcctttaaaaggatgcatttaacattctgctaaaatgcttcttcatcaaggaacatttaaaagcactttatctgcatgggactgcacatgtcaatggtgtttttgcatttaggctaaagatctttagaggttgagcagtctgcgattcatttatgatctagatgctgcttctaatttataaagcaataaatgttcaaataatactaacttgttgattgaatgcatgggttcagatattctctgtctgtattatttgataatgtcattgacttaaaatagccagtgaggtaagaatttacttcttaggagtaaggctggttcctcttatggtaataggcagatagtgtcttcaaagtggatctgtggactactccatcagaattgcctcaggtggctattaaaatccgagttcatggaccccattcagtagttggaatctctggtaattatatttctaactatatccccagttgattcttctgcccactagaatttaagattgttttaataagtatctcctagaaatatatctcagggactgattaacataagtagatagatatatgcatgacattaacaggcaaatgtatgattttttaaaaatctcatggtgttcttttatgtcttgaagcacgtaattgagaggaccagaaacaaagcatttctgaagctttagctccttgctagcctcagggtggtttgggggtgtgcagggcagcatgaaaaacatgagtggaggctgaaagagaactgctgaacaagatgtttgttatgcttttgccagagctaggtcctgagaacagggactgcaatatctgcaatactagaggacttgtaaaatataagtaactcattgtggtatcctgccttaactaaatgcattttttttccatgtagaagaaacattcatggtgtctcaagagaaaaaatccaccgaatgaaagaacggtatgaacacgatgttacttttcacagtgtgcttcatgcagaaaagccaagcagaatgaacagaaaccaggacaggaataatgcattgccttccaacaatgccagatactggaattcctacacagagtttccaaaccggagggcccacggtggatttacaaatgagagctcctatcacagaaggggcggttgtcaccatggatattagaggcctatcttacagccaggcagaattttcctaagtcagtttctacttcagtttttgttattttttgttgcattttagtcagagctccaattccagtgtaaatagctgaactcaaaagtttctgagcaaagtcattatattcactttcttcaccaaaatttgttaaagtgcttctatatgcatggtctgatgctgggaattctgcagatttgagtaaacagtctctttctctagggtaagaatttgaaaccaaaacttgagaacacacccaagaatatatttacataggttcatagatgaaataaagtgtttatattatatataagcttcagtaccatttgctctgaagtgatctatttattttttcaggaaattcatctccatcggtaaagttgggaaggtggagagaagtggtgggggggcattgctacttatcaaagtgccattgctactttgataatctatgtatctaaaaatgtgagatgtgcgactcttatgatactgattttcctttaatgttaatatgccagaaagcatacatctaagggaacattgtccttcaaagtagacactttgggaagttatttctttattttaatgatgtatcattgttaaaaatgctgtcaaatccttaatagctacaggagctactgagggaaatcagtgtcattatttaaagtcacgccttgtgtttttactactttattcagcaggattaaacctgaataacttttggctgttgtgctaatagtgtaaataaaataagcctgccttcataaaacactaacttttaaaaggaataaacgacttctaaaattatgcctattaacatgtgtaattagtcggcagctcaaatgtttgggagtgcaagaaattaggcaccccaggatataggtcatacagggatatataaaagccatgctcattacaaaatgagcagttgatgttttatgtggcattaagacaatcaagtcctcacaactctggaatgtcttcttatactgatgctgaatttatgaatccaaattaatttccaacaggttggaatcagatttaatgtgagatcatgatagacaagaccacagaggacgtatgctctatttcttgttggccaacagcttctttctaatgttctgtgaaaaattattttaagtgtcttatataatggtgcttttatggttattaaaaattgtaaatggtatcacatttatatggatttgtcattggatctttttttggttcaacaataaaaaaatttaattacctaaatgccaagaaactcaacaatataccagtttttctgtatcacaggcttatttaccagtcttttttttaataaataggaatcgtaaaggtaatgac

SEQ ID NO: 9535 - protein, 82 aa, Homo sapiens [sequence omitted]

SEQ ID NO: 9536 - DNA, 2204 bp, Homo sapiens
atgctcagaatggagcagtggacaaaggagacaaaaatccctgccttcatggaacatgtattctatcagagaaaaaaaattctcaaggaaaaaaggcaattttagcatctgctctgctctgttctctcaaaaaataagcaaaggatttcacagtgttctaggtacttgggaatcatcagtgaacaaaacaaagatcctgcccttgtggaccttatgtgccagaggctcctgaccaccataaagatagaactggggcttaaccctcatcacttctgaagctgatggaatgacaattgcagcatgactttcccagggccctgattttcagcacggatgattttttcttcagggaagatggtgcctatgagttcaatcctgacttcctggaggaagctcatgaatggaaccaaaaaagagcaagaaaagcaatgaggaatggcatatcccccattattattgataataccaacctccacgcctgggaaatgaagccctatgcagtcatggcacttgaaaataactatgaagttatattccgagaacctgacactcgctggaaattcaacgttcaagagttagcaagaagaaacattcatggtgtctcaagagaaaaaatccaccgaatgaaagaacggtatgaacacgatgttacttttcacagtgtgcttcatgcagaaaagccaagcagaatgaacagaaaccaggacaggaataatgcattgccttccaacaatgccagatactggaattcctacacagagtttccaaaccggagggcccacggtggatttacaaatgagagctcctatcacagaaggggcggttgtcaccatggatattagaggcctatcttacagccaggcagaattttcctaagtcagtttctacttcagtttttgttattttttgttgcattttagtcagagctccaattccagtgtaaatagctgaactcaaaagtttctgagcaaagtcattatattcactttcttcaccaaaatttgttaaagtgcttctatatgcatggtctgatgctgggaattctgcagatttgagtaaacagtctctttctctagggtaagaatttgaaaccaaaacttgagaacacacccaagaatatatttacataggttcatagatgaaataaagtgtttatattatatataagcttcagtaccatttgctctgaagtgatctatttattttttcaggaaattcatctccatcggtaaagttgggaaggtggagagaagtggtgggggggcattgctacttatcaaagtgccattgctactttgataatctatgtatctaaaaatgtgagatgtgcgactcttatgatactgattttcctttaatgttaatatgccagaaagcatacatctaagggaacattgtccttcaaagtagacactttgggaagttatttctttattttaatgatgtatcattgttaaaaatgctgtcaaatccttaatagctacaggagctactgagggaaatcagtgtcattatttaaagtcacgccttgtgtttttactactttattcagcaggattaaacctgaataacttttggctgttgtgctaatagtgtaaataaaataagcctgccttcataaaacactaacttttaaaaggaataaacgacttctaaaattatgcctattaacatgtgtaattagtcggcagctcaaatgtttgggagtgcaagaaattaggcaccccaggatataggtcatacagggatatataaaagccatgctcattacaaaatgagcagttgatgttttatgtggcattaagacaatcaagtcctcacaactctggaatgtcttcttatactgatgctgaatttatgaatccaaattaatttccaacaggttggaatcagatttaatgtgagatcatgatagacaagaccacagaggacgtatgctctatttcttgttggccaacagcttctttctaatgttctgtgaaaaattattttaagtgtcttatataatggtgcttttatggttattaaaaattgtaaatggtatcacatttatatggatttgtcattggatctttttttggttcaacaataaaaaaatttaattacctaaatgccaagaaactcaacaatataccagtttttctgtatcacaggcttatttaccagtcttttttttaataaataggaatcgtaaaggtaatgac

SEQ ID NO: 9537 - protein, 137 aa, Homo sapiens
MRNGISPIIIDNTNLHAWEMKPYAVMALENNYEVIFREPDTRWKFNVQELARRNIHGVSREKIHRMKERYEHDVTFHSVLHAEKPSRMNRNQDRNNALPSNNARYWNSYTEFPNRRAHGGFTNESSYHRRGGCHHGY

SEQ ID NO: 9538 - DNA, 2205 bp, Homo sapiens
tcccagcgcccgcccctctatccatcacatggccggagagtcacaaaaacaacagctttggccaagaccgtgacttcagtaaagggaacccggggctctcgcagccagccctcctgcccatggaggacagtttccttcaatcttttgggaggctgagcctccagccccagcagcagcagcagcggcagcggccgccccggccgcccccgcgggggacacctcctcgccgccacagctttaggaaacacctctacctcctgcgaggcctcccgggctccgggaaaactacactggccagacaattgcagcatgactttcccagggccctgattttcagcacggatgattttttcttcagggaagatggtgcctatgagttcaatcctgacttcctggaggaagctcatgaatggaaccaaaaaagagcaagaaaagcaatgaggaatggcatatcccccattattattgataataccaacctccacgcctgggaaatgaagccctatgcagtcatggtatttcagaccgaacaaaagaatcttttcaggctggaaatggacatggtagttttcaggccagaaatgaagaaacattcatggtgtctcaagagaaaaaatccaccgaatgaaagaacggtatgaacacgatgttacttttcacagtgtgcttcatgcagaaaagccaagcagaatgaacagaaaccaggacaggaataatgcattgccttccaacaatgccagatactggaattcctacacagagtttccaaaccggagggcccacggtggatttacaaatgagagctcctatcacagaaggggcggttgtcaccatggatattagaggcctatcttacagccaggcagaattttcctaagtcagtttctacttcagtttttgttattttttgttgcattttagtcagagctccaattccagtgtaaatagctgaactcaaaagtttctgagcaaagtcattatattcactttcttcaccaaaatttgttaaagtgcttctatatgcatggtctgatgctgggaattctgcagatttgagtaaacagtctctttctctagggtaagaatttgaaaccaaaacttgagaacacacccaagaatatatttacataggttcatagatgaaataaagtgtttatattatatataagcttcagtaccatttgctctgaagtgatctatttattttttcaggaaattcatctccatcggtaaagttgggaaggtggagagaagtggtgggggggcattgctacttatcaaagtgccattgctactttgataatctatgtatctaaaaatgtgagatgtgcgactcttatgatactgattttcctttaatgttaatatgccagaaagcatacatctaagggaacattgtccttcaaagtagacactttgggaagttatttctttattttaatgatgtatcattgttaaaaatgctgtcaaatccttaatagctacaggagctactgagggaaatcagtgtcattatttaaagtcacgccttgtgtttttactactttattcagcaggattaaacctgaataacttttggctgttgtgctaatagtgtaaataaaataagcctgccttcataaaacactaacttttaaaaggaataaacgacttctaaaattatgcctattaacatgtgtaattagtcggcagctcaaatgtttgggagtgcaagaaattaggcaccccaggatataggtcatacagggatatataaaagccatgctcattacaaaatgagcagttgatgttttatgtggcattaagacaatcaagtcctcacaactctggaatgtcttcttatactgatgctgaatttatgaatccaaattaatttccaacaggttggaatcagatttaatgtgagatcatgatagacaagaccacagaggacgtatgctctatttcttgttggccaacagcttctttctaatgttctgtgaaaaattattttaagtgtcttatataatggtgcttttatggttattaaaaattgtaaatggtatcacatttatatggatttgtcattggatctttttttggttcaacaataaaaaaatttaattacctaaatgccaagaaactcaacaatataccagtttttctgtatcacaggcttatttaccagtcttttttttaataaataggaatcgtaaaggtaatgac

SEQ ID NO: 9539 - protein, 173 aa, Homo sapiens
MEDSFLQSFGRLSLQPQQQQQRQRPPRPPPRGTPPRRHSFRKHLYLLRGLPGSGKTTLARQLQHDFPRALIFSTDDFFFREDGAYEFNPDFLEEAHEWNQKRARKAMRNGISPIIIDNTNLHAWEMKPYAVMVFQTEQKNLFRLEMDMVVFRPEMKKHSWCLKRKNPPNERTV

SEQ ID NO: 9540 - DNA, 1207 bp, Homo sapiens
tcccagcgcccgcccctctatccatcacatggccggagagtcacaaaaacaacagctttggccaagaccgtgacttcagtaaagggaacccggggctctcgcagccagccctcctgcccatggaggacagtttccttcaatcttttgggaggctgagcctccagccccagcagcagcagcagcggcagcggccgccccggccgcccccgcgggggacacctcctcgccgccacagctttaggaaacacctctacctcctgcgaggcctcccgggctccgggaaaactacactggccagacaattgcagcatgactttcccagggccctgattttcagcacggatgattttttcttcagggaagatggtgcctatgagttcaatcctgacttcctggaggaagctcatgaatggaaccaaaaaagagcaagaaaagcaatgaggaatggcatatcccccattattattgataataccaacctccacgcctgggaaatgaagccctatgcagtcatggcacttgaaaataactatgaagttatattccgagaacctgacactcgctggaaattcaacgttcaagagttagcaagaagaaacattcatggtgtctcaagagaaaaaatccaccgaatgaaagaacggtatgaacacgatgttacttttcacagtgtgcttcatgcagaaaagccaagcagaatgaacagaaaccaggacaggaataatgcattgccttccaacaatgccagatactggaattcctacacagagtttccaaaccggagggcccacggtggatttacaaatgagagctcctatcacagaaggggcggttgtcaccatggatattagaggcctatcttacagccaggcagaattttcctaagttggaatcagatttaatgtgagatcatgatagacaagaccacagaggacgtatgctctatttcttgttggccaacagcttctttctaatgttctgtgaaaaattattttaagtgtcttatataatggtgcttttatggttattaaaaattgtaaatggtatcacatttatatggatttgtcattggatctttttttggttcaacaataaaaaaatttaattacctaaatgccaagaaactcaacaatataccagtttttctgtatcacaggcttatttaccagtcttttttttaataaataggaatcgtaaaggtaatgac

SEQ ID NO: 9541 - protein, 243 aa, Homo sapiens; identical to SEQ ID NO: 1391

SEQ ID NO: 9542 - DNA, 2213 bp, Homo sapiens
tcccagcgcccgcccctctatccatcacatggccggagagtcacaaaaacaacagctttggccaagaccgtgacttcagtaaagggaacccggggctctcgcagccagccctcctgcccatggaggacagtttccttcaatcttttgggaggctgagcctccagccccagcagcagcagcagcggcagcggccgccccggccgcccccgcgggggacacctcctcgccgccacagctttaggaaacacctctacctcctgcgaggcctcccgggctccgggaaaactacactggccagacaattgcagcatgactttcccagggccctgattttcagcacggatgattttttcttcagggaagatggtgcctatgagttcaatcctgacttcctggaggaagctcatgaatggaaccaaaaaagagcaagaaaagcaatgaggaatggcatatcccccattattattgataataccaacctccacgcctgggaaatgaagccctatgcagtcatggcacttgaaaataactatgaagttatattccgagaacctgacactcgctggaaattcaacgttcaagagttagcaagaagaaacattcatggtgtctcaagagaaaaaatccaccgaatgaaagaacggtatgaacacgatgttacttttcacagtgtgcttcatgcagaaaagccaagcagaatgaacagaaaccaggacaggaataatgcattgccttccaacaatgccagatactggaattcctacacagagtttccaaaccggagggcccacggtggatttacaaatgagagctcctatcacagaaggggcggttgtcaccatggatattagaggcctatcttacagccaggcagaattttcctaagtcagtttctacttcagtttttgttattttttgttgcattttagtcagagctccaattccagtgtaaatagctgaactcaaaagtttctgagcaaagtcattatattcactttcttcaccaaaatttgttaaagtgcttctatatgcatggtctgatgctgggaattctgcagatttgagtaaacagtctctttctctagggtaagaatttgaaaccaaaacttgagaacacacccaagaatatatttacataggttcatagatgaaataaagtgtttatattatatataagcttcagtaccatttgctctgaagtgatctatttattttttcaggaaattcatctccatcggtaaagttgggaaggtggagagaagtggtgggggggcattgctacttatcaaagtgccattgctactttgataatctatgtatctaaaaatgtgagatgtgcgactcttatgatactgattttcctttaatgttaatatgccagaaagcatacatctaagggaacattgtccttcaaagtagacactttgggaagttatttctttattttaatgatgtatcattgttaaaaatgctgtcaaatccttaatagctacaggagctactgagggaaatcagtgtcattatttaaagtcacgccttgtgtttttactactttattcagcaggattaaacctgaataacttttggctgttgtgctaatagtgtaaataaaataagcctgccttcataaaacactaacttttaaaaggaataaacgacttctaaaattatgcctattaacatgtgtaattagtcggcagctcaaatgtttgggagtgcaagaaattaggcaccccaggatataggtcatacagggatatataaaagccatgctcattacaaaatgagcagttgatgttttatgtggcattaagacaatcaagtcctcacaactctggaatgtcttcttatactgatgctgaatttatgaatccaaattaatttccaacaggttggaatcagatttaatgtgagatcatgatagacaagaccacagaggacgtatgctctatttcttgttggccaacagcttctttctaatgttctgtgaaaaattattttaagtgtcttatataatggtgcttttatggttattaaaaattgtaaatggtatcacatttatatggatttgtcattggatctttttttggttcaacaataaaaaaatttaattacctaaatgccaagaaactcaacaatataccagtttttctgtatcacaggcttatttaccagtcttttttttaataaataggaatcgtaaaggtaatgac

SEQ ID NO: 9543 - protein, 243 aa, Homo sapiens; identical to SEQ ID NO: 1391

SEQ ID NO: 9544 - DNA, 965 bp, Homo sapiens
tcccagcgcccgcccctctatccatcacatggccggagagtcacaaaaacaacagctttggccaagaccgtgacttcagtaaagggaacccggggctctcgcagccagccctcctgcccatggaggacagtttccttcaatcttttgggaggctgagcctccagccccagcagcagcagcagcggcagcggccgccccggccgcccccgcgggggacacctcctcgccgccacagctttaggaaacacctctacctcctgcgaggcctcccgggctccgggaaaactacactggccagacaattgcagcatgactttcccagggccctgattttcagcacggatgattttttcttcagggaagatggtgcctatgagttcaatcctgacttcctggaggaagctcatgaatggaaccaaaaaagagcaagaaaagcaatgaggaatggcatatcccccattattattgataataccaacctccacgcctgggaaatgaagccctatgcagtcatggcacttgaaaataactatgaagttatattccgagaacctgacactcgctggaaattcaacgttcaagagttagcaagaagaaacattcatggtgtctcaagagaaaaaatccaccgaatgaaagaacggttggaatcagatttaatgtgagatcatgatagacaagaccacagaggacgtatgctctatttcttgttggccaacagcttctttctaatgttctgtgaaaaattattttaagtgtcttatataatggtgcttttatggttattaaaaattgtaaatggtatcacatttatatggatttgtcattggatctttttttggttcaacaataaaaaaatttaattacctaaatgccaagaaactcaacaatataccagtttttctgtatcacaggcttatttaccagtcttttttttaataaataggaatcgtaaaggtaatgac

SEQ ID NO: 9545 - protein, 181 aa, Homo sapiens
MEDSFLQSFGRLSLQPQQQQQRQRPPRPPPRGTPPRRHSFRKHLYLLRGLPGSGKTTLARQLQHDFPRALIFSTDDFFFREDGAYEFNPDFLEEAHEWNQKRARKAMRNGISPIIIDNTNLHAWEMKPYAVMALENNYEVIFREPDTRWKFNVQELARRNIHGVSREKIHRMKERLESDLM

SEQ ID NO: 9546 - DNA, 5033 bp, Homo sapiens
tgtatatgaaaagaaaaattcaagtctgaaaatgttcaaaaaccaaaacaaaacttgtaagtagcagacttaataggagaacaaatgaaaccagatttagaagggatatcaaatcgggacctgaaagaaaaaaaaaatcttggattcagttaccatggttgcttaacttagtgtacagaggataagggaaatacattatacactattatttaatctctgaacacaactttcattatttaaataatattgatgaaaataactttaaaactgtacagtgttcacaaatataaaatatacatacctgaaaatgcatcagtgctacccttagatttttgtcctgtctgtataattgtttgcatcagaggttaaggtttggactttcgatgtgcgtatctttaaagaagtcgaataacagacattcatacggaaactatgagcactggttcatcaagtcttctttatacttatcccttccttcgtgtcactggctttatctgtactagatttaaagtggccacattttctttgctcttccttccatcaagaagtctactttcctcgcccttcaatgtgggccagcaaagtgactcgctttgaccaaaagaatgtgctggagcgctggtgagcagcttcttgtcttgttctctttaaataccgcggtctgtgaagagacctgggtgaggctctttcagaaggatgacaggccctgcggagtgagagccagcaccaccagacgtgtgaaggaccctgcttagggcactccgcccagccccacgtagtcaggtgacgcagctgccgcagggaccccgggcaaggcccgcagatcggcccacctgagcccagcccaaattgccaacacaaaagaagttcattcccgcgcccacacaatagacttcccagcgtctgagaactatccaccttatcccttttattttctattctgcctgaaacactccgcatgtctccgatgatctttgctcctctgacatggtttctggaccttgtatgtatttgatcactcttctctggacacgttcaagctggccaaatttctctttaaattgtgtggcagtcagatttgaaaacagtgtttcaaagatgatttgcgtcttttaacccttagagtctttctgcttttccctgcagccccttctcccctacaagccctccagcactcgcttcctcctctctttcctgcccgtgtgctcagcccctcccccaagaggcagcagttttctcatccctcagggaccaagtcaaacttgcatcactcctttgcatcactttccccggctcctgaccctttctctcagcgctttgctgggccagctttttcctctgtgcgctgcgctggctgtgccaggtctgactcctttggctgggccatgaattccttgaaagcagctactttctttctgtaccttaacgcttcacctggcatttggcacatgttaagtgctcaataaatgtttaatgggttggataattaactaatattctttcggtattaaagtgtattatctactggcccgcatttccccgcaaagctaccaagggagactgtcagattcctgtttaaacaaacatagtatgtccactgaatttcctggtttgccactgtttagttcattaaaaaagaaaatgcatttggtttggaatttcagtgatctatgctgccttctttttaaatgctatcaagcttctgaagaattttgacagatatttagttaccatttctggaatgtatattcactcgtttttgaaaatggaagcattttactttagttttgtctttcatctccctcttaattcaccgcagtatctcaaggactacttgacatgcgcgctccgatgtgtttattactgtggcgtagaaacagtctgggttggtcaatttggcctcattgttattataacaccattttacttttgtaaagtgccttactgggtacaaaatgttttttcatactggcctcatttcagtctgattagaagctctgtttaataggtagggataattatctgtgttttacagttgagaaaacaaaagctcccaagcctgtgggggcacctgaagtgcttactcatctgtggccccaaggcctcatgtttgttctgttcttcctggattaaagatctttctgctccatggagaagaccaacagcaaaaaagacattgaatagctttgctttctctttgcatttcctgcccttgtcattctccaaccttttttcctccgatttttaaatatcttcttattctgagcatggccatgtgaccatattttctgtttgttggctgggtttgtttgtcctcagtttttacagatgcggaaaggaagctcagacacgtctccagttcttgcggagcatgacatccaccttctgccaaaagatagtacgagcaaggattcaagtggaaacatcttctctttgaagttcttttgtgcagaactgaataagcgtattcattttgttttggttttgctttaaaggggagctccatggtggtgtttctttttgctgtgatatttcctacttagagtggtggagggtaggaaggtaggggacagtggctctgtcgctttccttctcctgttgtgcttttctcccatttggctcgggtcatcattaaaacataaatatgttacctgataaagtagagcacgtgcatcacttccccacatttctcactagaattagtttctcagatgggtccttacagagaacagagctccaaggaaatgggccagctcagagtttagggggccgagggaagggctgcagcatgggggtctggcacccatgggcaggtcttgggcaggggcactggtgcctcggagaggaatgggcaccgggattggtgcccaggaagaaagacagtcaccaggcctgcgacttagcttcagtttcttcttgagtcagttcttgccgctacagaaggcagcggcagtgactgtgcctcttagtttcaaggactggcaacacacactgctgcctctcagccctctcccatctcctgctaaggagtgatgccttctagacataataaacatctctcttttgaaactgcattttaacaactccaaacctggtggtctcagaattataaactgctaaatgttagagatggaaggagattatttctactgagactatacatatatttaaaacatctctctctctcatttctccactttccagacaattgcagcatgactttcccagggccctgattttcagcacggatgattttttcttcagggaagatggtgcctatgagttcaatcctgacttcctggaggaagctcatgaatggaaccaaaaaagagcaagaaaagcaatgaggaatggcatatcccccattattattgataataccaacctccacgcctgggaaatgaagccctatgcagtcatggcacttgaaaataactatgaagttatattccgagaacctgacactcgctggaaattcaacgttcaagagttagcaagaagaaacattcatggtgtctcaagagaaaaaatccaccgaatgaaagaacggtatgaacacgatgttacttttcacagtgtgcttcatgcagaaaagccaagcagaatgaacagaaaccaggacaggaataatgcattgccttccaacaatgccagatactggaattcctacacagagtttccaaaccggagggcccacggtggatttacaaatgagagctcctatcacagaaggggcggttgtcaccatggatattagaggcctatcttacagccaggcagaattttcctaagtcagtttctacttcagtttttgttattttttgttgcattttagtcagagctccaattccagtgtaaatagctgaactcaaaagtttctgagcaaagtcattatattcactttcttcaccaaaatttgttaaagtgcttctatatgcatggtctgatgctgggaattctgcagatttgagtaaacagtctctttctctagggtaagaatttgaaaccaaaacttgagaacacacccaagaatatatttacataggttcatagatgaaataaagtgtttatattatatataagcttcagtaccatttgctctgaagtgatctatttattttttcaggaaattcatctccatcggtaaagttgggaaggtggagagaagtggtgggggggcattgctacttatcaaagtgccattgctactttgataatctatgtatctaaaaatgtgagatgtgcgactcttatgatactgattttcctttaatgttaatatgccagaaagcatacatctaagggaacattgtccttcaaagtagacactttgggaagttatttctttattttaatgatgtatcattgttaaaaatgctgtcaaatccttaatagctacaggagctactgagggaaatcagtgtcattatttaaagtcacgccttgtgtttttactactttattcagcaggattaaacctgaataacttttggctgttgtgctaatagtgtaaataaaataagcctgccttcataaaacactaacttttaaaaggaataaacgacttctaaaattatgcctattaacatgtgtaattagtcggcagctcaaatgtttgggagtgcaagaaattaggcaccccaggatataggtcatacagggatatataaaagccatgctcattacaaaatgagcagttgatgttttatgtggcattaagacaatcaagtcctcacaactctggaatgtcttcttatactgatgctgaatttatgaatccaaattaatttccaacaggttggaatcagatttaatgtgagatcatgatagacaagaccacagaggacgtatgctctatttcttgttggccaacagcttctttctaatgttctgtgaaaaattattttaagtgtcttatataatggtgcttttatggttattaaaaattgtaaatggtatcacatttatatggatttgtcattggatctttttttggttcaacaataaaaaaatttaattacctaaatgccaag

SEQ ID NO: 9547 - protein, 137 aa, Homo sapiens; identical to SEQ ID NO: 9537

SEQ ID NO: 9548 - DNA, 2573 bp, Homo sapiens
gccaccgcgcccggcctcattttactttttatcttctggatatgtataatctttttcagccatcctcagctattaattcgacttagaaatgagaggtttccggttgtgttatttaaatccttcccagttgagaagcgcccatctcaagaatgaaaaggaaacctttttgcttagctctttccactctatgttttataaacacaataaattatagtgataatagaaaattcagtttgagataaagtagtagtcaatttatgaatgcaaagaatatttggatgtttataaggaaattataatagttttctaaactcaaggaaatggggcccagagcattgacccaaattgtattgcataatggggagagctacttttggaaggaagatgatgtgaagtatgtgactatcacttttatttcaccagttatgttcctatggtactcccactttctaaaggaaggcatgaggaataggacaaggcatctgacaagtaaatctacaaaaatcccataagtgactttgagacgtcactgagttcattcataccggtgttcaggacgttttaaactagctcagtcatctatttttaaagatgtccaaaacaaagaacctttacaaatttcctacatactagataaaattgagcaaaatttatcatggagaattatgagagtggctaagtatgggaatgaaacaactgcatttattgtgataaattaaggcattggattactggtaaaacaaaaggaattctgaaaagatttgtagtaaatgttaaatggcagcataaacattcccaaacatacatactatgtcttcaatgttttatgtacttttgaaaaatcaggcacttgaaaataactatgaagttatattccgagaacctgacactcgctggaaattcaacgttcaagagttagcaaggtacttctttgtttttctagttcctcattatgtatcctgctattttcaggtatttcagaccgaacaaaagaatcttttcaggctggaaatggacatggtagttttcaggccagaaatgaagaaacattcatggtgtctcaagagaaaaaatccaccgaatgaaagaacggtatgaacacgatgttacttttcacagtgtgcttcatgcagaaaagccaagcagaatgaacagaaaccaggacaggaataatgcattgccttccaacaatgccagatactggaattcctacacagagtttccaaaccggagggcccacggtggatttacaaatgagagctcctatcacagaaggggcggttgtcaccatggatattagaggcctatcttacagccaggcagaattttcctaagtcagtttctacttcagtttttgttattttttgttgcattttagtcagagctccaattccagtgtaaatagctgaactcaaaagtttctgagcaaagtcattatattcactttcttcaccaaaatttgttaaagtgcttctatatgcatggtctgatgctgggaattctgcagatttgagtaaacagtctctttctctagggtaagaatttgaaaccaaaacttgagaacacacccaagaatatatttacataggttcatagatgaaataaagtgtttatattatatataagcttcagtaccatttgctctgaagtgatctatttattttttcaggaaattcatctccatcggtaaagttgggaaggtggagagaagtggtgggggggcattgctacttatcaaagtgccattgctactttgataatctatgtatctaaaaatgtgagatgtgcgactcttatgatactgattttcctttaatgttaatatgccagaaagcatacatctaagggaacattgtccttcaaagtagacactttgggaagttatttctttattttaatgatgtatcattgttaaaaatgctgtcaaatccttaatagctacaggagctactgagggaaatcagtgtcattatttaaagtcacgccttgtgtttttactactttattcagcaggattaaacctgaataacttttggctgttgtgctaatagtgtaaataaaataagcctgccttcataaaacactaacttttaaaaggaataaacgacttctaaaattatgcctattaacatgtgtaattagtcggcagctcaaatgtttgggagtgcaagaaattaggcaccccaggatataggtcatacagggatatataaaagccatgctcattacaaaatgagcagttgatgttttatgtggcattaagacaatcaagtcctcacaactctggaatgtcttcttatactgatgctgaatttatgaatccaaattaatttccaacaggttggaatcagatttaatgtgagatcatgatagacaagaccacagaggacgtatgctctatttcttgttggccaacagcttctttctaatgttctgtgaaaaattattttaagtgtcttatataatggtgcttttatggttattaaaaattgtaaatggtatcacatttatatggatttgtcattggatctttttttggttcaacaataaaaaaatttaattacctaaatgcc

SEQ ID NO: 9549 - protein, 95 aa, Homo sapiens; identical to SEQ ID NO: 9531

SEQ ID NO: 9550 - DNA, 2115 bp, Homo sapiens
atgctcagaatggagcagtggacaaaggagacaaaaatccctgccttcatggaacatgtattctatcagagaaaaaaaattctcaaggaaaaaaggcaattttagcatctgctctgctctgttctctcaaaaaataagcaaaggatttcacagtgttctaggtacttgggaatcatcagtgaacaaaacaaagatcctgcccttgtggaccttatgtgccagaggctcctgaccaccataaagatagaactggggcttaaccctcatcacttctgaagctgatggaatgacaattgcagcatgactttcccagggccctgattttcagcacggatgattttttcttcagggaagatggtgcctatgagttcaatcctgacttcctggaggaagctcatgaatggaaccaaaaaagagcaagaaaagcaatgaggaatggcatatcccccattattattgataataccaacctccacgcctgggaaatgaagccctatgcagtcatggcacttgaaaataactatgaagttatattccgagaacctgacactcgctggaaattcaacgttcaagagttagcaagaagaaacattcatggtgtctcaagagaaaaaatccaccgaatgaaagaacggtatgaacacgatgttacttttcacagtgtgcttcatgcagaaaagccaagcagaatgaacagaaaccaggacaggaataatgcattgccttccaacaatgccagatactggaattcctacacagagtttccaaaccggagggcccacggtggatttacaaatgagagctcctatcacagaaggggcggttgtcaccatggatattagaggcctatcttacagccaggcagaattttcctaagtcagtttctacttcagtttttgttattttttgttgcattttagtcagagctccaattccagtgtaaatagctgaactcaaaagtttctgagcaaagtcattatattcactttcttcaccaaaatttgttaaagtgcttctatatgcatggtctgatgctgggaattctgcagatttgagtaaacagtctctttctctagggtaagaatttgaaaccaaaacttgagaacacacccaagaatatatttacataggttcatagatgaaataaagtgtttatattatatataagcttcagtaccatttgctctgaagtgatctatttattttttcaggaaattcatctccatcggtaaagttgggaaggtggagagaagtggtgggggggcattgctacttatcaaagtgccattgctactttgataatctatgtatctaaaaatgtgagatgtgcgactcttatgatactgattttcctttaatgttaatatgccagaaagcatacatctaagggaacattgtccttcaaagtagacactttgggaagttatttctttattttaatgatgtatcattgttaaaaatgctgtcaaatccttaatagctacaggagctactgagggaaatcagtgtcattatttaaagtcacgccttgtgtttttactactttattcagcaggattaaacctgaataacttttggctgttgtgctaatagtgtaaataaaataagcctgccttcataaaacactaacttttaaaaggaataaacgacttctaaaattatgcctattaacatgtgtaattagtcggcagctcaaatgtttgggagtgcaagaaattaggcaccccaggatataggtcatacagggatatataaaagccatgctcattacaaaatgagcagttgatgttttatgtggcattaagacaatcaagtcctcacaactctggaatgtcttcttatactgatgctgaatttatgaatccaaattaatttccaacaggttggaatcagatttaatgtgagatcatgatagacaagaccacagaggacgtatgctctatttcttgttggccaacagcttctttctaatgttctgtgaaaaattattttaagtgtcttatataatggtgcttttatggttattaaaaattgtaaatggtatcacatttatatggatttgtcattggatctttttttggttcaacaataaaaaaatttaattacctaaatgcc

SEQ ID NO: 9551 - protein, 137 aa, Homo sapiens; identical to SEQ ID NO: 9537

SEQ ID NO: 9552 - DNA, 2124 bp, Homo sapiens
tcccagcgcccgcccctctatccatcacatggccggagagtcacaaaaacaacagctttggccaagaccgtgacttcagtaaagggaacccggggctctcgcagccagccctcctgcccatggaggacagtttccttcaatcttttgggaggctgagcctccagccccagcagcagcagcagcggcagcggccgccccggccgcccccgcgggggacacctcctcgccgccacagctttaggaaacacctctacctcctgcgaggcctcccgggctccgggaaaactacactggccagacaattgcagcatgactttcccagggccctgattttcagcacggatgattttttcttcagggaagatggtgcctatgagttcaatcctgacttcctggaggaagctcatgaatggaaccaaaaaagagcaagaaaagcaatgaggaatggcatatcccccattattattgataataccaacctccacgcctgggaaatgaagccctatgcagtcatggcacttgaaaataactatgaagttatattccgagaacctgacactcgctggaaattcaacgttcaagagttagcaagaagaaacattcatggtgtctcaagagaaaaaatccaccgaatgaaagaacggtatgaacacgatgttacttttcacagtgtgcttcatgcagaaaagccaagcagaatgaacagaaaccaggacaggaataatgcattgccttccaacaatgccagatactggaattcctacacagagtttccaaaccggagggcccacggtggatttacaaatgagagctcctatcacagaaggggcggttgtcaccatggatattagaggcctatcttacagccaggcagaattttcctaagtcagtttctacttcagtttttgttattttttgttgcattttagtcagagctccaattccagtgtaaatagctgaactcaaaagtttctgagcaaagtcattatattcactttcttcaccaaaatttgttaaagtgcttctatatgcatggtctgatgctgggaattctgcagatttgagtaaacagtctctttctctagggtaagaatttgaaaccaaaacttgagaacacacccaagaatatatttacataggttcatagatgaaataaagtgtttatattatatataagcttcagtaccatttgctctgaagtgatctatttattttttcaggaaattcatctccatcggtaaagttgggaaggtggagagaagtggtgggggggcattgctacttatcaaagtgccattgctactttgataatctatgtatctaaaaatgtgagatgtgcgactcttatgatactgattttcctttaatgttaatatgccagaaagcatacatctaagggaacattgtccttcaaagtagacactttgggaagttatttctttattttaatgatgtatcattgttaaaaatgctgtcaaatccttaatagctacaggagctactgagggaaatcagtgtcattatttaaagtcacgccttgtgtttttactactttattcagcaggattaaacctgaataacttttggctgttgtgctaatagtgtaaataaaataagcctgccttcataaaacactaacttttaaaaggaataaacgacttctaaaattatgcctattaacatgtgtaattagtcggcagctcaaatgtttgggagtgcaagaaattaggcaccccaggatataggtcatacagggatatataaaagccatgctcattacaaaatgagcagttgatgttttatgtggcattaagacaatcaagtcctcacaactctggaatgtcttcttatactgatgctgaatttatgaatccaaattaatttccaacaggttggaatcagatttaatgtgagatcatgatagacaagaccacagaggacgtatgctctatttcttgttggccaacagcttctttctaatgttctgtgaaaaattattttaagtgtcttatataatggtgcttttatggttattaaaaattgtaaatggtatcacatttatatggatttgtcattggatctttttttggttcaacaataaaaaaatttaattacctaaatgcc

SEQ ID NO: 9553 - protein, 243 aa, Homo sapiens; identical to SEQ ID NO: 1391

SEQ ID NO: 9554 - DNA, 2116 bp, Homo sapiens
tcccagcgcccgcccctctatccatcacatggccggagagtcacaaaaacaacagctttggccaagaccgtgacttcagtaaagggaacccggggctctcgcagccagccctcctgcccatggaggacagtttccttcaatcttttgggaggctgagcctccagccccagcagcagcagcagcggcagcggccgccccggccgcccccgcgggggacacctcctcgccgccacagctttaggaaacacctctacctcctgcgaggcctcccgggctccgggaaaactacactggccagacaattgcagcatgactttcccagggccctgattttcagcacggatgattttttcttcagggaagatggtgcctatgagttcaatcctgacttcctggaggaagctcatgaatggaaccaaaaaagagcaagaaaagcaatgaggaatggcatatcccccattattattgataataccaacctccacgcctgggaaatgaagccctatgcagtcatggtatttcagaccgaacaaaagaatcttttcaggctggaaatggacatggtagttttcaggccagaaatgaagaaacattcatggtgtctcaagagaaaaaatccaccgaatgaaagaacggtatgaacacgatgttacttttcacagtgtgcttcatgcagaaaagccaagcagaatgaacagaaaccaggacaggaataatgcattgccttccaacaatgccagatactggaattcctacacagagtttccaaaccggagggcccacggtggatttacaaatgagagctcctatcacagaaggggcggttgtcaccatggatattagaggcctatcttacagccaggcagaattttcctaagtcagtttctacttcagtttttgttattttttgttgcattttagtcagagctccaattccagtgtaaatagctgaactcaaaagtttctgagcaaagtcattatattcactttcttcaccaaaatttgttaaagtgcttctatatgcatggtctgatgctgggaattctgcagatttgagtaaacagtctctttctctagggtaagaatttgaaaccaaaacttgagaacacacccaagaatatatttacataggttcatagatgaaataaagtgtttatattatatataagcttcagtaccatttgctctgaagtgatctatttattttttcaggaaattcatctccatcggtaaagttgggaaggtggagagaagtggtgggggggcattgctacttatcaaagtgccattgctactttgataatctatgtatctaaaaatgtgagatgtgcgactcttatgatactgattttcctttaatgttaatatgccagaaagcatacatctaagggaacattgtccttcaaagtagacactttgggaagttatttctttattttaatgatgtatcattgttaaaaatgctgtcaaatccttaatagctacaggagctactgagggaaatcagtgtcattatttaaagtcacgccttgtgtttttactactttattcagcaggattaaacctgaataacttttggctgttgtgctaatagtgtaaataaaataagcctgccttcataaaacactaacttttaaaaggaataaacgacttctaaaattatgcctattaacatgtgtaattagtcggcagctcaaatgtttgggagtgcaagaaattaggcaccccaggatataggtcatacagggatatataaaagccatgctcattacaaaatgagcagttgatgttttatgtggcattaagacaatcaagtcctcacaactctggaatgtcttcttatactgatgctgaatttatgaatccaaattaatttccaacaggttggaatcagatttaatgtgagatcatgatagacaagaccacagaggacgtatgctctatttcttgttggccaacagcttctttctaatgttctgtgaaaaattattttaagtgtcttatataatggtgcttttatggttattaaaaattgtaaatggtatcacatttatatggatttgtcattggatctttttttggttcaacaataaaaaaatttaattacctaaatgcc

SEQ ID NO: 9555 - protein, 173 aa, Homo sapiens; identical to SEQ ID NO: 9539

SEQ ID NO: 9556 - DNA, 2509 bp, Homo sapiens
gccaccgcgcccggcctcattttactttttatcttctggatatgtataatctttttcagccatcctcagctattaattcgacttagaaatgagaggtttccggttgtgttatttaaatccttcccagttgagaagcgcccatctcaagaatgaaaaggaaacctttttgcttagctctttccactctatgttttataaacacaataaattatagtgataatagaaaattcagtttgagataaagtagtagtcaatttatgaatgcaaagaatatttggatgtttataaggaaattataatagttttctaaactcaaggaaatggggcccagagcattgacccaaattgtattgcataatggggagagctacttttggaaggaagatgatgtgaagtatgtgactatcacttttatttcaccagttatgttcctatggtactcccactttctaaaggaaggcatgaggaataggacaaggcatctgacaagtaaatctacaaaaatcccataagtgactttgagacgtcactgagttcattcataccggtgttcaggacgttttaaactagctcagtcatctatttttaaagatgtccaaaacaaagaacctttacaaatttcctacatactagataaaattgagcaaaatttatcatggagaattatgagagtggctaagtatgggaatgaaacaactgcatttattgtgataaattaaggcattggattactggtaaaacaaaaggaattctgaaaagatttgtagtaaatgttaaatggcagcataaacattcccaaacatacatactatgtcttcaatgttttatgtacttttgaaaaatcaggcacttgaaaataactatgaagttatattccgagaacctgacactcgctggaaattcaacgttcaagagttagcaaggtacttctttgtttttctagttcctcattatgtatcctgctattttcaggtatttcagaccgaacaaaagaatcttttcaggctggaaatggacatggtagttttcaggccagaaatgaagaaacattcatggtgtctcaagagaaaaaatccaccgaatgaaagaacggtatgaacacgatgttacttttcacagtgtgcttcatgcagaaaagccaagcagaatgaacagaaaccaggacaggaataatgcattgccttccaacaatgccagatactggaattcctacacagagtttccaaaccggagggcccacggtggatttacaaatgagagctcctatcacagaaggggcggttgtcaccatggatattagaggcctatcttacagccaggcagaattttcctaagtcagtttctacttcagtttttgttattttttgttgcattttagtcagagctccaattccagtgtaaatagctgaactcaaaagtttctgagcaaagtcattatattcactttcttcaccaaaatttgttaaagtgcttctatatgcatggtctgatgctgggaattctgcagatttgagtaaacagtctctttctctagggtaagaatttgaaaccaaaacttgagaacacacccaagaatatatttacataggttcatagatgaaataaagtgtttatattatatataagcttcagtaccatttgctctgaagtgatctatttattttttcaggaaattcatctccatcggtaaagttgggaaggtggagagaagtggtgggggggcattgctacttatcaaagtgccattgctactttgataatctatgtatctaaaaatgtgagatgtgcgactcttatgatactgattttcctttaatgttaatatgccagaaagcatacatctaagggaacattgtccttcaaagtagacactttgggaagttatttctttattttaatgatgtatcattgttaaaaatgctgtcaaatccttaatagctacaggagctactgagggaaatcagtgtcattatttaaagtcacgccttgtgtttttactactttattcagcaggattaaacctgaataacttttggctgttgtgctaatagtgtaaataaaataagcctgccttcataaaacactaacttttaaaaggaataaacgacttctaaaattatgcctattaacatgtgtaattagtcggcagctcaaatgtttgggagtgcaagaaattaggcaccccaggatataggtcatacagggatatataaaagccatgctcattacaaaatgagcagttgatgttttatgtggcattaagacaatcaagtcctcacaactctggaatgtcttcttatactgatgctgaatttatgaatccaaattaatttccaacaggttggaatcagatttaatgtgagatcatgatagacaagaccacagaggacgtatgctctatttcttgttggccaacagcttctttctaatgttctgtgaaaaattattttaagtgtcttatataatggtgcttttatggttattaaaaattgtaaatggtatcacattt

SEQ ID NO: 9557 - protein, 95 aa, Homo sapiens; identical to SEQ ID NO: 9531

SEQ ID NO: 9558 - DNA, 3675 bp, Homo sapiens
cagatttaggattaacactgtaaccttattgagatggtagaatgcaaatataaataaaaacaactcagctctcattgtcagaatagcaaagaacagtacgatgcctgtaacagtgtgcacattatcctttaattgtgaagtctatttggtcttttttcatacatattccatctcttgtgatcattttactttttatcttctggatatgtataatctttttcagccatcctcagctattaattcgacttagaaatgagaggtttccggttgtgttatttaaatccttcccagttgagaagcgcccatctcaagaatgaaaaggaaacctttttgcttagctctttccactctatgttttataaacacaataaattatagtgataatagaaaattcagtttgagataaagtagtagtcaatttatgaatgcaaagaatatttggatgtttataaggaaattataatagttttctaaactcaaggaaatggggcccagagcattgacccaaattgtattgcataatggggagagctacttttggaaggaagatgatgtgaagtatgtgactatcacttttatttcaccagttatgttcctatggtactcccactttctaaaggaaggcatgaggaataggacaaggcatctgacaagtaaatctacaaaaatcccataagtgactttgagacgtcactgagttcattcataccggtgttcaggacgttttaaactagctcagtcatctatttttaaagatgtccaaaacaaagaacctttacaaatttcctacatactagataaaattgagcaaaatttatcatggagaattatgagagtggctaagtatgggaatgaaacaactgcatttattgtgataaattaaggcattggattactggtaaaacaaaaggaattctgaaaagatttgtagtaaatgttaaatggcagcataaacattcccaaacatacatactatgtcttcaatgttttatgtacttttgaaaaatcaggcacttgaaaataactatgaagttatattccgagaacctgacactcgctggaaattcaacgttcaagagttagcaaggtacttctttgtttttctagttcctcattatgtatcctgctattttcaggtatttcagaccgaacaaaagaatcttttcaggctggaaatggacatggtagttttcaggccagaaatggtaattcttggaaattgataactttggaattattaatgtgaagactttagttttgggtcagttttctaatataatgctaaatgctaaatcttggcttggacttggtcctttaaaaggatgcatttaacattctgctaaaatgcttcttcatcaaggaacatttaaaagcactttatctgcatgggactgcacatgtcaatggtgtttttgcatttaggctaaagatctttagaggttgagcagtctgcgattcatttatgatctagatgctgcttctaatttataaagcaataaatgttcaaataatactaacttgttgattgaatgcatgggttcagatattctctgtctgtattatttgataatgtcattgacttaaaatagccagtgaggtaagaatttacttcttaggagtaaggctggttcctcttatggtaataggcagatagtgtcttcaaagtggatctgtggactactccatcagaattgcctcaggtggctattaaaatccgagttcatggaccccattcagtagttggaatctctggtaattatatttctaactatatccccagttgattcttctgcccactagaatttaagattgttttaataagtatctcctagaaatatatctcagggactgattaacataagtagatagatatatgcatgacattaacaggcaaatgtatgattttttaaaaatctcatggtgttcttttatgtcttgaagcacgtaattgagaggaccagaaacaaagcatttctgaagctttagctccttgctagcctcagggtggtttgggggtgtgcagggcagcatgaaaaacatgagtggaggctgaaagagaactgctgaacaagatgtttgttatgcttttgccagagctaggtcctgagaacagggactgcaatatctgcaatactagaggacttgtaaaatataagtaactcattgtggtatcctgccttaactaaatgcattttttttccatgtagaagaaacattcatggtgtctcaagagaaaaaatccaccgaatgaaagaacggtatgaacacgatgttacttttcacagtgtgcttcatgcagaaaagccaagcagaatgaacagaaaccaggacaggaataatgcattgccttccaacaatgccagatactggaattcctacacagagtttccaaaccggagggcccacggtggatttacaaatgagagctcctatcacagaaggggcggttgtcaccatggatattagaggcctatcttacagccaggcagaattttcctaagtcagtttctacttcagtttttgttattttttgttgcattttagtcagagctccaattccagtgtaaatagctgaactcaaaagtttctgagcaaagtcattatattcactttcttcaccaaaatttgttaaagtgcttctatatgcatggtctgatgctgggaattctgcagatttgagtaaacagtctctttctctagggtaagaatttgaaaccaaaacttgagaacacacccaagaatatatttacataggttcatagatgaaataaagtgtttatattatatataagcttcagtaccatttgctctgaagtgatctatttattttttcaggaaattcatctccatcggtaaagttgggaaggtggagagaagtggtgggggggcattgctacttatcaaagtgccattgctactttgataatctatgtatctaaaaatgtgagatgtgcgactcttatgatactgattttcctttaatgttaatatgccagaaagcatacatctaagggaacattgtccttcaaagtagacactttgggaagttatttctttattttaatgatgtatcattgttaaaaatgctgtcaaatccttaatagctacaggagctactgagggaaatcagtgtcattatttaaagtcacgccttgtgtttttactactttattcagcaggattaaacctgaataacttttggctgttgtgctaatagtgtaaataaaataagcctgccttcataaaacactaacttttaaaaggaataaacgacttctaaaattatgcctattaacatgtgtaattagtcggcagctcaaatgtttgggagtgcaagaaattaggcaccccaggatataggtcatacagggatatataaaagccatgctcattacaaaatgagcagttgatgttttatgtggcattaagacaatcaagtcctcacaactctggaatgtcttcttatactgatgctgaatttatgaatccaaattaatttccaacaggttggaatcagatttaatgtgagatcatgatagacaagaccacagaggacgtatgctctatttcttgttggccaacagcttctttctaatgttctgtgaaaaattattttaagtgtcttatataatggtgcttttatggttattaaaaattgtaaatggtatcacattt

SEQ ID NO: 9559 - protein, 49 aa, Homo sapiens; identical to SEQ ID NO: 9533

SEQ ID NO: 9560 - DNA, 3908 bp, Homo sapiens
tcatatttgctaacagtggttctcccagggagaaggtaacgaggttttattttagtgtttctctgctgttcaatggctgaagtttgctgagatgctaatctcacttgaggatacaatttaaaaatagtccttggcaaatggtctttggtgtgaatccttgataacttttctgtcttaattactttcctacggcaaggcatacagagaagcacccaccgaaatgttcagatcaatactaatactgaattagatggcgctcgtagtggagctacaggtcacaacaggacggttctgcctctggtgagccgggaatttccacactgtgtgctgttgctccctgggagttccagggcaacagaatattttagtctaaagacagatttagggccaggtgtgagccaccgcgcccggcctcattttactttttatcttctggatatgtataatctttttcagccatcctcagctattaattcgacttagaaatgagaggtttccggttgtgttatttaaatccttcccagttgagaagcgcccatctcaagaatgaaaaggaaacctttttgcttagctctttccactctatgttttataaacacaataaattatagtgataatagaaaattcagtttgagataaagtagtagtcaatttatgaatgcaaagaatatttggatgtttataaggaaattataatagttttctaaactcaaggaaatggggcccagagcattgacccaaattgtattgcataatggggagagctacttttggaaggaagatgatgtgaagtatgtgactatcacttttatttcaccagttatgttcctatggtactcccactttctaaaggaaggcatgaggaataggacaaggcatctgacaagtaaatctacaaaaatcccataagtgactttgagacgtcactgagttcattcataccggtgttcaggacgttttaaactagctcagtcatctatttttaaagatgtccaaaacaaagaacctttacaaatttcctacatactagataaaattgagcaaaatttatcatggagaattatgagagtggctaagtatgggaatgaaacaactgcatttattgtgataaattaaggcattggattactggtaaaacaaaaggaattctgaaaagatttgtagtaaatgttaaatggcagcataaacattcccaaacatacatactatgtcttcaatgttttatgtacttttgaaaaatcaggcacttgaaaataactatgaagttatattccgagaacctgacactcgctggaaattcaacgttcaagagttagcaaggtacttctttgtttttctagttcctcattatgtatcctgctattttcaggtatttcagaccgaacaaaagaatcttttcaggctggaaatggacatggtagttttcaggccagaaatggtaattcttggaaattgataactttggaattattaatgtgaagactttagttttgggtcagttttctaatataatgctaaatgctaaatcttggcttggacttggtcctttaaaaggatgcatttaacattctgctaaaatgcttcttcatcaaggaacatttaaaagcactttatctgcatgggactgcacatgtcaatggtgtttttgcatttaggctaaagatctttagaggttgagcagtctgcgattcatttatgatctagatgctgcttctaatttataaagcaataaatgttcaaataatactaacttgttgattgaatgcatgggttcagatattctctgtctgtattatttgataatgtcattgacttaaaatagccagtgaggtaagaatttacttcttaggagtaaggctggttcctcttatggtaataggcagatagtgtcttcaaagtggatctgtggactactccatcagaattgcctcaggtggctattaaaatccgagttcatggaccccattcagtagttggaatctctggtaattatatttctaactatatccccagttgattcttctgcccactagaatttaagattgttttaataagtatctcctagaaatatatctcagggactgattaacataagtagatagatatatgcatgacattaacaggcaaatgtatgattttttaaaaatctcatggtgttcttttatgtcttgaagcacgtaattgagaggaccagaaacaaagcatttctgaagctttagctccttgctagcctcagggtggtttgggggtgtgcagggcagcatgaaaaacatgagtggaggctgaaagagaactgctgaacaagatgtttgttatgcttttgccagagctaggtcctgagaacagggactgcaatatctgcaatactagaggacttgtaaaatataagtaactcattgtggtatcctgccttaactaaatgcattttttttccatgtagaagaaacattcatggtgtctcaagagaaaaaatccaccgaatgaaagaacggtatgaacacgatgttacttttcacagtgtgcttcatgcagaaaagccaagcagaatgaacagaaaccaggacaggaataatgcattgccttccaacaatgccagatactggaattcctacacagagtttccaaaccggagggcccacggtggatttacaaatgagagctcctatcacagaaggggcggttgtcaccatggatattagaggcctatcttacagccaggcagaattttcctaagtcagtttctacttcagtttttgttattttttgttgcattttagtcagagctccaattccagtgtaaatagctgaactcaaaagtttctgagcaaagtcattatattcactttcttcaccaaaatttgttaaagtgcttctatatgcatggtctgatgctgggaattctgcagatttgagtaaacagtctctttctctagggtaagaatttgaaaccaaaacttgagaacacacccaagaatatatttacataggttcatagatgaaataaagtgtttatattatatataagcttcagtaccatttgctctgaagtgatctatttattttttcaggaaattcatctccatcggtaaagttgggaaggtggagagaagtggtgggggggcattgctacttatcaaagtgccattgctactttgataatctatgtatctaaaaatgtgagatgtgcgactcttatgatactgattttcctttaatgttaatatgccagaaagcatacatctaagggaacattgtccttcaaagtagacactttgggaagttatttctttattttaatgatgtatcattgttaaaaatgctgtcaaatccttaatagctacaggagctactgagggaaatcagtgtcattatttaaagtcacgccttgtgtttttactactttattcagcaggattaaacctgaataacttttggctgttgtgctaatagtgtaaataaaataagcctgccttcataaaacactaacttttaaaaggaataaacgacttctaaaattatgcctattaacatgtgtaattagtcggcagctcaaatgtttgggagtgcaagaaattaggcaccccaggatataggtcatacagggatatataaaagccatgctcattacaaaatgagcagttgatgttttatgtggcattaagacaatcaagtcctcacaactctggaatgtcttcttatactgatgctgaatttatgaatccaaattaatttccaacaggttggaatcagatttaatgtgagatcatgatagacaagaccacagaggacgtatgctctatttcttgttggccaacagcttctttctaatgttctgtgaaaaattattttaagtgtcttatataatggtgcttttatggttattaaaaattgtaaatggtatcacattt

SEQ ID NO: 9561 - protein, 82 aa, Homo sapiens [sequence omitted]

SEQ ID NO: 9562 - DNA, 2060 bp, Homo sapiens
tcccagcgcccgcccctctatccatcacatggccggagagtcacaaaaacaacagctttggccaagaccgtgacttcagtaaagggaacccggggctctcgcagccagccctcctgcccatggaggacagtttccttcaatcttttgggaggctgagcctccagccccagcagcagcagcagcggcagcggccgccccggccgcccccgcgggggacacctcctcgccgccacagctttaggaaacacctctacctcctgcgaggcctcccgggctccgggaaaactacactggccagacaattgcagcatgactttcccagggccctgattttcagcacggatgattttttcttcagggaagatggtgcctatgagttcaatcctgacttcctggaggaagctcatgaatggaaccaaaaaagagcaagaaaagcaatgaggaatggcatatcccccattattattgataataccaacctccacgcctgggaaatgaagccctatgcagtcatggcacttgaaaataactatgaagttatattccgagaacctgacactcgctggaaattcaacgttcaagagttagcaagaagaaacattcatggtgtctcaagagaaaaaatccaccgaatgaaagaacggtatgaacacgatgttacttttcacagtgtgcttcatgcagaaaagccaagcagaatgaacagaaaccaggacaggaataatgcattgccttccaacaatgccagatactggaattcctacacagagtttccaaaccggagggcccacggtggatttacaaatgagagctcctatcacagaaggggcggttgtcaccatggatattagaggcctatcttacagccaggcagaattttcctaagtcagtttctacttcagtttttgttattttttgttgcattttagtcagagctccaattccagtgtaaatagctgaactcaaaagtttctgagcaaagtcattatattcactttcttcaccaaaatttgttaaagtgcttctatatgcatggtctgatgctgggaattctgcagatttgagtaaacagtctctttctctagggtaagaatttgaaaccaaaacttgagaacacacccaagaatatatttacataggttcatagatgaaataaagtgtttatattatatataagcttcagtaccatttgctctgaagtgatctatttattttttcaggaaattcatctccatcggtaaagttgggaaggtggagagaagtggtgggggggcattgctacttatcaaagtgccattgctactttgataatctatgtatctaaaaatgtgagatgtgcgactcttatgatactgattttcctttaatgttaatatgccagaaagcatacatctaagggaacattgtccttcaaagtagacactttgggaagttatttctttattttaatgatgtatcattgttaaaaatgctgtcaaatccttaatagctacaggagctactgagggaaatcagtgtcattatttaaagtcacgccttgtgtttttactactttattcagcaggattaaacctgaataacttttggctgttgtgctaatagtgtaaataaaataagcctgccttcataaaacactaacttttaaaaggaataaacgacttctaaaattatgcctattaacatgtgtaattagtcggcagctcaaatgtttgggagtgcaagaaattaggcaccccaggatataggtcatacagggatatataaaagccatgctcattacaaaatgagcagttgatgttttatgtggcattaagacaatcaagtcctcacaactctggaatgtcttcttatactgatgctgaatttatgaatccaaattaatttccaacaggttggaatcagatttaatgtgagatcatgatagacaagaccacagaggacgtatgctctatttcttgttggccaacagcttctttctaatgttctgtgaaaaattattttaagtgtcttatataatggtgcttttatggttattaaaaattgtaaatggtatcacattt

SEQ ID NO: 9563 - protein, 243 aa, Homo sapiens; identical to SEQ ID NO: 1391

SEQ ID NO: 9564 - DNA, 2052 bp, Homo sapiens
tcccagcgcccgcccctctatccatcacatggccggagagtcacaaaaacaacagctttggccaagaccgtgacttcagtaaagggaacccggggctctcgcagccagccctcctgcccatggaggacagtttccttcaatcttttgggaggctgagcctccagccccagcagcagcagcagcggcagcggccgccccggccgcccccgcgggggacacctcctcgccgccacagctttaggaaacacctctacctcctgcgaggcctcccgggctccgggaaaactacactggccagacaattgcagcatgactttcccagggccctgattttcagcacggatgattttttcttcagggaagatggtgcctatgagttcaatcctgacttcctggaggaagctcatgaatggaaccaaaaaagagcaagaaaagcaatgaggaatggcatatcccccattattattgataataccaacctccacgcctgggaaatgaagccctatgcagtcatggtatttcagaccgaacaaaagaatcttttcaggctggaaatggacatggtagttttcaggccagaaatgaagaaacattcatggtgtctcaagagaaaaaatccaccgaatgaaagaacggtatgaacacgatgttacttttcacagtgtgcttcatgcagaaaagccaagcagaatgaacagaaaccaggacaggaataatgcattgccttccaacaatgccagatactggaattcctacacagagtttccaaaccggagggcccacggtggatttacaaatgagagctcctatcacagaaggggcggttgtcaccatggatattagaggcctatcttacagccaggcagaattttcctaagtcagtttctacttcagtttttgttattttttgttgcattttagtcagagctccaattccagtgtaaatagctgaactcaaaagtttctgagcaaagtcattatattcactttcttcaccaaaatttgttaaagtgcttctatatgcatggtctgatgctgggaattctgcagatttgagtaaacagtctctttctctagggtaagaatttgaaaccaaaacttgagaacacacccaagaatatatttacataggttcatagatgaaataaagtgtttatattatatataagcttcagtaccatttgctctgaagtgatctatttattttttcaggaaattcatctccatcggtaaagttgggaaggtggagagaagtggtgggggggcattgctacttatcaaagtgccattgctactttgataatctatgtatctaaaaatgtgagatgtgcgactcttatgatactgattttcctttaatgttaatatgccagaaagcatacatctaagggaacattgtccttcaaagtagacactttgggaagttatttctttattttaatgatgtatcattgttaaaaatgctgtcaaatccttaatagctacaggagctactgagggaaatcagtgtcattatttaaagtcacgccttgtgtttttactactttattcagcaggattaaacctgaataacttttggctgttgtgctaatagtgtaaataaaataagcctgccttcataaaacactaacttttaaaaggaataaacgacttctaaaattatgcctattaacatgtgtaattagtcggcagctcaaatgtttgggagtgcaagaaattaggcaccccaggatataggtcatacagggatatataaaagccatgctcattacaaaatgagcagttgatgttttatgtggcattaagacaatcaagtcctcacaactctggaatgtcttcttatactgatgctgaatttatgaatccaaattaatttccaacaggttggaatcagatttaatgtgagatcatgatagacaagaccacagaggacgtatgctctatttcttgttggccaacagcttctttctaatgttctgtgaaaaattattttaagtgtcttatataatggtgcttttatggttattaaaaattgtaaatggtatcacattt

SEQ ID NO: 9565 - protein, 173 aa, Homo sapiens; identical to SEQ ID NO: 9539

SEQ ID NO: 9566 - DNA, 568 bp, Homo sapiens
cagtctcctgacctgatgtgcatcagaatcactgggagaacaaacaaacaaaaatgaatccaaaacaagcaacgaacagacagattctcaagtcttgccaagtccaaagattgatttggtggagaaattgtactttgaaagctgcccagtgatgggatcctaggaaagccatttcatctctccaggccttgcattctcatttctacaatgaagatgtgggctgtgtggcttctaaagccccctgaagtttgagcattttgtgattcaacacaaacacgaagcagtaactgcggtgttgggcttgtggtgcagtttactgccttcagagagttttcaggatgtgacataggaaggaagaacccaggaggggactggtgggtttcctgagttgagaagacagactgctgaaatgtttccaggcagaccatggcagctagagttcagagggcagagcacaagagacgagattgctgcatagaaagagaactccagagatctgcagagggtcctgcttgaggattcaggcaattcatttctaatggcagcttatctactgaatagattttca

SEQ ID NO: 9567 - protein, 32 aa, Homo sapiens
MNPKQATNRQILKSCQVQRLIWWRNCTLKAAQ

SEQ ID NO: 9568 - DNA, 3551 bp, Homo sapiens
tcgagctcttccagccgcccgatgcccacccgaacctccctccgatccagacaccttactcagtccccgggaccagcgttccgctgttcccaactacgggtgcccagacgatccaatccgcgttcgaaatcgcctcctctcccctccccctacaggggcggtactcccggctccaaagaggtggggtcggtataaaggggttgaggtcaccgggaaggggtaaaagcgcgacgggacctgagctgaaggacgggatctcaagcctcaagtccctgcgccatcccgccgtctctgtgtcctcccctggggcccaaaacctccatcctccttctaggctcgctggctcaaggccaaggagctcagcgcgccgcctccgcccggaacgcaaacagctgttcccagagacgtctccgctctcaactttgccaactactccgcacgcactttgaccagcggagcaaccgggacctgtgggtcggggtcctctggcggagttaaaaaaaaaagaggtgaaactgcgggaccggcgctgcgagtcgctaggcttcgcctcaaactttgctgttgcagcggagcggccccgcccctcctctcccctacgacgcccacgcgctcggatggggcttgttccctagctcgggagcgtgtgggcagcagcagcggcggcggcggcggcggcggcggcggcggcagcagcagcttcagtagcgcagaggcggcggtggcgagaggtgcggcgaaggaggcagaggcacttatgcttgtcaggccaagaagcttgagagaagaaaaatttcagaaaaattgtctcaatttgactagaatatcaatgaaccaggaaaaaggaagaaaaactaaaccaccacgaccagattccccagccactacgccaaatatatctgtgaagaagaaaaacaaagatggaaagggaaacacaatttatctttgggagtttttactggcactgctccaggacaaggctacttgtcctaaatacatcaagtggacccagcgagagaaaggcatttttaaattggtggattctaaagcagtgtccaggttgtgggggaagcacaaaaacaaacctgatatgaattatgagaccatgggaagagcactcaggtactattaccaaaggggtattctggcaaaagtggaaggtcagcgcttggtgtatcagtttaaagaaatgccaaaagatcttatatatataaatgatgaggatccaagttccagcatagagtcttcagatccatcgctatcttcatcagccacttcaaataggaatcaaaccagccggtcgagagtatcttcaagtccaggggtaaaaggaggagccactacagttctaaaaccagggaattctaaagctgcaaaacccaaagatcctgtggaagttgcacaaccatcagaagttttgaggacagtgcagcccacgcagtctccatatcctacccagctcttccggactgttcatgtagtacagccagtacaggctgtcccagagggagaagcagctagaaccagtaccatgcaggatgaaacattaaattcttccgttcagagtattaggactatacaggctccaacccaagttccagtggttgtgtctcctaggaatcagcagttgcatacagtaacactccaaacagtgccactcacaacagttatagccagcacagatccatcagcaggtactggatctcagaagtttattttacaagccattccatcatcacagcccatgacagtactgaaagaaaatgtcatgctgcagtcacaaaaggcgggctctcctccttcaattgtcttgggccctgcccaggttcagcaggtccttactagcaatgttcagaccatttgcaatggaaccgtcagtgtggcttcctctccatccttcagtgctactgcacctgtggtgaccttttctcctcgcagttcacagctggttgctcacccacctggcactgtaatcacttcagttatcaaaactcaagaaacaaaaactcttacacaggaagtagagaaaaaggaatctgaagatcatttgaaagagaacactgagaaaacggagcagcagccacagccttatgtgatggtagtgtccagttccaatggatttacttctcaggtagctatgaaacaaaacgaactgctggaacccaactctttttagttaatataccaaagcttatgaataattgtttgttaattgaacattttcaattatatgcagactgactgattctaagataaattctaaggaggtttctaattttgtaattgttaaaaatagagttaattttgactttgttagatgagggaggaaaactcaactgtttctctttgttatctaaatgtttcagaattcaatcgtgaaggaacaggcattttacactatgaagacattcttttgagatttttatttcagttgctatatcataagcatttttaaagtttcttttctaattttacattgtattagattttctgattcttttgtaaatacagaacttaaatagaaggcaacaggaaatttatataggaactattttcattccacttgtgtaagttaagtcttgactctttcaaatgcaaaaaacctattttatgctttgttaaaattatggtgtcacttagattgactttagttgactgcactatataatatagaactatgaatatgtagaataacatgaaaaattggaggtgctggtggtatggctgaccctgtttcagaagcaggatagtataaaagcatcagcctaagaatgatacctatattttcaagttatgtcaattaaatcattatcaggttatttcctaatgtaagaatagctaaaatgttgcagagaaataagtgacccaacaaaatttattcatctgttatgggtaagatctgccataaattcttcctaaataatttgtttactaactctttaggccactgtgctttgcggtccattagtaaacttgtgttgctaagtgctaaacagaatactgctattttgagagagtcaagactctttcttaagggccaagaaagcaacttgagccttgggctaatctggctgagtagtcagttataaaagcataattgctttatattttggatcattttttactgggggcggacttggggggggttgcatacaaagataacatatatatccaactttctgaaatgaaatgtttttagattactttttcaactgtaaataatgtacatttaatgtcacaagaaaaaaatgtcttctgcaaattttctagtataacagaaatttttgtagatgaaaaaaatcattatgtttagaggtctaatgctatgttttcatattacagagtgaatttgtatttaaacaaaaatttaaattttggaatcctctaaacatttttgtatctttaattggtttattattaaataaatcatataaaaattctcagtgtctgttttcaggcaaaagtttcttaaagaataagtgtgcagagaatattactagaacatcagcattacttaatgtttataaataaatttcattagtcagaattgc

SEQ ID NO: 9569 - protein, 472 aa, Homo sapiens
MLVRPRSLREEKFQKNCLNLTRISMNQEKGRKTKPPRPDSPATTPNISVKKKNKDGKGNTIYLWEFLLALLQDKATCPKYIKWTQREKGIFKLVDSKAVSRLWGKHKNKPDMNYETMGRALRYYYQRGILAKVEGQRLVYQFKEMPKDLIYINDEDPSSSIESSDPSLSSSATSNRNQTSRSRVSSSPGVKGGATTVLKPGNSKAAKPKDPVEVAQPSEVLRTVQPTQSPYPTQLFRTVHVVQPVQAVPEGEAARTSTMQDETLNSSVQSIRTIQAPTQVPVVVSPRNQQLHTVTLQTVPLTTVIASTDPSAGTGSQKFILQAIPSSQPMTVLKENVMLQSQKAGSPPSIVLGPAQVQQVLTSNVQTICNGTVSVASSPSFSATAPVVTFSPRSSQLVAHPPGTVITSVIKTQETKTLTQEVEKKESEDHLKENTEKTEQQPQPYVMVVSSSNGFTSQVAMKQNELLEPNSF

SEQ ID NO: 9570 - DNA, 3527 bp, Homo sapiens
agtgcattaaaaaagaagccactgaagacaggcttaagcatggccaagaagcttgagagaagaaaaatttcagaaaaattgtctcaatttgactagaatatcaatgaaccaggaaaactgaagcaccttccctaaagaaaacttgggtatacaattactccacagacagagctgagggttttttacccaaatcagtcactggattttgctgcctgatacgtgaatcttcttggaatttttctcatgtggatctaaggggaatgctttattatggctgctgttgtccaacagaacgacctagtatttgaatttgctagtaacgtcatggaggatgaacgacagcttggtgatccagctatttttcctgccgtaattgtggaacatgttcctggtgctgatattctcaatagttatgccggtctagcctgtgtggaagagcccaatgacatgattactgagagttcactggatgttgctgaagaagaaatcatagacgatgatgatgatgacatcacccttacagttgaagcttcttgtcatgacggggatgaaacaattgaaactattgaggctgctgaggcactcctcaatatggattcccctggccctatgctggatgaaaaacgaataaataataatatatttagttcacctgaagatgacatggttgttgccccagtcacccatgtgtccgtcacattagatgggattcctgaagtgatggaaacacagcaggtgcaagaaaaatatgcagactcaccgggagcctcatcaccagaacagcctaagaggaaaaaaggaagaaaaactaaaccaccacgaccagattccccagccactacgccaaatatatctgtgaagaagaaaaacaaagatggaaagggaaacacaatttatctttgggagtttttactggcactgctccaggacaaggctacttgtcctaaatacatcaagtggacccagcgagagaaaggcatttttaaattggtggattctaaagcagtgtccaggttgtgggggaagcacaaaaacaaacctgatatgaattatgagaccatgggaagagcactcaggtactattaccaaaggggtattctggcaaaagtggaaggtcagcgcttggtgtatcagtttaaagaaatgccaaaagatcttatatatataaatgatgaggatccaagttccagcatagagtcttcagatccatcgctatcttcatcagccacttcaaataggaatcaaaccagccggtcgagagtatcttcaagtccaggggtaaaaggaggagccactacagttctaaaaccagggaattctaaagctgcaaaacccaaagatcctgtggaagttgcacaaccatcagaagttttgaggacagtgcagcccacgcagtctccatatcctacccagctcttccggactgttcatgtagtacagccagtacaggctgtcccagagggagaagcagctagaaccagtaccatgcaggatgaaacattaaattcttccgttcagagtattaggactatacaggctccaacccaagttccagtggttgtgtctcctaggaatcagcagttgcatacagtaacactccaaacagtgccactcacaacagttatagccagcacagatccatcagcaggtactggatctcagaagtttattttacaagccattccatcatcacagcccatgacagtactgaaagaaaatgtcatgctgcagtcacaaaaggcgggctctcctccttcaattgtcttgggccctgcccaggttcagcaggtccttactagcaatgttcagaccatttgcaatggaaccgtcagtgtggcttcctctccatccttcagtgctactgcacctgtggtgaccttttctcctcgcagttcacagctggttgctcacccacctggcactgtaatcacttcagttatcaaaactcaagaaacaaaaactcttacacaggaagtagagaaaaaggaatctgaagatcatttgaaagagaacactgagaaaacggagcagcagccacagccttatgtgatggtagtgtccagttccaatggatttacttctcaggtagctatgaaacaaaacgaactgctggaacccaactctttttagttaatataccaaagcttatgaataattgtttgttaattgaacattttcaattatatgcagactgactgattctaagataaattctaaggaggtttctaattttgtaattgttaaaaatagagttaattttgactttgttagatgagggaggaaaactcaactgtttctctttgttatctaaatgtttcagaattcaatcgtgaaggaacaggcattttacactatgaagacattcttttgagatttttatttcagttgctatatcataagcatttttaaagtttcttttctaattttacattgtattagattttctgattcttttgtaaatacagaacttaaatagaaggcaacaggaaatttatataggaactattttcattccacttgtgtaagttaagtcttgactctttcaaatgcaaaaaacctattttatgctttgttaaaattatggtgtcacttagattgactttagttgactgcactatataatatagaactatgaatatgtagaataacatgaaaaattggaggtgctggtggtatggctgaccctgtttcagaagcaggatagtataaaagcatcagcctaagaatggcactcccactaactagctatgtaatcttgacctctttgggctttagttcctctcataaaaggaagagatgtattggattagactagatgatcaccactttctcttctagttctaatttttttaattctaatacctatattttcaagttatgtcaattaaatcattatcaggttatttcctaatgtaagaatagctaaaatgttgcagagaaataagtgacccaacaaaatttattcatctgttatgggtaagatctgccataaattcttcctaaataatttgtttactaactctttaggccactgtgctttgcggtccattagtaaacttgtgttgctaagtgctaaacagaatactgctattttgagagagtcaagactctttcttaagggccaagaaagcaacttgagccttgggctaatctggctgagtagtcagttataaaagcataattgctttatattttggatcattttttactgggggcggacttggggggggttgcatacaaagataacatatatatccaactttctgaaatgaaatgtttttagattactttttcaactgtaaataatgtacatttaatgtcacaagaaaaaaatgtcttctgcaaattttctagtataacagaaatttttgtagatgaaaaaaatcattatgtttagaggtctaatgctatgttttcatattacagagtgaatttgtatttaaacaaaaatttaaattttggaatcctctaaacatttttgtatctttaattggtttattattaaataaatcatataaaaattctca

SEQ ID NO: 9571 - protein, 619 aa, Homo sapiens; identical to SEQ ID NO: 1393

SEQ ID NO: 9572 - DNA, 3863 bp, Homo sapiens
aacagctaaaacttgtcggattgctttttattttcaagctcaaaagacgatagagaaagaatacttgaaggtattaacatcatcctcattgtcagagccctcttgccttctatagtttgtatgaagattggtttaacaatttttatattaaaagctatcaaagtgatatatgcacaccattcaaaatttaattcataggtctataatgaaaaggagcctgcctcctctgccccttctgactctcagtcctgctgtccaaaggatcagatatctgccgatgatgacttctaacccattcagaatctttctatggtatattgccctggggtgtaaaatcctccaggaccctaaacagatggacagttgatgcatttcagggccaagaagcttgagagaagaaaaatttcagaaaaattgtctcaatttgactagaatatcaatgaaccaggaaaactgaagcaccttccctaaagaaaacttgggtatacaattactccacagacagagctgagggttttttacccaaatcagtcactggattttgctgcctgatacgtgaatcttcttggaatttttctcatgtggatctaaggggaatgctttattatggctgctgttgtccaacagaacgacctagtatttgaatttgctagtaacgtcatggaggatgaacgacagcttggtgatccagctatttttcctgccgtaattgtggaacatgttcctggtgctgatattctcaatagttatgccggtctagcctgtgtggaagagcccaatgacatgattactgagagttcactggatgttgctgaagaagaaatcatagacgatgatgatgatgacatcacccttacagttgaagcttcttgtcatgacggggatgaaacaattgaaactattgaggctgctgaggcactcctcaatatggattcccctggccctatgctggatgaaaaacgaataaataataatatatttagttcacctgaagatgacatggttgttgccccagtcacccatgtgtccgtcacattagatgggattcctgaagtgatggaaacacagcaggtgcaagaaaaatatgcagactcaccgggagcctcatcaccagaacagcctaagaggaaaaaaggaagaaaaactaaaccaccacgaccagattccccagccactacgccaaatatatctgtgaagaagaaaaacaaagatggaaagggaaacacaatttatctttgggagtttttactggcactgctccaggacaaggctacttgtcctaaatacatcaagtggacccagcgagagaaaggcatttttaaattggtggattctaaagcagtgtccaggttgtgggggaagcacaaaaacaaacctgatatgaattatgagaccatgggaagagcactcaggtactattaccaaaggggtattctggcaaaagtggaaggtcagcgcttggtgtatcagtttaaagaaatgccaaaagatcttatatatataaatgatgaggatccaagttccagcatagagtcttcagatccatcgctatcttcatcagccacttcaaataggaatcaaaccagccggtcgagagtatcttcaagtccaggggtaaaaggaggagccactacagttctaaaaccagggaattctaaagctgcaaaacccaaagatcctgtggaagttgcacaaccatcagaagttttgaggacagtgcagcccacgcagtctccatatcctacccagctcttccggactgttcatgtagtacagccagtacaggctgtcccagagggagaagcagctagaaccagtaccatgcaggatgaaacattaaattcttccgttcagagtattaggactatacaggctccaacccaagttccagtggttgtgtctcctaggaatcagcagttgcatacagtaacactccaaacagtgccactcacaacagttatagccagcacagatccatcagcaggtactggatctcagaagtttattttacaagccattccatcatcacagcccatgacagtactgaaagaaaatgtcatgctgcagtcacaaaaggcgggctctcctccttcaattgtcttgggccctgcccaggttcagcaggtccttactagcaatgttcagaccatttgcaatggaaccgtcagtgtggcttcctctccatccttcagtgctactgcacctgtggtgaccttttctcctcgcagttcacagctggttgctcacccacctggcactgtaatcacttcagttatcaaaactcaagaaacaaaaactcttacacaggaagtagagaaaaaggaatctgaagatcatttgaaagagaacactgagaaaacggagcagcagccacagccttatgtgatggtagtgtccagttccaatggatttacttctcaggtagctatgaaacaaaacgaactgctggaacccaactctttttagttaatataccaaagcttatgaataattgtttgttaattgaacattttcaattatatgcagactgactgattctaagataaattctaaggaggtttctaattttgtaattgttaaaaatagagttaattttgactttgttagatgagggaggaaaactcaactgtttctctttgttatctaaatgtttcagaattcaatcgtgaaggaacaggcattttacactatgaagacattcttttgagatttttatttcagttgctatatcataagcatttttaaagtttcttttctaattttacattgtattagattttctgattcttttgtaaatacagaacttaaatagaaggcaacaggaaatttatataggaactattttcattccacttgtgtaagttaagtcttgactctttcaaatgcaaaaaacctattttatgctttgttaaaattatggtgtcacttagattgactttagttgactgcactatataatatagaactatgaatatgtagaataacatgaaaaattggaggtgctggtggtatggctgaccctgtttcagaagcaggatagtataaaagcatcagcctaagaatggcactcccactaactagctatgtaatcttgacctctttgggctttagttcctctcataaaaggaagagatgtattggattagactagatgatcaccactttctcttctagttctaatttttttaattctaatacctatattttcaagttatgtcaattaaatcattatcaggttatttcctaatgtaagaatagctaaaatgttgcagagaaataagtgacccaacaaaatttattcatctgttatgggtaagatctgccataaattcttcctaaataatttgtttactaactctttaggccactgtgctttgcggtccattagtaaacttgtgttgctaagtgctaaacagaatactgctattttgagagagtcaagactctttcttaagggccaagaaagcaacttgagccttgggctaatctggctgagtagtcagttataaaagcataattgctttatattttggatcattttttactgggggcggacttggggggggttgcatacaaagataacatatatatccaactttctgaaatgaaatgtttttagattactttttcaactgtaaataatgtacatttaatgtcacaagaaaaaaatgtcttctgcaaattttctagtataacagaaatttttgtagatgaaaaaaatcattatgtttagaggtctaatgctatgttttcatattacagagtgaatttgtatttaaacaaaaatttaaattttggaatcctctaaacatttttgtatctttaattggtttattattaaataaatcatataaaaattctca

SEQ ID NO: 9573 - protein, 619 aa, Homo sapiens; identical to SEQ ID NO: 1393

SEQ ID NO: 9574 - DNA, 3830 bp, Homo sapiens
aatctacaggagccattttaacagctaaaacttgtcggattgctttttattttcaagctcaaaagacgatagagaaagaatacttgaagagagggagaaattatgcagctgagctttggatatacaaatttctatgcagaaatgttttgattccttctcttccaggtctataatgaaaaggagcctgcctcctctgccccttctgactctcagtcctgctgtccaaaggatcagatatctgccgatgatgacttctaacccattcagaatctttctatggtatattgccctggggtgtaaaatcctccaggaccctaaacagatggacagttgatgcatttcagggccaagaagcttgagagaagaaaaatttcagaaaaattgtctcaatttgactagaatatcaatgaaccaggaaaactgaagcaccttccctaaagaaaacttgggtatacaattactccacagacagagctgagggttttttacccaaatcagtcactggattttgctgcctgatacgtgaatcttcttggaatttttctcatgtggatctaaggggaatgctttattatggctgctgttgtccaacagaacgacctagtatttgaatttgctagtaacgtcatggaggatgaacgacagcttggtgatccagctatttttcctgccgtaattgtggaacatgttcctggtgctgatattctcaatagttatgccggtctagcctgtgtggaagagcccaatgacatgattactgagagttcactggatgttgctgaagaagaaatcatagacgatgatgatgatgacatcacccttacagttgaagcttcttgtcatgacggggatgaaacaattgaaactattgaggctgctgaggcactcctcaatatggattcccctggccctatgctggatgaaaaacgaataaataataatatatttagttcacctgaagatgacatggttgttgccccagtcacccatgtgtccgtcacattagatgggattcctgaagtgatggaaacacagcaggtgcaagaaaaatatgcagactcaccgggagcctcatcaccagaacagcctaagaggaaaaaaggaagaaaaactaaaccaccacgaccagattccccagccactacgccaaatatatctgtgaagaagaaaaacaaagatggaaagggaaacacaatttatctttgggagtttttactggcactgctccaggacaaggctacttgtcctaaatacatcaagtggacccagcgagagaaaggcatttttaaattggtggattctaaagcagtgtccaggttgtgggggaagcacaaaaacaaacctgatatgaattatgagaccatgggaagagcactcaggtactattaccaaaggggtattctggcaaaagtggaaggtcagcgcttggtgtatcagtttaaagaaatgccaaaagatcttatatatataaatgatgaggatccaagttccagcatagagtcttcagatccatcgctatcttcatcagccacttcaaataggaatcaaaccagccggtcgagagtatcttcaagtccaggggtaaaaggaggagccactacagttctaaaaccagggaattctaaagctgcaaaacccaaagatcctgtggaagttgcacaaccatcagaagttttgaggacagtgcagcccacgcagtctccatatcctacccagctcttccggactgttcatgtagtacagccagtacaggctgtcccagagggagaagcagctagaaccagtaccatgcaggatgaaacattaaattcttccgttcagagtattaggactatacaggctccaacccaagttccagtggttgtgtctcctaggaatcagcagttgcatacagtaacactccaaacagtgccactcacaacagttatagccagcacagatccatcagcaggtactggatctcagaagtttattttacaagccattccatcatcacagcccatgacagtactgaaagaaaatgtcatgctgcagtcacaaaaggcgggctctcctccttcaattgtcttgggccctgcccaggttcagcaggtccttactagcaatgttcagaccatttgcaatggaaccgtcagtgtggcttcctctccatccttcagtgctactgcacctgtggtgaccttttctcctcgcagttcacagctggttgctcacccacctggcactgtaatcacttcagttatcaaaactcaagaaacaaaaactcttacacaggaagtagagaaaaaggaatctgaagatcatttgaaagagaacactgagaaaacggagcagcagccacagccttatgtgatggtagtgtccagttccaatggatttacttctcaggtagctatgaaacaaaacgaactgctggaacccaactctttttagttaatataccaaagcttatgaataattgtttgttaattgaacattttcaattatatgcagactgactgattctaagataaattctaaggaggtttctaattttgtaattgttaaaaatagagttaattttgactttgttagatgagggaggaaaactcaactgtttctctttgttatctaaatgtttcagaattcaatcgtgaaggaacaggcattttacactatgaagacattcttttgagatttttatttcagttgctatatcataagcatttttaaagtttcttttctaattttacattgtattagattttctgattcttttgtaaatacagaacttaaatagaaggcaacaggaaatttatataggaactattttcattccacttgtgtaagttaagtcttgactctttcaaatgcaaaaaacctattttatgctttgttaaaattatggtgtcacttagattgactttagttgactgcactatataatatagaactatgaatatgtagaataacatgaaaaattggaggtgctggtggtatggctgaccctgtttcagaagcaggatagtataaaagcatcagcctaagaatggcactcccactaactagctatgtaatcttgacctctttgggctttagttcctctcataaaaggaagagatgtattggattagactagatgatcaccactttctcttctagttctaatttttttaattctaatacctatattttcaagttatgtcaattaaatcattatcaggttatttcctaatgtaagaatagctaaaatgttgcagagaaataagtgacccaacaaaatttattcatctgttatgggtaagatctgccataaattcttcctaaataatttgtttactaactctttaggccactgtgctttgcggtccattagtaaacttgtgttgctaagtgctaaacagaatactgctattttgagagagtcaagactctttcttaagggccaagaaagcaacttgagccttgggctaatctggctgagtagtcagttataaaagcataattgctttatattttggatcattttttactgggggcggacttggggggggttgcatacaaagataacatatatatccaactttctgaaatgaaatgtttttagattactttttcaactgtaaataatgtacatttaatgtcacaagaaaaaaatgtcttctgcaaattttctagtataacagaaatttttgtagatgaaaaaaatcattatgtttagaggtctaatgctatgttttcatattacagagtgaatttgtatttaaacaaaaatttaaattttggaatcctctaaacatttttgtatctttaattggtttattattaaataaatcatataaaaattctca

SEQ ID NO: 9575 - protein, 619 aa, Homo sapiens; identical to SEQ ID NO: 1393

SEQ ID NO: 9576 - DNA, 3585 bp, Homo sapiens
accacttccccaatctacaggagccattttaacagctaaaacttgtcggattgctttttattttcaagctcaaaagacgatagagaaagaatacttgaaggccaagaagcttgagagaagaaaaatttcagaaaaattgtctcaatttgactagaatatcaatgaaccaggaaaactgaagcaccttccctaaagaaaacttgggtatacaattactccacagacagagctgagggttttttacccaaatcagtcactggattttgctgcctgatacgtgaatcttcttggaatttttctcatgtggatctaaggggaatgctttattatggctgctgttgtccaacagaacgacctagtatttgaatttgctagtaacgtcatggaggatgaacgacagcttggtgatccagctatttttcctgccgtaattgtggaacatgttcctggtgctgatattctcaatagttatgccggtctagcctgtgtggaagagcccaatgacatgattactgagagttcactggatgttgctgaagaagaaatcatagacgatgatgatgatgacatcacccttacagttgaagcttcttgtcatgacggggatgaaacaattgaaactattgaggctgctgaggcactcctcaatatggattcccctggccctatgctggatgaaaaacgaataaataataatatatttagttcacctgaagatgacatggttgttgccccagtcacccatgtgtccgtcacattagatgggattcctgaagtgatggaaacacagcaggtgcaagaaaaatatgcagactcaccgggagcctcatcaccagaacagcctaagaggaaaaaaggaagaaaaactaaaccaccacgaccagattccccagccactacgccaaatatatctgtgaagaagaaaaacaaagatggaaagggaaacacaatttatctttgggagtttttactggcactgctccaggacaaggctacttgtcctaaatacatcaagtggacccagcgagagaaaggcatttttaaattggtggattctaaagcagtgtccaggttgtgggggaagcacaaaaacaaacctgatatgaattatgagaccatgggaagagcactcaggtactattaccaaaggggtattctggcaaaagtggaaggtcagcgcttggtgtatcagtttaaagaaatgccaaaagatcttatatatataaatgatgaggatccaagttccagcatagagtcttcagatccatcgctatcttcatcagccacttcaaataggaatcaaaccagccggtcgagagtatcttcaagtccaggggtaaaaggaggagccactacagttctaaaaccagggaattctaaagctgcaaaacccaaagatcctgtggaagttgcacaaccatcagaagttttgaggacagtgcagcccacgcagtctccatatcctacccagctcttccggactgttcatgtagtacagccagtacaggctgtcccagagggagaagcagctagaaccagtaccatgcaggatgaaacattaaattcttccgttcagagtattaggactatacaggctccaacccaagttccagtggttgtgtctcctaggaatcagcagttgcatacagtaacactccaaacagtgccactcacaacagttatagccagcacagatccatcagcaggtactggatctcagaagtttattttacaagccattccatcatcacagcccatgacagtactgaaagaaaatgtcatgctgcagtcacaaaaggcgggctctcctccttcaattgtcttgggccctgcccaggttcagcaggtccttactagcaatgttcagaccatttgcaatggaaccgtcagtgtggcttcctctccatccttcagtgctactgcacctgtggtgaccttttctcctcgcagttcacagctggttgctcacccacctggcactgtaatcacttcagttatcaaaactcaagaaacaaaaactcttacacaggaagtagagaaaaaggaatctgaagatcatttgaaagagaacactgagaaaacggagcagcagccacagccttatgtgatggtagtgtccagttccaatggatttacttctcaggtagctatgaaacaaaacgaactgctggaacccaactctttttagttaatataccaaagcttatgaataattgtttgttaattgaacattttcaattatatgcagactgactgattctaagataaattctaaggaggtttctaattttgtaattgttaaaaatagagttaattttgactttgttagatgagggaggaaaactcaactgtttctctttgttatctaaatgtttcagaattcaatcgtgaaggaacaggcattttacactatgaagacattcttttgagatttttatttcagttgctatatcataagcatttttaaagtttcttttctaattttacattgtattagattttctgattcttttgtaaatacagaacttaaatagaaggcaacaggaaatttatataggaactattttcattccacttgtgtaagttaagtcttgactctttcaaatgcaaaaaacctattttatgctttgttaaaattatggtgtcacttagattgactttagttgactgcactatataatatagaactatgaatatgtagaataacatgaaaaattggaggtgctggtggtatggctgaccctgtttcagaagcaggatagtataaaagcatcagcctaagaatggcactcccactaactagctatgtaatcttgacctctttgggctttagttcctctcataaaaggaagagatgtattggattagactagatgatcaccactttctcttctagttctaatttttttaattctaatacctatattttcaagttatgtcaattaaatcattatcaggttatttcctaatgtaagaatagctaaaatgttgcagagaaataagtgacccaacaaaatttattcatctgttatgggtaagatctgccataaattcttcctaaataatttgtttactaactctttaggccactgtgctttgcggtccattagtaaacttgtgttgctaagtgctaaacagaatactgctattttgagagagtcaagactctttcttaagggccaagaaagcaacttgagccttgggctaatctggctgagtagtcagttataaaagcataattgctttatattttggatcattttttactgggggcggacttggggggggttgcatacaaagataacatatatatccaactttctgaaatgaaatgtttttagattactttttcaactgtaaataatgtacatttaatgtcacaagaaaaaaatgtcttctgcaaattttctagtataacagaaatttttgtagatgaaaaaaatcattatgtttagaggtctaatgctatgttttcatattacagagtgaatttgtatttaaacaaaaatttaaattttggaatcctctaaacatttttgtatctttaattggtttattattaaataaatcatataaaaattctca

SEQ ID NO: 9577 - protein, 619 aa, Homo sapiens; identical to SEQ ID NO: 1393

SEQ ID NO: 9578 - DNA, 4253 bp, Homo sapiens
tcgagctcttccagccgcccgatgcccacccgaacctccctccgatccagacaccttactcagtccccgggaccagcgttccgctgttcccaactacgggtgcccagacgatccaatccgcgttcgaaatcgcctcctctcccctccccctacaggggcggtactcccggctccaaagaggtggggtcggtataaaggggttgaggtcaccgggaaggggtaaaagcgcgacgggacctgagctgaaggacgggatctcaagcctcaagtccctgcgccatcccgccgtctctgtgtcctcccctggggcccaaaacctccatcctccttctaggctcgctggctcaaggccaaggagctcagcgcgccgcctccgcccggaacgcaaacagctgttcccagagacgtctccgctctcaactttgccaactactccgcacgcactttgaccagcggagcaaccgggacctgtgggtcggggtcctctggcggagttaaaaaaaaaagaggtgaaactgcgggaccggcgctgcgagtcgctaggcttcgcctcaaactttgctgttgcagcggagcggccccgcccctcctctcccctacgacgcccacgcgctcggatggggcttgttccctagctcgggagcgtgtgggcagcagcagcggcggcggcggcggcggcggcggcggcggcagcagcagcttcagtagcgcagaggcggcggtggcgagaggtgcggcgaaggaggcagaggcacttatgcttgtcaggccaagaagcttgagagaagaaaaatttcagaaaaattgtctcaatttgactagaatatcaatgaaccaggaaaactgaagcaccttccctaaagaaaacttgggtatacaattactccacagacagagctgagggttttttacccaaatcagtcactggattttgctgcctgatacgtgaatcttcttggaatttttctcatgtggatctaaggggaatgctttattatggctgctgttgtccaacagaacgacctagtatttgaatttgctagtaacgtcatggaggatgaacgacagcttggtgatccagctatttttcctgccgtaattgtggaacatgttcctggtgctgatattctcaatagttatgccggtctagcctgtgtggaagagcccaatgacatgattactgagagttcactggatgttgctgaagaagaaatcatagacgatgatgatgatgacatcacccttacagttgaagcttcttgtcatgacggggatgaaacaattgaaactattgaggctgctgaggcactcctcaatatggattcccctggccctatgctggatgaaaaacgaataaataataatatatttagttcacctgaagatgacatggttgttgccccagtcacccatgtgtccgtcacattagatgggattcctgaagtgatggaaacacagcaggtgcaagaaaaatatgcagactcaccgggagcctcatcaccagaacagcctaagaggaaaaaaggaagaaaaactaaaccaccacgaccagattccccagccactacgccaaatatatctgtgaagaagaaaaacaaagatggaaagggaaacacaatttatctttgggagtttttactggcactgctccaggacaaggctacttgtcctaaatacatcaagtggacccagcgagagaaaggcatttttaaattggtggattctaaagcagtgtccaggttgtgggggaagcacaaaaacaaacctgatatgaattatgagaccatgggaagagcactcaggtactattaccaaaggggtattctggcaaaagtggaaggtcagcgcttggtgtatcagtttaaagaaatgccaaaagatcttatatatataaatgatgaggatccaagttccagcatagagtcttcagatccatcgctatcttcatcagccacttcaaataggaatcaaaccagccggtcgagagtatcttcaagtccaggggtaaaaggaggagccactacagttctaaaaccagggaattctaaagctgcaaaacccaaagatcctgtggaagttgcacaaccatcagaagttttgaggacagtgcagcccacgcagtctccatatcctacccagctcttccggactgttcatgtagtacagccagtacaggctgtcccagagggagaagcagctagaaccagtaccatgcaggatgaaacattaaattcttccgttcagagtattaggactatacaggctccaacccaagttccagtggttgtgtctcctaggaatcagcagttgcatacagtaacactccaaacagtgccactcacaacagttatagccagcacagatccatcagcaggtactggatctcagaagtttattttacaagccattccatcatcacagcccatgacagtactgaaagaaaatgtcatgctgcagtcacaaaaggcgggctctcctccttcaattgtcttgggccctgcccaggttcagcaggtccttactagcaatgttcagaccatttgcaatggaaccgtcagtgtggcttcctctccatccttcagtgctactgcacctgtggtgaccttttctcctcgcagttcacagctggttgctcacccacctggcactgtaatcacttcagttatcaaaactcaagaaacaaaaactcttacacaggaagtagagaaaaaggaatctgaagatcatttgaaagagaacactgagaaaacggagcagcagccacagccttatgtgatggtagtgtccagttccaatggatttacttctcaggtagctatgaaacaaaacgaactgctggaacccaactctttttagttaatataccaaagcttatgaataattgtttgttaattgaacattttcaattatatgcagactgactgattctaagataaattctaaggaggtttctaattttgtaattgttaaaaatagagttaattttgactttgttagatgagggaggaaaactcaactgtttctctttgttatctaaatgtttcagaattcaatcgtgaaggaacaggcattttacactatgaagacattcttttgagatttttatttcagttgctatatcataagcatttttaaagtttcttttctaattttacattgtattagattttctgattcttttgtaaatacagaacttaaatagaaggcaacaggaaatttatataggaactattttcattccacttgtgtaagttaagtcttgactctttcaaatgcaaaaaacctattttatgctttgttaaaattatggtgtcacttagattgactttagttgactgcactatataatatagaactatgaatatgtagaataacatgaaaaattggaggtgctggtggtatggctgaccctgtttcagaagcaggatagtataaaagcatcagcctaagaatggcactcccactaactagctatgtaatcttgacctctttgggctttagttcctctcataaaaggaagagatgtattggattagactagatgatcaccactttctcttctagttctaatttttttaattctaatacctatattttcaagttatgtcaattaaatcattatcaggttatttcctaatgtaagaatagctaaaatgttgcagagaaataagtgacccaacaaaatttattcatctgttatgggtaagatctgccataaattcttcctaaataatttgtttactaactctttaggccactgtgctttgcggtccattagtaaacttgtgttgctaagtgctaaacagaatactgctattttgagagagtcaagactctttcttaagggccaagaaagcaacttgagccttgggctaatctggctgagtagtcagttataaaagcataattgctttatattttggatcattttttactgggggcggacttggggggggttgcatacaaagataacatatatatccaactttctgaaatgaaatgtttttagattactttttcaactgtaaataatgtacatttaatgtcacaagaaaaaaatgtcttctgcaaattttctagtataacagaaatttttgtagatgaaaaaaatcattatgtttagaggtctaatgctatgttttcatattacagagtgaatttgtatttaaacaaaaatttaaattttggaatcctctaaacatttttgtatctttaattggtttattattaaataaatcatataaaaattctca

SEQ ID NO: 9579 - protein, 619 aa, Homo sapiens; identical to SEQ ID NO: 1393

SEQ ID NO: 9580 - DNA, 792 bp, Homo sapiens
agtgcattaaaaaagaagccactgaagacaggcttaagcatggccaagaagcttgagagaagaaaaatttcagaaaaattgtctcaatttgactagaatatcaatgaaccaggaaaactgaagcaccttccctaaagaaaacttgggtatacaattactccacagacagagctgagggttttttacccaaatcagtcactggattttgctgcctgatacgtgaatcttcttggaatttttctcatgtggatctaaggggaatgctttattatggctgctgttgtccaacagaacgacctagtatttgaatttgctagtaacgtcatggaggatgaacgacagcttggtgatccagctatttttcctgccgtaattgtggaacatgttcctggtgctgatattctcaatagttatgccggtctagcctgtgtggaagagcccaatgacatgattactgagagttcactggatgttgctgaagaagaaatcatagacgatgatgatgatgacatcacccttacagttgaagcttcttgtcatgacggggatgaaacaattgaaactattgaggctgctgaggcactcctcaatatggattcccctggccctatgctggatgaaaaacgaataaataataatatatttagttcacctgaagatgacatggttgttgccccagtcacccatgtgtccgtcacattagatgggattcctgaagtgatggaaacacagcaggtgcaagaaaaatatgcagactcaccgggagcctcatcaccagaacagcctaagagg

SEQ ID NO: 9581 - protein, 173 aa, Homo sapiens
MAAVVQQNDLVFEFASNVMEDERQLGDPAIFPAVIVEHVPGADILNSYAGLACVEEPNDMITESSLDVAEEEIIDDDDDDITLTVEASCHDGDETIETIEAAEALLNMDSPGPMLDEKRINNNIFSSPEDDMVVAPVTHVSVTLDGIPEVMETQQVQEKYADSPGASSPEQPK

SEQ ID NO: 9582 - DNA, 850 bp, Homo sapiens
accacttccccaatctacaggagccattttaacagctaaaacttgtcggattgctttttattttcaagctcaaaagacgatagagaaagaatacttgaaggccaagaagcttgagagaagaaaaatttcagaaaaattgtctcaatttgactagaatatcaatgaaccaggaaaactgaagcaccttccctaaagaaaacttgggtatacaattactccacagacagagctgagggttttttacccaaatcagtcactggattttgctgcctgatacgtgaatcttcttggaatttttctcatgtggatctaaggggaatgctttattatggctgctgttgtccaacagaacgacctagtatttgaatttgctagtaacgtcatggaggatgaacgacagcttggtgatccagctatttttcctgccgtaattgtggaacatgttcctggtgctgatattctcaatagttatgccggtctagcctgtgtggaagagcccaatgacatgattactgagagttcactggatgttgctgaagaagaaatcatagacgatgatgatgatgacatcacccttacagttgaagcttcttgtcatgacggggatgaaacaattgaaactattgaggctgctgaggcactcctcaatatggattcccctggccctatgctggatgaaaaacgaataaataataatatatttagttcacctgaagatgacatggttgttgccccagtcacccatgtgtccgtcacattagatgggattcctgaagtgatggaaacacagcaggtgcaagaaaaatatgcagactcaccgggagcctcatcaccagaacagcctaagagg

SEQ ID NO: 9583 - protein, 173 aa, Homo sapiens; identical to SEQ ID NO: 9581

SEQ ID NO: 9584 - DNA, 655 bp, Homo sapiens
gcattaaaaaagaagccactgaagacaggcttaagcatggccaagaagcttgagagaagaaaaatttcagaaaaattgtctcaatttgactagaatatcaatgaaccaggaaaactgaagcaccttccctaaagaaaacttgggtatacaattactccacagacagagctgagggttttttacccaaatcagtcactggattttgctgcctgatacgtgaatcttcttggaatttttctcatgtggatctaaggggaatgctttattatggctgctgttgtccaacagaacgacctagtatttgaatttgctagtaacgtcatggaggatgaacgacagcttggtgatccagctatttttcctgccgtaattgtggaacatgttcctggtgctgatattctcaatagttatgccggtctagcctgtgtggaagagcccaatgacatgattactgagagttcactggatgttgctgaagaagaaatcatagacgatgatgatgatgacatcacccttacaggtgcgtgtgtctccatccagtaggaccttgctgcagcacagctttaggcagtgtcctaatcctgaggatgtgggggcataaaacgcccctaacttggttttaaactgtattaccttcagaaactacagccctaca

SEQ ID NO: 9585 - protein, 91 aa, Homo sapiens
MAAVVQQNDLVFEFASNVMEDERQLGDPAIFPAVIVEHVPGADILNSYAGLACVEEPNDMITESSLDVAEEEIIDDDDDDITLTGACVSIQ

SEQ ID NO: 9586 - DNA, 443 bp, Homo sapiens
tttattttcaagctcaaaagacgatagagaaagaatacttgaaggccaagaagcttgagagaagaaaaatttcagaaaaattgtctcaatttgactagaatatcaatgaaccaggaaaactgaagcaccttccctaaagaaaacttgggtatacaattactccacagacagagctgagggttttttacccaaatcagtcactggattttgctgcctgatacgtgaatcttcttggaatttttctcatgtggatctaaggggaatgctttattatggctgctgttgtccaacagaacgacctagtatttgaatttgctagtaacgtcatggaggatgaacgacaggctttggagtcaggggagctgttgaagactgtgggaggagtaaggcaccagacccctcttggtgttttcttgccttgatgcaaagatgttgcgtgaact

SEQ ID NO: 9587 - protein, 49 aa, Homo sapiens
MAAVVQQNDLVFEFASNVMEDERQALESGELLKTVGGVRHQTPLGVFLP

SEQ ID NO: 9588 - DNA, 567 bp, Homo sapiens
gtgcattaaaaaagaagccactgaagacaggcttaagcatggccaagaagcttgagagaagaaaaatttcagaaaaattgtctcaatttgactagaatatcaatgaaccaggaaaactgaagcaccttccctaaagaaaacttgggtatacaattactccacagacagagctgagggttttttacccaaatcagtcactggattttgctgcctgatacgtgaatcttcttggaatttttctcatgtggatctaaggggaatgctttattatggctgctgttgtccaacagaacgacctagtatttgaatttgctagtaacgtcatggaggatgaacgacaggccctgcacgtgatatgcattttatattttcatctttaaaagcctgtatggtgtgacaactcttgttatccccattttacaagtaaggaaaacatgtataatgaggaatctcaaagaggttgaaggaatgcatgttacccagaaacacacaactgtaaagtgccacttgtattgaaattgactgacctgagagagcccaaactcttaaccattatgctagggtata

SEQ ID NO: 9589 - protein, 36 aa, Homo sapiens
MAAVVQQNDLVFEFASNVMEDERQALHVICILYFHL

SEQ ID NO: 9590 - DNA, 569 bp, Homo sapiens
aaaaaagaagccactgaagacaggcttaagcatggccaagaagcttgagagaagaaaaatttcagaaaaattgtctcaatttgactagaatatcaatgaaccaggaaaactgaagcaccttccctaaagaaaacttgggtatacaattactccacagacagagctgagggttttttacccaaatcagtcactggattttgctgcctgatacgtgaatcttcttggaatttttctcatgtggatctaaggggaatgctttattatggctgctgttgtccaacagaacgacctagtatttgaatttgctagtaacgtcatggaggatgaacgacaggtatgagattcagagaaaatttcattttaatgactttattatgatttttctattcatatcagaaaattatttcctttaaaagacaatgagagaaactttattgaaagtaaaaatttatagatgaaatatttggaggaaatattatactatgttttaagcaccagttaattcatgaagaataagtcttatccttagctttgatatggtaacaaggaagtaatacctttgggattca

SEQ ID NO: 9591 - DNA, 570 bp, Homo sapiens
aatctacaggagccattttaacagctaaaacttgtcggattgctttttattttcaagctcaaaagacgatagagaaagaatacttgaaggccaagaagcttgagagaagaaaaatttcagaaaaattgtctcaatttgactagaatatcaatgaaccaggaaaactgaagcaccttccctaaagaaaacttgggtatacaattactccacagacagagctgagggttttttacccaaatcagtcactggattttgctgcctgatacgtgaatcttcttggaatttttctcatgtggatctaaggggaatgctttattatggctgctgttgtccaacagaacgacctagtatttgaatttgctagtaacgtcatggaggatgaacgacaggtatgagattcagagaaaatttcattttaatgactttattatgatttttctattcatatcagaaaattatttcctttaaaagacaatgagagaaactttattgaaagtaaaaatttatagatgaaatatttggaggaaatattatactatgttttaagcaccagttaattcatgaagaata

SEQ ID NO: 9592 - protein, 46 aa, Homo sapiens
STGAILTAKTCRIAFYFQAQKTIEKEYLKAKKLERRKISEKLSQFD

SEQ ID NO: 9593 - DNA, 1237 bp, Homo sapiens
aatctacaggagccattttaacagctaaaacttgtcggattgctttttattttcaagctcaaaagacgatagagaaagaatacttgaagctgctcctgcctcactgttaggaatgaagaaaggggaaaatgcaggaagaaccacacacactacaaaaatggagagtatccaggtcctagaggaatgccaaaaccccactgcagaggaagtcttgccctggtctcaaaattttgacaagatgatgaaggccccagcaggaagaaaccttttcagagagttcctctgaacagaatacaacaaagagaacctacttttctggattgcctgtgaagacttaaagaaagaacagaacaaaaaagtaatcaaagaaaagagaaaaggctagaatgatatatgaagattacatttctgtactatcaccaaaagaggtcagtcttgattctcgagctagagaattcttgagttagagaggtgatcaacagaaatttgttggctcctaatcctcacatgtatagttctctccagccccaagtaacatcttttcagatgaattccaggggatgttcaagactttgactctaatgaaaacactacaaaaggaaaatgttgccctaactgatagaaggtcccagtttgggaattgattttattcctatgataaaagctctaagatgagtagggaaaaggaacactatcaagcattgatgacaataaccaaatgtaatatttttaaatatgtcatatgtgcaatgtgaaattcattcttccttcattatttctcatattaaatctcatttcagaaattttagaattttaaaactgttgacttatacctaactgctatcactgcataacagcttttaaacagttagaaataaacattttagaataataaacagattgtgtttctatcctaagcttggatacatttcctttctaaagatctagctcttattgctgtattaaaagaatgccacatacaatgcttactaatggaaatgtgtgttcacagatgcacttagggagcgtagtgtaaaaacatcaggaacttaaaattacaaatttgatttcaagttacatttctgtctcatgcgactttgggcaaatcgtttatcttctctgagttcattttctcatctgcaaatgacaaataaaataattatcaggatggctatgagcattaaataaacgtggaaagaataaaatgtgacattattttatcagagttcttcaacac

SEQ ID NO: 9594 - protein, 57 aa, Homo sapiens
MKKGENAGRTTHTTKMESIQVLEECQNPTAEEVLPWSQNFDKMMKAPAGRNLFREFL

SEQ ID NO: 9595 - DNA, 525 bp, Homo sapiens
cgtgtgcgctcgcgtctccacccgcggcgcctgagcaagcgcgaggccggcctgcgaggtcttcccaacttgacttaaggggcgctggtcgcagtcacggaaagtaccctcgaaaaaaggcctttgggaacgagaatcttttttctttccctttaaaaatacacaccacgagctatggaggagaaaaataccactctgatgagatggctttaaataaatatggaaaattacctggggggaactttccagggaacaagtgaatctcccgtgactgctcagcggaccttgtttcttggtgcatgggctctgaatagtcattttgtatttgcatgtttgacctagcagaataattgggtccacagcaacatgggcgtgcctcccttagaaacacttggtttcatgtatgactcataagctgaagcacagacaccacttccccaatctacaggagccattttaacagctaaaacttgtcggattgctttttattttcaagctcaaaagacgatagagaaagaatacttg

SEQ ID NO: 9596 - protein, 40 aa, Homo sapiens
MENYLGGTFQGTSESPVTAQRTLFLGAWALNSHFVFACLT

SEQ ID NO: 9597 - DNA, 922 bp, Homo sapiens
ataaaggggttgaggtcaccgggaaggggtaaaagcgcgacgggacctgagctgaaggacgggatctcaagcctcaagtccctgcgccatcccgccgtctctgtgtcctcccctggggcccaaaacctccatcctccttctaggctcgctggctcaaggccaaggagctcagcgcgccgcctccgcccggaacgcaaacagctgttcccagagacgtctccgctctcaactttgccaactactccgcacgcactttgaccagcggagcaaccgggacctgtgggtcggggtcctctggcggagttaaaaaaaaaagaggtgaaactgcgggaccggcgctgcgagtcgctaggcttcgcctcaaactttgctgttgcagcggagcggccccgcccctcctctcccctacgacgcccacgcgctcggatggggcttgttccctagctcgggagcgtgtgggcagcagcagcggcggcggcggcggcggcggcggcggcggcagcagcagcttcagtagcgcagaggcggcggtggcgagaggtgcggcgaaggaggcagaggcacttatgcttgtcagggtggtggcagcagaatagaaaggatcagatacaacagataacactgaaggaaaaaatctacgacttcagaaagtaaatatttctaaaagaaatagagaagttatgaagcacagattttattgcagcggactggcagtttttactcttagggttggccagctagtaaatttattgcatacctgcgtgtgtctgtggctttcgaactctgaaattgtgcattgactccatgaacaagttaatactgtgagactgccaccctgtggacaaaatatcaggactaaaaccatcaagaattaaagtttcattcatttgcgatttactgttttagaactggctttggttct

SEQ ID NO: 9598 - protein, 39 aa, Homo sapiens
MKHRFYCSGLAVFTLRVGQLVNLLHTCVCLWLSNSEIVH

SEQ ID NO: 9599 - DNA, 2954 bp, Homo sapiens
ctgctgctgcccacacgctcccgagctagggaacaagccccatccgagcgcgtgggcgtcgtaggggagaggaggggcggggccgctccgctgcaacagcaaagtttgaggcgaagcctagcgactcgcagcgccggtcccgcagtttcacctcttttttttttaactccgccagaggaccccgacccacaggtcccggttgctccgctggtcaaagtgcgtgcggagtagttggcaaagttgagagcggagacgtctctgggaacagctgtttgcgttccgggcggaggcggcgcgctgagctccttggccttgagccagcgagcctagaaggaggatggaggttttgggccccaggggaggacacagagacggcgggatggcgcagggacttgaggcttgagatcccgtccttcagctcaggtcccgtcgcgcttttaccccttcccggtgacctcaacccctttataccgaccccacctctttggagccgggagtaccgcccctgtagggggaggggagaggaggcgatttcgaacgcggattggatcgtctgggcacccgtagttgggaacagcggaacgctggtcccggggactgagtaaggtgtctggatcggagggaggttcgggtgggcatcgggcggctggaagagctcgactcgtcccgctgggaaagcgcgagtctgagtggaaccctggacgacttgcagagcggctggcgcagtcatggcggactactggaagtcacagccaaagaaattctgtgattactgcaagtgctggatagcagacaataggcctagtgttgaatttcatgaaagaggaaagaatcataaggaaaatgtggcaaaaaggatcagtgagattaaacagaaaagcctggataaggcaaaggaagaagaaaaggcatcaaaggagtttgctgcaatggaggcagctgccctgaaagcataccaagaggatttgaaaagacttggcttagagtcagaaattttggagccaagcataacaccagtaaccagcactatcccacctacctcgacatcaaatcaacagaaagaaaagaaagaaaagaagaaaagaaaaaaagatccttcaaagggcagatgggtagaaggcataacctctgagggttaccattactattatgatcttatctcaggagcatctcagtgggagaaacctgaaggatttcaaggagacttaaaaaagacagcagtgaagaccgtttgggtagaaggtttaagtgaagatggttttacctattactataatacagaaacaggagaatccagatgggagaaacctgatgatttcattccacacactagtgatctgccttctagtaaggtcaatgaaaattcacttggcaccctagatgaatccaaatcatcagattcgcatagtgattctgatggggaacaggaagcagaagaaggaggggtctctacagagacagaaaagccaaaaataaagtttaaggaaaaaaataaaaatagtgatggaggaagtgacccagaaacacagaaagaaaaaagtattcagaaacagaattcattaggttcaaatgaagaaaaatcgaaaactcttaagaaatcaaacccatatggagaatggcaagaaattaaacaagaggttgagtctcatgaggaggtagatttggaacttccaagcactgaaaatgagtatgtatcaacttcagaagctgatggtggcggagaacccaaagtggtatttaaagaaaaaacagtcacttctcttggagttatggcagatggagtggccccagtcttcaaaaagagaagaactgaaaatggaaaatctagaaatttaaggcaacgaggtgatgatcaatagttgcaggagagctttttgtacatgcttttaggacagaatggagacttatacacccaaagtttatctgtgtttgtttgtaagtattatgatgctaaaaatttagatttattctaaatgtatttgatgtgaattaaaataaatattttttcatgtgaaatttattttggttcctaaaatggaagcctaccacattgcattgtaatacagtgtattatgttcagtgtctaaaaactgctaattaagtcataatttaagatgctatgtatctgttatttaaaacatggagaaacagggcctttattccattcatattcataagagcatatttatcctgcattgaaaatgcattacttttgcacattgatattaactgttgtccaacaaataagtatcggagtacgtgagaatattcccagcccagtgatgatttggttctgaggctgatgtgagaaagctgatgtaaaaaatgtatgcatattggcttaccttactcaatttaaagtcaaaagccaacagccaggagcagctcaggtacttcagatgtgcttaatatggagtgaaaactggaccagaggtggaaagatgtatttgccccagttcacttcaaagcagcaaacgttgtttaagcattttagtttgaaccaggcattgtgttaggaatccagggataaagatgaatgaaatgtatttctgttcttcaggagttcacattctagcatatgccttttttcccccagtcatgcactctttttagcagtcttatatgtactagaaaagattttttaaagtttatttaaagctgtgtagatgaaggcttgatctaaaatagtataaggtctccagcttcagtaaaagtttttagtgtttacttaaattagtaatttctcactttctgtctggttaaaatgtcttaaaaagtagaattttcttctttaatccgtttagtagttacctcccttttacttttcaaattcacaaaattacatttctcataaattgtatagtatttaacttataatagttaatatttgtctttttaagatgactgtacatgtaagaaaaaagcttattaaaaacttgatcaaagaataagtt

SEQ ID NO: 9600 - protein, 376 aa, Homo sapiens; identical to SEQ ID NO: 1395

SEQ ID NO: 9601 - DNA, 3321 bp, Homo sapiens
ctgctgctgcccacacgctcccgagctagggaacaagccccatccgagcgcgtgggcgtcgtaggggagaggaggggcggggccgctccgctgcaacagcaaagtttgaggcgaagcctagcgactcgcagcgccggtcccgcagtttcacctcttttttttttaactccgccagaggaccccgacccacaggtcccggttgctccgctggtcaaagtgcgtgcggagtagttggcaaagttgagagcggagacgtctctgggaacagctgtttgcgttccgggcggaggcggcgcgctgagctccttggccttgagccagcgagcctagaaggaggatggaggttttgggccccaggggaggacacagagacggcgggatggcgcagggacttgaggcttgagatcccgtccttcagctcaggtcccgtcgcgcttttaccccttcccggtgacctcaacccctttataccgaccccacctctttggagccgggagtaccgcccctgtagggggaggggagaggaggcgatttcgaacgcggattggatcgtctgggcacccgtagttgggaacagcggaacgctggtcccggggactgagtaaggtgtctggatcggagggaggttcgggtgggcatcgggcggctggaagagctcgactcgtcccgctgggaaagcgcgagtctgagtggaaccctggacgacttgcagagcggctggcgcagtcatggcggactactggaagtcacagccaaagaaattctgtgattactgcaagtgctggatagcagacaataggcctagtgttgaatttcatgaaagaggaaagaatcataaggaaaatgtggcaaaaaggatcagtgagattaaacagaaaagcctggataaggcaaaggaagaagaaaaggcatcaaaggagtttgctgcaatggaggcagctgccctgaaagcataccaagaggatttgaaaagacttggcttagagtcagaaattttggagccaagcataacaccagtaaccagcactatcccacctacctcgacatcaaatcaacagaaagaaaagaaagaaaagaagaaaagaaaaaaagatccttcaaagggcagatgggtagaaggcataacctctgagggttaccattactattatgatcttatctcaggagcatctcagtgggagaaacctgaaggatttcaaggagacttaaaaaagacagcagtgaagaccgtttgggtagaaggtttaagtgaagatggttttacctattactataatacagaaacaggagaatccagatgggagaaacctgatgatttcattccacacactagtgatctgccttctagtaaggtcaatgaaaattcacttggcaccctagatgaatccaaatcatcagattcgcatagtgattctgatggggaacaggaagcagaagaaggaggggtctctacagagacagaaaagccaaaaataaagtttaaggaaaaaaataaaaatagtgatggaggaagtgacccagaaacacagaaagaaaaaagtattcagaaacagaattcattaggttcaaatgaagaaaaatcgaaaactcttaagaaatcaaacccatatggagaatggcaagaaattaaacaagaggttgagtctcatgaggaggtagatttggaacttccaagcactgaaaatgagtatgtatcaacttcagaagctgatggtggcggagaacccaaagtggtatttaaagaaaaaacagtcacttctcttggagttatggcagatggagtggccccagtcttcaaaaagagaagaactgaaaatggaaaatctagaaatttaaggcaacgaggtgatgatcaatagttgcaggagagctttttgtacatgcttttaggacagaatggagacttatacacccaaagtttatctgtgtttgtttgtaagtattatgatgctaaaaatttagatttattctaaatgtatttgatgtgaattaaaataaatattttttcatgtgaaatttattttggttcctaaaatggaagcctaccacattgcattgtaatacagtgtattatgttcagtgtctaaaaactgctaattaagtcataatttaagatgctatgtatctgttatttaaaacatggagaaacagggcctttattccattcatattcataagagcatatttatcctgcattgaaaatgcattacttttgcacattgatattaactgttgtccaacaaataagtatcggagtacgtgagaatattcccagcccagtgatgatttggttctgaggctgatgtgagaaagctgatgtaaaaaatgtatgcatattggcttaccttactcaatttaaagtcaaaagccaacagccaggagcagctcaggtacttcagatgtgcttaatatggagtgaaaactggaccagaggtggaaagatgtatttgccccagttcacttcaaagcagcaaacgttgtttaagcattttagtttgaaccaggcattgtgttaggaatccagggataaagatgaatgaaatgtatttctgttcttcaggagttcacattctagcatatgccttttttcccccagtcatgcactctttttagcagtcttatatgtactagaaaagattttttaaagtttatttaaagctgtgtagatgaaggcttgatctaaaatagtataaggtctccagcttcagtaaaagtttttagtgtttacttaaattagtaatttctcactttctgtctggttaaaatgtcttaaaaagtagaattttcttctttaatccgtttagtagttacctcccttttacttttcaaattcacaaaattacatttctcataaattgtatagtatttaacttataatagttaatatttgtctttttaagatgactgtacatgtaagaaaaaagcttattaaaaacttgatcaaagaataagttaaatattgttattctaattccagtcagaatcaccttagcattggtgagatagtatttggagatttgtctttgcattttttcagtctactttttgggtattttatgaatgtgaaagcctaaactttccccttcattaggaagagatacttaataattcttgatagcccattcatcatctaggtgagcagtgcattctggtgctttactcttctcaggtggaaaaaataatggactgtaaatgcagtggtcctatactttacccacatttagctcttaaaaaatacaaaattgaaggcatttttaagattagacctcatgtaaagtttctctttgatgatttttaaaacaatctcctttacttttgaaa

SEQ ID NO: 9602 - protein, 376 aa, Homo sapiens; identical to SEQ ID NO: 1395

SEQ ID NO: 9603 - DNA, 537 bp, Homo sapiens
gggcacccgtagttgggaacagcggaacgctggtcccggggactgagtaaggtgtctggatcggagggaggttcgggtgggcatcgggcggctggaagagctcgactcgtcccgctgggaaagcgcgagtctgagtggaaccctggacgacttgcagagcggctggcgcagtcatggcggactactggaagtcacagccaaagaaattctgtgattactgcaagtgctggatagcagacaataggcctagtgttgaatttcatgaaagaggaaagaatcataaggaaaatgtggcaaaaaggatcagtgagattaaacagaaaagcctggataaggcaaaggaagaagaaaaggcatcaaaggagtttgctgcaatggaggcagctgccctgaaagcataccaagaggatttgaaaagacttggcttagagtcaggtaaaaaaaaaaaaaaaaaaaaagcagccagcatgttttaaaagtaacatcagaggtcaagctaagtaagctttgattgcttccataaagaggttataaact

SEQ ID NO: 9604 - protein, 100 aa, Homo sapiens
MADYWKSQPKKFCDYCKCWIADNRPSVEFHERGKNHKENVAKRISEIKQKSLDKAKEEEKASKEFAAMEAAALKAYQEDLKRLGLESGKKKKKKKAASMF

SEQ ID NO: 9605 - DNA, 1177 bp, Homo sapiens
gtagttgggaacagcggaacgctggtcccggggactgagtaaggtgtctggatcggagggaggttcgggtgggcatcgggcggctggaagagctcgactcgtcccgctgggaaagcgcgagtctgagtggaaccctggacgacttgcagagcggctggcgcagtcatggcggactactggaagtcacagccaaagaaattctgtgattactgcaagtgctggatagcagacaataggcctgtatgataattccgctgttagagattctaataataattgtgttgaatgaagtgctcctttttgatgtaaactcagtttacaaagcacttttatgtacattgctcttgcattttcaaaacatcagaagatttctgtcttctcagtcccctatgaaagctgtgagccttcttccttttcatcaacctgactttgattatatattaaattatttctctgtggccttttgggaaatgggcaatgagttggtcatatcattcatgttatgaagcacctatattataatggtggtgttcataatactgtcatacccaaagaattgtggaaagcccttaaaaaataaaagcaacatgtttagtttttcttgtatattttgtggtctagaaataatcaagtgtatttaatgcagagctgtgtatctttagatgcttaaatttgaaagaacaccattatttcctttctcatgaaacaaagtaacaactctgttaggtatgttgttagtctgtctcatagttgagatccagttttgaagatgtaaagcaaaaagcacaccgctgatttttctcccctcttgcatgtcaaaatactatgtacataccacataaacactagggtatctgttaaatatattttatgttgataccgtttttacttggcaaagttggatgcacaaagaatagtagtctcatattttaacaatgctgtggatttcttctgtagacatttatttcctgttacctgcaaggtgtttaggatttggatttttttttgatgttttggtctttttggatagttgctaaagttcttcactattttacctaggctatccttataaataaataccatgaatttttaaaaccacacaggtcacttaaagtctctctttcttggaggtacctaggctgtaaaatgaattttgtgagttatctagagtaagtaa

SEQ ID NO: 9606 - protein, 87 aa, Homo sapiens [sequence omitted]

SEQ ID NO: 9607 - DNA, 842 bp, Homo sapiens
atagtatgaaatacatacagtattgtcatttaataattgtaagtgataaatgttatgttgaaattacatctgaatagaattaataactaaataacatgactttaaaatgtgttgagcagaatccagatgggagaaacctgatgatttcattccacacactagtgatctgccttctagtaaggtcaatgaaaattcacttggcaccctagatgaatccaaatcatcagattcgcatagtgattctgatggggaacaggaagcagaagaaggaggggtctctacagagacagaaaagccaaaaataaagtttaaggaaaaaaataaaaatagtgatggaggaagtgacccagaaacacagaaagaaaaaagtattcagaaacagaattcattaggttcaaatgaagaaaaatcgaaaactcttaagaaatcaaacccatatggagaatggcaagaaattaaacaagaggttgagtctcatgaggaggtagatttggaacttccaagcactgaaaatgagtatgtatcaacttcagaagctgatggtggcggagaacccaaagtggtatttaaagaaaaaacagtcacttctcttggagttatggcagatggagtggccccagtcttcaaaaagagaagaactgaaaatggaaaatctagaaatttaaggcaacgaggtgatgatcaatagttgcaggagagctttttgtacatgcttttaggacagaatggagacttatacacccaaagtttatctgtgtttgtttgtaagtattatgatgctaaaaatttagatttattctaaatgtatttgatgtgaattaaaataaatattttttcatgtg

SEQ ID NO: 9608 - protein, 50 aa, Homo sapiens
MSMYQLQKLMVAENPKWYLKKKQSLLLELWQMEWPQSSKREELKMENLEI

SEQ ID NO: 9609 - DNA, 1783 bp, Homo sapiens
atagtatgaaatacatacagtattgtcatttaataattgtaagtgataaatgttatgttgaaattacatctgaatagaattaataactaaataacatgactttaaaatgtgttgagcagaatccagatgggagaaacctgatgatttcattccacacactagtgatctgccttctagtaaggtcaatgaaaattcacttggcaccctagatgaatccaaatcatcagattcgcatagtgattctgatggggaacaggaagcagaagaaggaggggtctctacagagacagaaaagccaaaaataaagtttaaggaaaaaaataaaaatagtgatggaggaagtgacccagaaacacagaaagaaaaaagtattcagaaacagaattcattaggttcaaatgaagaaaaatcgaaaactcttaagaaatcaaacccatatggagaatggcaagaaattaaacaagaggttgagtctcatgaggaggtagatttggaacttccaagcactgaaaatgagtatgtatcaacttcagaagctgatggtggcggagaacccaaagtggtatttaaagaaaaaacagtcacttctcttggagttatggcagatggagtggccccagtcttcaaaaagagaagaactgaaaatggaaaatctagaaatttaaggcaacgaggtgatgatcaatagttgcaggagagctttttgtacatgcttttaggacagaatggagacttatacacccaaagtttatctgtgtttgtttgtaagtattatgatgctaaaaatttagatttattctaaatgtatttgatgtgaattaaaataaatattttttcatgtgaaatttattttggttcctaaaatggaagcctaccacattgcattgtaatacagtgtattatgttcagtgtctaaaaactgctaattaagtcataatttaagatgctatgtatctgttatttaaaacatggagaaacagggcctttattccattcatattcataagagcatatttatcctgcattgaaaatgcattacttttgcacattgatattaactgttgtccaacaaataagtatcggagtacgtgagaatattcccagcccagtgatgatttggttctgaggctgatgtgagaaagctgatgtaaaaaatgtatgcatattggcttaccttactcaatttaaagtcaaaagccaacagccaggagcagctcaggtacttcagatgtgcttaatatggagtgaaaactggaccagaggtggaaagatgtatttgccccagttcacttcaaagcagcaaacgttgtttaagcattttagtttgaaccaggcattgtgttaggaatccagggataaagatgaatgaaatgtatttctgttcttcaggagttcacattctagcatatgccttttttcccccagtcatgcactctttttagcagtcttatatgtactagaaaagattttttaaagtttatttaaagctgtgtagatgaaggcttgatctaaaatagtataaggtctccagcttcagtaaaagtttttagtgtttacttaaattagtaatttctcactttctgtctggttaaaatgtcttaaaaagtagaattttcttctttaatccgtttagtagttacctcccttttacttttcaaattcacaaaattacatttctcataaattgtatagtatttaacttataatagttaatatttgtctttttaagatgactgtacatgtaagaaaaaagcttattaaaaacttgatcaaagaataagtt

SEQ ID NO: 9610 - protein, 50 aa, Homo sapiens; identical to SEQ ID NO: 9608

SEQ ID NO: 9611 - DNA, 2150 bp, Homo sapiens
atagtatgaaatacatacagtattgtcatttaataattgtaagtgataaatgttatgttgaaattacatctgaatagaattaataactaaataacatgactttaaaatgtgttgagcagaatccagatgggagaaacctgatgatttcattccacacactagtgatctgccttctagtaaggtcaatgaaaattcacttggcaccctagatgaatccaaatcatcagattcgcatagtgattctgatggggaacaggaagcagaagaaggaggggtctctacagagacagaaaagccaaaaataaagtttaaggaaaaaaataaaaatagtgatggaggaagtgacccagaaacacagaaagaaaaaagtattcagaaacagaattcattaggttcaaatgaagaaaaatcgaaaactcttaagaaatcaaacccatatggagaatggcaagaaattaaacaagaggttgagtctcatgaggaggtagatttggaacttccaagcactgaaaatgagtatgtatcaacttcagaagctgatggtggcggagaacccaaagtggtatttaaagaaaaaacagtcacttctcttggagttatggcagatggagtggccccagtcttcaaaaagagaagaactgaaaatggaaaatctagaaatttaaggcaacgaggtgatgatcaatagttgcaggagagctttttgtacatgcttttaggacagaatggagacttatacacccaaagtttatctgtgtttgtttgtaagtattatgatgctaaaaatttagatttattctaaatgtatttgatgtgaattaaaataaatattttttcatgtgaaatttattttggttcctaaaatggaagcctaccacattgcattgtaatacagtgtattatgttcagtgtctaaaaactgctaattaagtcataatttaagatgctatgtatctgttatttaaaacatggagaaacagggcctttattccattcatattcataagagcatatttatcctgcattgaaaatgcattacttttgcacattgatattaactgttgtccaacaaataagtatcggagtacgtgagaatattcccagcccagtgatgatttggttctgaggctgatgtgagaaagctgatgtaaaaaatgtatgcatattggcttaccttactcaatttaaagtcaaaagccaacagccaggagcagctcaggtacttcagatgtgcttaatatggagtgaaaactggaccagaggtggaaagatgtatttgccccagttcacttcaaagcagcaaacgttgtttaagcattttagtttgaaccaggcattgtgttaggaatccagggataaagatgaatgaaatgtatttctgttcttcaggagttcacattctagcatatgccttttttcccccagtcatgcactctttttagcagtcttatatgtactagaaaagattttttaaagtttatttaaagctgtgtagatgaaggcttgatctaaaatagtataaggtctccagcttcagtaaaagtttttagtgtttacttaaattagtaatttctcactttctgtctggttaaaatgtcttaaaaagtagaattttcttctttaatccgtttagtagttacctcccttttacttttcaaattcacaaaattacatttctcataaattgtatagtatttaacttataatagttaatatttgtctttttaagatgactgtacatgtaagaaaaaagcttattaaaaacttgatcaaagaataagttaaatattgttattctaattccagtcagaatcaccttagcattggtgagatagtatttggagatttgtctttgcattttttcagtctactttttgggtattttatgaatgtgaaagcctaaactttccccttcattaggaagagatacttaataattcttgatagcccattcatcatctaggtgagcagtgcattctggtgctttactcttctcaggtggaaaaaataatggactgtaaatgcagtggtcctatactttacccacatttagctcttaaaaaatacaaaattgaaggcatttttaagattagacctcatgtaaagtttctctttgatgatttttaaaacaatctcctttacttttgaaa

SEQ ID NO: 9612 - protein, 50 aa, Homo sapiens; identical to SEQ ID NO: 9608

SEQ ID NO: 9613 - DNA, 1772 bp, Homo sapiens
ctgcagtagcggcttctgcggctccaagccagcgggtcctgtgaaggcgagcagacgcggagaaaggacgcgggagtgagagaggctgtacagttttggtgttcatcttagaggattcttcagcagaagtgatatttctttactgttttgtgaggtaatactgattttgaaaatatatataagctaaaaacagtatttcgttgatatcagtagtcattgtgttaactataaagtcaagtgccagcaaagaactttaaaactgtaaagctgtgtatagaactgttttgtgtagcatggaaatattctgtcagctttttaaagtcactaaatgttcttgattatcagcttgaaggtatttttgtattacaagttgacagttgctgggtgtagtggctcatgcctgtaatcctagcaactcggggctgaggtgggaggattgcttcagcccaggagtttgagaccagcctgggcaacatagcaaaaccccatctctacaaaaataaaaaatatgtctgggcatggtggcccaagtctgagtcccagttacttgggaggatcacttgaatgtaggatcacttgagtctaggagttcggggctgcagctatcatctgcagctataatcatagctcactgcagctatgatcatgtctcagcactccagctttggcaacagaacgagatcccatctcttagaaaaacaaagttgatagttaaagaacataagtggatgatggcatttgaggccactagtgaaagtatgttttctctaaaatatttctctaatagtgatataaatggctattttattatgatgtttgtatgtgttttgtatttctctgtaaaccatgctccagtctttgtttttctgttaccataatgtaagagaaggtcctggaacagagactaaatcccacgaaactgacattgttaaacacactaaaacagaagtacttacctcttgaagatttaatatataatggttgacatgatacatgtacatgatgaatgaccagatgcttatggtctacattttcctttatcctgttagtattaccttccttaatctttgttcattaacatgctaattcctcttcagtgtttattttctagtgacagaatgctaacatttcttacaccctggcagaagggagagaaatgtgttttggggtgggtaactaaatttttgagtgaaatatcataagatgagaatggaaagagggagacacaaagagttataacaaaaaaacaatggtttttttagccatttgactggctctttaaatagtctacaagacattcacgtttaacatcacttttagtgaaataaaatgtgccatactagtatgtgcttcaaaagggcaaatgtgctttagtgccctaaggctaaattttggtcatttgacatcagagatgttgtaagtattgcacttaatacgcacctatttctcaatagtgttattttttggctagcattttctttaccactatcttgttgatagctttttgttctctaaggttgaaacatgacagtgcttatctcaaacagattacccatctgcagaactaaggaaagcaatttatgtatgaaagaaattcttgaattcgtcattctcaacctttgaattaaagcttagactaaatagtaatatatcgtgggaaggattttggttttgtgatatttctgtgaattaaggaatagatgttaaccattattttgtagaaaagtgatttgtatgtggttaattataaataaaactggtaccagaactta

SEQ ID NO: 9614 - protein, 49 aa, Homo sapiens
MMAFEATSESMFSLKYFSNSDINGYFIMMFVCVLYFSVNHAPVFVFLLP

SEQ ID NO: 9615 - DNA, 4934 bp, Homo sapiens
ttgtcgcccacgctgcagtagcggcttctgcggctccaagccagcggcggcccaagaagattcacaaacccacagtttcggcctttttcacgggtccagaggaattaaaggacacggcccattctgcagccctgctggcacagctcaagtccttctacgatgcgcggctgctgtgtgatgtgaccatcgaggtggtgacgcctggcagcgggcctggcacgggtcgcctgttcccctgcaaccgcaatgtgctggccgcggcatgtccctacttcaagagcatgttcacaggtggcatgtacgagagccagcaggccagcgtgaccatgcacgatgtggacgccgagtccttcgaggtgttggtcgactactgctacacgggtcgtgtgtctctcagtgaggccaacgtggagcgcctgtacgcggcctccgacatgctacagctggaatatgtgcgggaagcctgtgcctccttcttagcccgacgtcttgacctgaccaactgcaccgccatcctcaagtttgcagatgcctttggccatcgcaagctgcgatcccaggcccagtcctatatagctcagaacttcaagcaactcagccacatgggttcaattcgggaggagactctagcagatctgaccctggcccagctgctggctgtcctgcgcttggatagtctggacgtggagagtgagcagacagtgtgccatgtggcagtgcagtggctggaggctgctcccaaagagcggggtcccagtgctgcagaagtcttcaagtgcgtgcgctggatgcacttcactgaagaagatcaggactacttagaagggctgctgaccaagcccatcgtgaagaagtactgcctggacgttattgaaggggccctgcagatgcgctatggtgacctgttgtacaagtctctggtgccagtgccaaacagcagcagcagcagtagcagcagcaactctcttgtatctgcagcagaaaatccaccccagagactgggtatgtgtgccaaggagatggtgatcttctttggacaccccagagatccctttctctgctgtgatccatactcgggggacctttacaaagtgccgtcacctttgacctgtctggctcacactaggactgtcaccactttagctgtctgtatctctcctgaccatgacatctatctagctgctcagcccaggacagacctctgggtgtataaaccagctcagaatagttggcagcaacttgcagatcgcttgctgtgtcgtgagggcatggatgtggcatatctcaatggctatatctacattttgggggggcgagaccctattactggagttaagttgaaggaagtggaatgctacaatgttaagagaaaccagtgggcattggtggctccactgccccattcttttttatcctttgacctaatggtaattcgagactatctctatgctctcaacagtaagcgcatgttctgttatgatcctagccacaatatgtggctgaagtgcgtttctctgaagcgcaatgactttcaggaagcctgcgtcttcaatgaggagatctattgtatctgtgatatcccagtcatgaaggtctacaacccagttagggcagaatggaggcaaatgaataatattcccttggtctcagagaccaacaactacagaattatcaagcatggccaaaaattgttgctcatcacctctcgcaccccacagtggaaaaagaaccgggtgactgtgtatgaatatgatattaggggagaccaatggattaatataggtaccacattaggcctcttgcagtttgattctaactttttttgcctctctgctcgtgtttatccttcctgccttgaacctggtcagagtttcctcactgaagaagaagaaataccaagtgagtctagcactgaatgggacttaggtggattcagtgagccagactctgagtcaggaagttcaagttctctttctgatgatgatttttgggtgcgtgtagcgcctcagtgaaatgcacaggatcaacagggtttgttgtaactagattgaaacactaagttgtttttactgttttggaaaatatcttaaatatcctttttgttcctaaaggagaggaaaagttgattaacttctggtttggtttagaaaaagtaatgtttgaaatacgaaggtaatttaatgttacaaattttaacactcaaatcaaccttttaataattttctgtgctaagggtccagtatttatttgattatttagtatgtttatgtttcatgacactaatttagtcttttgatacattttacattctgtttactgccacaagcactgtggcaataacttttgaattttaatttttataatagaaaaatgattaggaattgctagatagtgttttgaaagcatatctttttcttcagaacaatgtagacttccaaaatggttaacctaaggggtctttacaaaatgtgttataagttaaacataatttgggaagttttacttttgttttcttctatgaagaaaaaaatgcaggctgggcgcggtggctcacgcctgtaatcctagcactttgggaggccgaggcaggtggatcacctgaggtcagttcaagaccagcctggccaacatggtgaaaccccgtctctactaaaaatacaaaaattagctgggcgtggtggcatgcgcctgtaatcccagctacccaggaggctgaggcaggagaattgctgaaacccgggagtcagaggctgcagagagccgagactgggccactgcactccagcctggatgacagagtgagactccgtctcaaaaaaaaaaaaaaaaaaaaaaggaaaaaaaaaaaagaaaaaaaaccatatgtgtattagggtgactgagtggtgacttcatttataataatacagagaatagctataagctcattgacagtaaaaacaacaaaccaggattctactgtttgaaaagaagtttcgttttaattttggaatttagaatgtgtatttgcaaagtcaccaattttcatctaaaaggttatattctagttgtgtcaccaaatcatcaaaaaaccttaaaaaagaagtaacttgctttgtaggtttgtattgttgatctaaacctgatacatgcttcatttaatcaggaataatccttttttttctgctggacatgtataaatttcactggattgtataaatttttatctattgccttaaacatttacatgattctcaatatgttttagctgtacagttttggtgttcatcttagaggattcttcagcagaagtgatatttctttactgttttgtgaggtaatactgattttgaaaatatatataagctaaaaacagtatttcgttgatatcagtagtcattgtgttaactataaagtcaagtgccagcaaagaactttaaaactgtaaagctgtgtatagaactgttttgtgtagcatggaaatattctgtcagctttttaaagtcactaaatgttcttgattatcagcttgaaggtatttttgtattacaagttgacagttgctgggtgtagtggctcatgcctgtaatcctagcaactcggggctgaggtgggaggattgcttcagcccaggagtttgagaccagcctgggcaacatagcaaaaccccatctctacaaaaataaaaaatatgtctgggcatggtggcccaagtctgagtcccagttacttgggaggatcacttgaatgtaggatcacttgagtctaggagttcggggctgcagctatcatctgcagctataatcatagctcactgcagctatgatcatgtctcagcactccagctttggcaacagaacgagatcccatctcttagaaaaacaaagttgatagttaaagaacataagtggatgatggcatttgaggccactagtgaaagtatgttttctctaaaatatttctctaatagtgatataaatggctattttattatgatgtttgtatgtgttttgtatttctctgtaaaccatgctccagtctttgtttttctgttaccataatgtaagagaaggtcctggaacagagactaaatcccacgaaactgacattgttaaacacactaaaacagaagtacttacctcttgaagatttaatatataatggttgacatgatacatgtacatgatgaatgaccagatgcttatggtctacattttcctttatcctgttagtattaccttccttaatctttgttcattaacatgctaattcctcttcagtgtttattttctagtgacagaatgctaacatttcttacaccctggcagaagggagagaaatgtgttttggggtgggtaactaaatttttgagtgaaatatcataagatgagaatggaaagagggagacacaaagagttataacaaaaaaacaatggtttttttagccatttgactggctctttaaatagtctacaagacattcacgtttaacatcacttttagtgaaataaaatgtgccatactagtatgtgcttcaaaagggcaaatgtgctttagtgccctaaggctaaattttggtcatttgacatcagagatgttgtaagtattgcacttaatacgcacctatttctcaatagtgttattttttggctagcattttctttaccactatcttgttgatagctttttgttctctaaggttgaaacatgacagtgcttatctcaaacagattacccatctgcagaactaaggaaagcaatttatgtatgaaagaaattcttgaattcgtcattctcaacctttgaattaaagcttagactaaatagtaatatatcgtgggaaggattttggttttgtgatatttctgtgaattaaggaatagatgttaaccattattttgtagaaaagtgatttgtatgtggttaattataaataaaactggtaccagaactta

SEQ ID NO: 9616 - protein, 576 aa, Homo sapiens
MFTGGMYESQQASVTMHDVDAESFEVLVDYCYTGRVSLSEANVERLYAASDMLQLEYVREACASFLARRLDLTNCTAILKFADAFGHRKLRSQAQSYIAQNFKQLSHMGSIREETLADLTLAQLLAVLRLDSLDVESEQTVCHVAVQWLEAAPKERGPSAAEVFKCVRWMHFTEEDQDYLEGLLTKPIVKKYCLDVIEGALQMRYGDLLYKSLVPVPNSSSSSSSSNSLVSAAENPPQRLGMCAKEMVIFFGHPRDPFLCCDPYSGDLYKVPSPLTCLAHTRTVTTLAVCISPDHDIYLAAQPRTDLWVYKPAQNSWQQLADRLLCREGMDVAYLNGYIYILGGRDPITGVKLKEVECYNVKRNQWALVAPLPHSFLSFDLMVIRDYLYALNSKRMFCYDPSHNMWLKCVSLKRNDFQEACVFNEEIYCICDIPVMKVYNPVRAEWRQMNNIPLVSETNNYRIIKHGQKLLLITSRTPQWKKNRVTVYEYDIRGDQWINIGTTLGLLQFDSNFFCLSARVYPSCLEPGQSFLTEEEEIPSESSTEWDLGGFSEPDSESGSSSSLSDDDFWVRVAPQ

SEQ ID NO: 9617 - DNA, 4897 bp, Homo sapiens
attgtcgcccacgctgcagtagcggcttctgcggctccaagccagcgggtcctgtgaaggcgagcagacgcggagaaaggacgcgggagtgagagagggtgagtcagccacttccttctacgatgcgcggctgctgtgtgatgtgaccatcgaggtggtgacgcctggcagcgggcctggcacgggtcgcctgttcccctgcaaccgcaatgtgctggccgcggcatgtccctacttcaagagcatgttcacaggtggcatgtacgagagccagcaggccagcgtgaccatgcacgatgtggacgccgagtccttcgaggtgttggtcgactactgctacacgggtcgtgtgtctctcagtgaggccaacgtggagcgcctgtacgcggcctccgacatgctacagctggaatatgtgcgggaagcctgtgcctccttcttagcccgacgtcttgacctgaccaactgcaccgccatcctcaagtttgcagatgcctttggccatcgcaagctgcgatcccaggcccagtcctatatagctcagaacttcaagcaactcagccacatgggttcaattcgggaggagactctagcagatctgaccctggcccagctgctggctgtcctgcgcttggatagtctggacgtggagagtgagcagacagtgtgccatgtggcagtgcagtggctggaggctgctcccaaagagcggggtcccagtgctgcagaagtcttcaagtgcgtgcgctggatgcacttcactgaagaagatcaggactacttagaagggctgctgaccaagcccatcgtgaagaagtactgcctggacgttattgaaggggccctgcagatgcgctatggtgacctgttgtacaagtctctggtgccagtgccaaacagcagcagcagcagtagcagcagcaactctcttgtatctgcagcagaaaatccaccccagagactgggtatgtgtgccaaggagatggtgatcttctttggacaccccagagatccctttctctgctgtgatccatactcgggggacctttacaaagtgccgtcacctttgacctgtctggctcacactaggactgtcaccactttagctgtctgtatctctcctgaccatgacatctatctagctgctcagcccaggacagacctctgggtgtataaaccagctcagaatagttggcagcaacttgcagatcgcttgctgtgtcgtgagggcatggatgtggcatatctcaatggctatatctacattttgggggggcgagaccctattactggagttaagttgaaggaagtggaatgctacaatgttaagagaaaccagtgggcattggtggctccactgccccattcttttttatcctttgacctaatggtaattcgagactatctctatgctctcaacagtaagcgcatgttctgttatgatcctagccacaatatgtggctgaagtgcgtttctctgaagcgcaatgactttcaggaagcctgcgtcttcaatgaggagatctattgtatctgtgatatcccagtcatgaaggtctacaacccagttagggcagaatggaggcaaatgaataatattcccttggtctcagagaccaacaactacagaattatcaagcatggccaaaaattgttgctcatcacctctcgcaccccacagtggaaaaagaaccgggtgactgtgtatgaatatgatattaggggagaccaatggattaatataggtaccacattaggcctcttgcagtttgattctaactttttttgcctctctgctcgtgtttatccttcctgccttgaacctggtcagagtttcctcactgaagaagaagaaataccaagtgagtctagcactgaatgggacttaggtggattcagtgagccagactctgagtcaggaagttcaagttctctttctgatgatgatttttgggtgcgtgtagcgcctcagtgaaatgcacaggatcaacagggtttgttgtaactagattgaaacactaagttgtttttactgttttggaaaatatcttaaatatcctttttgttcctaaaggagaggaaaagttgattaacttctggtttggtttagaaaaagtaatgtttgaaatacgaaggtaatttaatgttacaaattttaacactcaaatcaaccttttaataattttctgtgctaagggtccagtatttatttgattatttagtatgtttatgtttcatgacactaatttagtcttttgatacattttacattctgtttactgccacaagcactgtggcaataacttttgaattttaatttttataatagaaaaatgattaggaattgctagatagtgttttgaaagcatatctttttcttcagaacaatgtagacttccaaaatggttaacctaaggggtctttacaaaatgtgttataagttaaacataatttgggaagttttacttttgttttcttctatgaagaaaaaaatgcaggctgggcgcggtggctcacgcctgtaatcctagcactttgggaggccgaggcaggtggatcacctgaggtcagttcaagaccagcctggccaacatggtgaaaccccgtctctactaaaaatacaaaaattagctgggcgtggtggcatgcgcctgtaatcccagctacccaggaggctgaggcaggagaattgctgaaacccgggagtcagaggctgcagagagccgagactgggccactgcactccagcctggatgacagagtgagactccgtctcaaaaaaaaaaaaaaaaaaaaaaggaaaaaaaaaaaagaaaaaaaaccatatgtgtattagggtgactgagtggtgacttcatttataataatacagagaatagctataagctcattgacagtaaaaacaacaaaccaggattctactgtttgaaaagaagtttcgttttaattttggaatttagaatgtgtatttgcaaagtcaccaattttcatctaaaaggttatattctagttgtgtcaccaaatcatcaaaaaaccttaaaaaagaagtaacttgctttgtaggtttgtattgttgatctaaacctgatacatgcttcatttaatcaggaataatccttttttttctgctggacatgtataaatttcactggattgtataaatttttatctattgccttaaacatttacatgattctcaatatgttttagctgtacagttttggtgttcatcttagaggattcttcagcagaagtgatatttctttactgttttgtgaggtaatactgattttgaaaatatatataagctaaaaacagtatttcgttgatatcagtagtcattgtgttaactataaagtcaagtgccagcaaagaactttaaaactgtaaagctgtgtatagaactgttttgtgtagcatggaaatattctgtcagctttttaaagtcactaaatgttcttgattatcagcttgaaggtatttttgtattacaagttgacagttgctgggtgtagtggctcatgcctgtaatcctagcaactcggggctgaggtgggaggattgcttcagcccaggagtttgagaccagcctgggcaacatagcaaaaccccatctctacaaaaataaaaaatatgtctgggcatggtggcccaagtctgagtcccagttacttgggaggatcacttgaatgtaggatcacttgagtctaggagttcggggctgcagctatcatctgcagctataatcatagctcactgcagctatgatcatgtctcagcactccagctttggcaacagaacgagatcccatctcttagaaaaacaaagttgatagttaaagaacataagtggatgatggcatttgaggccactagtgaaagtatgttttctctaaaatatttctctaatagtgatataaatggctattttattatgatgtttgtatgtgttttgtatttctctgtaaaccatgctccagtctttgtttttctgttaccataatgtaagagaaggtcctggaacagagactaaatcccacgaaactgacattgttaaacacactaaaacagaagtacttacctcttgaagatttaatatataatggttgacatgatacatgtacatgatgaatgaccagatgcttatggtctacattttcctttatcctgttagtattaccttccttaatctttgttcattaacatgctaattcctcttcagtgtttattttctagtgacagaatgctaacatttcttacaccctggcagaagggagagaaatgtgttttggggtgggtaactaaatttttgagtgaaatatcataagatgagaatggaaagagggagacacaaagagttataacaaaaaaacaatggtttttttagccatttgactggctctttaaatagtctacaagacattcacgtttaacatcacttttagtgaaataaaatgtgccatactagtatgtgcttcaaaagggcaaatgtgctttagtgccctaaggctaaattttggtcatttgacatcagagatgttgtaagtattgcacttaatacgcacctatttctcaatagtgttattttttggctagcattttctttaccactatcttgttgatagctttttgttctctaaggttgaaacatgacagtgcttatctcaaacagattacccatctgcagaactaaggaaagcaatttatgtatgaaagaaattcttgaattcgtcattctcaacctttgaattaaagcttagactaaatagtaatatatcgtgggaaggattttggttttgtgatatttctgtgaattaaggaatagatgttaaccattattttgtagaaaagtgatttgtatgtggttaattataaataaaactggtaccagaactta

SEQ ID NO: 9618 - protein, 576 aa, Homo sapiens; identical to SEQ ID NO: 9616

SEQ ID NO: 9619 - DNA, 4987 bp, Homo sapiens
agcattgtcgcccacgctgcagtagcggcttctgcggctccaagccagcgggtcctgtgaaggcgagcagacgcggagaaaggacgcgggagtgagagagggtgagtcagccactgtctaaacgataacgggaggcggttctgcggggtagggttgaattcagtaaatgggctcgtgctgctgtctcttcggagacgctgctatcttagcgtcagcgagggaaggttgaggaggagccagagccgggtcctgcagcgtttctcgccatcagcgcccgtcgccatctccaccatgcagtcccgggaagacgccccgcgctctcgccgcctagccagtccccgtggtgggaagcggcccaagaagattcacaaacccacagtttcggcctttttcagccgagtccttcgaggtgttggtcgactactgctacacgggtcgtgtgtctctcagtgaggccaacgtggagcgcctgtacgcggcctccgacatgctacagctggaatatgtgcgggaagcctgtgcctccttcttagcccgacgtcttgacctgaccaactgcaccgccatcctcaagtttgcagatgcctttggccatcgcaagctgcgatcccaggcccagtcctatatagctcagaacttcaagcaactcagccacatgggttcaattcgggaggagactctagcagatctgaccctggcccagctgctggctgtcctgcgcttggatagtctggacgtggagagtgagcagacagtgtgccatgtggcagtgcagtggctggaggctgctcccaaagagcggggtcccagtgctgcagaagtcttcaagtgcgtgcgctggatgcacttcactgaagaagatcaggactacttagaagggctgctgaccaagcccatcgtgaagaagtactgcctggacgttattgaaggggccctgcagatgcgctatggtgacctgttgtacaagtctctggtgccagtgccaaacagcagcagcagcagtagcagcagcaactctcttgtatctgcagcagaaaatccaccccagagactgggtatgtgtgccaaggagatggtgatcttctttggacaccccagagatccctttctctgctgtgatccatactcgggggacctttacaaagtgccgtcacctttgacctgtctggctcacactaggactgtcaccactttagctgtctgtatctctcctgaccatgacatctatctagctgctcagcccaggacagacctctgggtgtataaaccagctcagaatagttggcagcaacttgcagatcgcttgctgtgtcgtgagggcatggatgtggcatatctcaatggctatatctacattttgggggggcgagaccctattactggagttaagttgaaggaagtggaatgctacaatgttaagagaaaccagtgggcattggtggctccactgccccattcttttttatcctttgacctaatggtaattcgagactatctctatgctctcaacagtaagcgcatgttctgttatgatcctagccacaatatgtggctgaagtgcgtttctctgaagcgcaatgactttcaggaagcctgcgtcttcaatgaggagatctattgtatctgtgatatcccagtcatgaaggtctacaacccagttagggcagaatggaggcaaatgaataatattcccttggtctcagagaccaacaactacagaattatcaagcatggccaaaaattgttgctcatcacctctcgcaccccacagtggaaaaagaaccgggtgactgtgtatgaatatgatattaggggagaccaatggattaatataggtaccacattaggcctcttgcagtttgattctaactttttttgcctctctgctcgtgtttatccttcctgccttgaacctggtcagagtttcctcactgaagaagaagaaataccaagtgagtctagcactgaatgggacttaggtggattcagtgagccagactctgagtcaggaagttcaagttctctttctgatgatgatttttgggtgcgtgtagcgcctcagtgaaatgcacaggatcaacagggtttgttgtaactagattgaaacactaagttgtttttactgttttggaaaatatcttaaatatcctttttgttcctaaaggagaggaaaagttgattaacttctggtttggtttagaaaaagtaatgtttgaaatacgaaggtaatttaatgttacaaattttaacactcaaatcaaccttttaataattttctgtgctaagggtccagtatttatttgattatttagtatgtttatgtttcatgacactaatttagtcttttgatacattttacattctgtttactgccacaagcactgtggcaataacttttgaattttaatttttataatagaaaaatgattaggaattgctagatagtgttttgaaagcatatctttttcttcagaacaatgtagacttccaaaatggttaacctaaggggtctttacaaaatgtgttataagttaaacataatttgggaagttttacttttgttttcttctatgaagaaaaaaatgcaggctgggcgcggtggctcacgcctgtaatcctagcactttgggaggccgaggcaggtggatcacctgaggtcagttcaagaccagcctggccaacatggtgaaaccccgtctctactaaaaatacaaaaattagctgggcgtggtggcatgcgcctgtaatcccagctacccaggaggctgaggcaggagaattgctgaaacccgggagtcagaggctgcagagagccgagactgggccactgcactccagcctggatgacagagtgagactccgtctcaaaaaaaaaaaaaaaaaaaaaaggaaaaaaaaaaaagaaaaaaaaccatatgtgtattagggtgactgagtggtgacttcatttataataatacagagaatagctataagctcattgacagtaaaaacaacaaaccaggattctactgtttgaaaagaagtttcgttttaattttggaatttagaatgtgtatttgcaaagtcaccaattttcatctaaaaggttatattctagttgtgtcaccaaatcatcaaaaaaccttaaaaaagaagtaacttgctttgtaggtttgtattgttgatctaaacctgatacatgcttcatttaatcaggaataatccttttttttctgctggacatgtataaatttcactggattgtataaatttttatctattgccttaaacatttacatgattctcaatatgttttagctgtacagttttggtgttcatcttagaggattcttcagcagaagtgatatttctttactgttttgtgaggtaatactgattttgaaaatatatataagctaaaaacagtatttcgttgatatcagtagtcattgtgttaactataaagtcaagtgccagcaaagaactttaaaactgtaaagctgtgtatagaactgttttgtgtagcatggaaatattctgtcagctttttaaagtcactaaatgttcttgattatcagcttgaaggtatttttgtattacaagttgacagttgctgggtgtagtggctcatgcctgtaatcctagcaactcggggctgaggtgggaggattgcttcagcccaggagtttgagaccagcctgggcaacatagcaaaaccccatctctacaaaaataaaaaatatgtctgggcatggtggcccaagtctgagtcccagttacttgggaggatcacttgaatgtaggatcacttgagtctaggagttcggggctgcagctatcatctgcagctataatcatagctcactgcagctatgatcatgtctcagcactccagctttggcaacagaacgagatcccatctcttagaaaaacaaagttgatagttaaagaacataagtggatgatggcatttgaggccactagtgaaagtatgttttctctaaaatatttctctaatagtgatataaatggctattttattatgatgtttgtatgtgttttgtatttctctgtaaaccatgctccagtctttgtttttctgttaccataatgtaagagaaggtcctggaacagagactaaatcccacgaaactgacattgttaaacacactaaaacagaagtacttacctcttgaagatttaatatataatggttgacatgatacatgtacatgatgaatgaccagatgcttatggtctacattttcctttatcctgttagtattaccttccttaatctttgttcattaacatgctaattcctcttcagtgtttattttctagtgacagaatgctaacatttcttacaccctggcagaagggagagaaatgtgttttggggtgggtaactaaatttttgagtgaaatatcataagatgagaatggaaagagggagacacaaagagttataacaaaaaaacaatggtttttttagccatttgactggctctttaaatagtctacaagacattcacgtttaacatcacttttagtgaaataaaatgtgccatactagtatgtgcttcaaaagggcaaatgtgctttagtgccctaaggctaaattttggtcatttgacatcagagatgttgtaagtattgcacttaatacgcacctatttctcaatagtgttattttttggctagcattttctttaccactatcttgttgatagctttttgttctctaaggttgaaacatgacagtgcttatctcaaacagattacccatctgcagaactaaggaaagcaatttatgtatgaaagaaattcttgaattcgtcattctcaacctttgaattaaagcttagactaaatagtaatatatcgtgggaaggattttggttttgtgatatttctgtgaattaaggaatagatgttaaccattattttgtagaaaagtgatttgtatgtggttaattataaataaaactggtaccagaactta

SEQ ID NO: 9620 - protein, 53 aa, Homo sapiens
MQSREDAPRSRRLASPRGGKRPKKIHKPTVSAFFSRVLRGVGRLLLHGSCVSQ

SEQ ID NO: 9621 - DNA, 5172 bp, Homo sapiens
agcattgtcgcccacgctgcagtagcggcttctgcggctccaagccagcgggtcctgtgaaggcgagcagacgcggagaaaggacgcgggagtgagagagggtgagtcagccactgtctaaacgataacgggaggcggttctgcggggtagggttgaattcagtaaatgggctcgtgctgctgtctcttcggagacgctgctatcttagcgtcagcgagggaaggttgaggaggagccagagccgggtcctgcagcgtttctcgccatcagcgcccgtcgccatctccaccatgcagtcccgggaagacgccccgcgctctcgccgcctagccagtccccgtggtgggaagacggcccattctgcagccctgctggcacagctcaagtccttctacgatgcgcggctgctgtgtgatgtgaccatcgaggtggtgacgcctggcagcgggcctggcacgggtcgcctgttcccctgcaaccgcaatgtgctggccgcggcatgtccctacttcaagagcatgttcacaggtggcatgtacgagagccagcaggccagcgtgaccatgcacgatgtggacgccgagtccttcgaggtgttggtcgactactgctacacgggtcgtgtgtctctcagtgaggccaacgtggagcgcctgtacgcggcctccgacatgctacagctggaatatgtgcgggaagcctgtgcctccttcttagcccgacgtcttgacctgaccaactgcaccgccatcctcaagtttgcagatgcctttggccatcgcaagctgcgatcccaggcccagtcctatatagctcagaacttcaagcaactcagccacatgggttcaattcgggaggagactctagcagatctgaccctggcccagctgctggctgtcctgcgcttggatagtctggacgtggagagtgagcagacagtgtgccatgtggcagtgcagtggctggaggctgctcccaaagagcggggtcccagtgctgcagaagtcttcaagtgcgtgcgctggatgcacttcactgaagaagatcaggactacttagaagggctgctgaccaagcccatcgtgaagaagtactgcctggacgttattgaaggggccctgcagatgcgctatggtgacctgttgtacaagtctctggtgccagtgccaaacagcagcagcagcagtagcagcagcaactctcttgtatctgcagcagaaaatccaccccagagactgggtatgtgtgccaaggagatggtgatcttctttggacaccccagagatccctttctctgctgtgatccatactcgggggacctttacaaagtgccgtcacctttgacctgtctggctcacactaggactgtcaccactttagctgtctgtatctctcctgaccatgacatctatctagctgctcagcccaggacagacctctgggtgtataaaccagctcagaatagttggcagcaacttgcagatcgcttgctgtgtcgtgagggcatggatgtggcatatctcaatggctatatctacattttgggggggcgagaccctattactggagttaagttgaaggaagtggaatgctacaatgttaagagaaaccagtgggcattggtggctccactgccccattcttttttatcctttgacctaatggtaattcgagactatctctatgctctcaacagtaagcgcatgttctgttatgatcctagccacaatatgtggctgaagtgcgtttctctgaagcgcaatgactttcaggaagcctgcgtcttcaatgaggagatctattgtatctgtgatatcccagtcatgaaggtctacaacccagttagggcagaatggaggcaaatgaataatattcccttggtctcagagaccaacaactacagaattatcaagcatggccaaaaattgttgctcatcacctctcgcaccccacagtggaaaaagaaccgggtgactgtgtatgaatatgatattaggggagaccaatggattaatataggtaccacattaggcctcttgcagtttgattctaactttttttgcctctctgctcgtgtttatccttcctgccttgaacctggtcagagtttcctcactgaagaagaagaaataccaagtgagtctagcactgaatgggacttaggtggattcagtgagccagactctgagtcaggaagttcaagttctctttctgatgatgatttttgggtgcgtgtagcgcctcagtgaaatgcacaggatcaacagggtttgttgtaactagattgaaacactaagttgtttttactgttttggaaaatatcttaaatatcctttttgttcctaaaggagaggaaaagttgattaacttctggtttggtttagaaaaagtaatgtttgaaatacgaaggtaatttaatgttacaaattttaacactcaaatcaaccttttaataattttctgtgctaagggtccagtatttatttgattatttagtatgtttatgtttcatgacactaatttagtcttttgatacattttacattctgtttactgccacaagcactgtggcaataacttttgaattttaatttttataatagaaaaatgattaggaattgctagatagtgttttgaaagcatatctttttcttcagaacaatgtagacttccaaaatggttaacctaaggggtctttacaaaatgtgttataagttaaacataatttgggaagttttacttttgttttcttctatgaagaaaaaaatgcaggctgggcgcggtggctcacgcctgtaatcctagcactttgggaggccgaggcaggtggatcacctgaggtcagttcaagaccagcctggccaacatggtgaaaccccgtctctactaaaaatacaaaaattagctgggcgtggtggcatgcgcctgtaatcccagctacccaggaggctgaggcaggagaattgctgaaacccgggagtcagaggctgcagagagccgagactgggccactgcactccagcctggatgacagagtgagactccgtctcaaaaaaaaaaaaaaaaaaaaaaggaaaaaaaaaaaagaaaaaaaaccatatgtgtattagggtgactgagtggtgacttcatttataataatacagagaatagctataagctcattgacagtaaaaacaacaaaccaggattctactgtttgaaaagaagtttcgttttaattttggaatttagaatgtgtatttgcaaagtcaccaattttcatctaaaaggttatattctagttgtgtcaccaaatcatcaaaaaaccttaaaaaagaagtaacttgctttgtaggtttgtattgttgatctaaacctgatacatgcttcatttaatcaggaataatccttttttttctgctggacatgtataaatttcactggattgtataaatttttatctattgccttaaacatttacatgattctcaatatgttttagctgtacagttttggtgttcatcttagaggattcttcagcagaagtgatatttctttactgttttgtgaggtaatactgattttgaaaatatatataagctaaaaacagtatttcgttgatatcagtagtcattgtgttaactataaagtcaagtgccagcaaagaactttaaaactgtaaagctgtgtatagaactgttttgtgtagcatggaaatattctgtcagctttttaaagtcactaaatgttcttgattatcagcttgaaggtatttttgtattacaagttgacagttgctgggtgtagtggctcatgcctgtaatcctagcaactcggggctgaggtgggaggattgcttcagcccaggagtttgagaccagcctgggcaacatagcaaaaccccatctctacaaaaataaaaaatatgtctgggcatggtggcccaagtctgagtcccagttacttgggaggatcacttgaatgtaggatcacttgagtctaggagttcggggctgcagctatcatctgcagctataatcatagctcactgcagctatgatcatgtctcagcactccagctttggcaacagaacgagatcccatctcttagaaaaacaaagttgatagttaaagaacataagtggatgatggcatttgaggccactagtgaaagtatgttttctctaaaatatttctctaatagtgatataaatggctattttattatgatgtttgtatgtgttttgtatttctctgtaaaccatgctccagtctttgtttttctgttaccataatgtaagagaaggtcctggaacagagactaaatcccacgaaactgacattgttaaacacactaaaacagaagtacttacctcttgaagatttaatatataatggttgacatgatacatgtacatgatgaatgaccagatgcttatggtctacattttcctttatcctgttagtattaccttccttaatctttgttcattaacatgctaattcctcttcagtgtttattttctagtgacagaatgctaacatttcttacaccctggcagaagggagagaaatgtgttttggggtgggtaactaaatttttgagtgaaatatcataagatgagaatggaaagagggagacacaaagagttataacaaaaaaacaatggtttttttagccatttgactggctctttaaatagtctacaagacattcacgtttaacatcacttttagtgaaataaaatgtgccatactagtatgtgcttcaaaagggcaaatgtgctttagtgccctaaggctaaattttggtcatttgacatcagagatgttgtaagtattgcacttaatacgcacctatttctcaatagtgttattttttggctagcattttctttaccactatcttgttgatagctttttgttctctaaggttgaaacatgacagtgcttatctcaaacagattacccatctgcagaactaaggaaagcaatttatgtatgaaagaaattcttgaattcgtcattctcaacctttgaattaaagcttagactaaatagtaatatatcgtgggaaggattttggttttgtgatatttctgtgaattaaggaatagatgttaaccattattttgtagaaaagtgatttgtatgtggttaattataaataaaactggtaccagaactta

SEQ ID NO: 9622 - protein, 652 aa, Homo sapiens
MQSREDAPRSRRLASPRGGKTAHSAALLAQLKSFYDARLLCDVTIEVVTPGSGPGTGRLFPCNRNVLAAACPYFKSMFTGGMYESQQASVTMHDVDAESFEVLVDYCYTGRVSLSEANVERLYAASDMLQLEYVREACASFLARRLDLTNCTAILKFADAFGHRKLRSQAQSYIAQNFKQLSHMGSIREETLADLTLAQLLAVLRLDSLDVESEQTVCHVAVQWLEAAPKERGPSAAEVFKCVRWMHFTEEDQDYLEGLLTKPIVKKYCLDVIEGALQMRYGDLLYKSLVPVPNSSSSSSSSNSLVSAAENPPQRLGMCAKEMVIFFGHPRDPFLCCDPYSGDLYKVPSPLTCLAHTRTVTTLAVCISPDHDIYLAAQPRTDLWVYKPAQNSWQQLADRLLCREGMDVAYLNGYIYILGGRDPITGVKLKEVECYNVKRNQWALVAPLPHSFLSFDLMVIRDYLYALNSKRMFCYDPSHNMWLKCVSLKRNDFQEACVFNEEIYCICDIPVMKVYNPVRAEWRQMNNIPLVSETNNYRIIKHGQKLLLITSRTPQWKKNRVTVYEYDIRGDQWINIGTTLGLLQFDSNFFCLSARVYPSCLEPGQSFLTEEEEIPSESSTEWDLGGFSEPDSESGSSSSLSDDDFWVRVAPQ

SEQ ID NO: 9623 - DNA, 5182 bp, Homo sapiens
agttctcctgggcgcctagcattgtcgcccacgctgcagtagcggcttctgcggctccaagccagcgggtcctgtgaaggcgagcagacgcggagaaaggacgcgggagtgagagagggtgagtcagccactgtctaaacgataacgggaggcggttctgcggggtagggttgaattcagtaaatgggctcgtgctgctgtctcttcggagacgctgctatcttagcgtcagcgagggaaggttgaggaggagccagagccgggtcctgcagcgtttctcgccatcagcgcccgtcgccatctccaccatgcagtcccgggaagacgccccgcgctctcgccgcctagccagtccccgtggtgggaagcggcccaagaagattcacaaacccacagtttcggcctttttcacgggtccagaggaattaaaggacacggcccattctgcagccctgctggcacagctcaagtccttctacgatgcgcggctgctgtgtgatgtgaccatcgaggtggtgacgcctggcagcgggcctggcacgggtcgcctgttccccagcaggccagcgtgaccatgcacgatgtggacgccgagtccttcgaggtgttggtcgactactgctacacgggtcgtgtgtctctcagtgaggccaacgtggagcgcctgtacgcggcctccgacatgctacagctggaatatgtgcgggaagcctgtgcctccttcttagcccgacgtcttgacctgaccaactgcaccgccatcctcaagtttgcagatgcctttggccatcgcaagctgcgatcccaggcccagtcctatatagctcagaacttcaagcaactcagccacatgggttcaattcgggaggagactctagcagatctgaccctggcccagctgctggctgtcctgcgcttggatagtctggacgtggagagtgagcagacagtgtgccatgtggcagtgcagtggctggaggctgctcccaaagagcggggtcccagtgctgcagaagtcttcaagtgcgtgcgctggatgcacttcactgaagaagatcaggactacttagaagggctgctgaccaagcccatcgtgaagaagtactgcctggacgttattgaaggggccctgcagatgcgctatggtgacctgttgtacaagtctctggtgccagtgccaaacagcagcagcagcagtagcagcagcaactctcttgtatctgcagcagaaaatccaccccagagactgggtatgtgtgccaaggagatggtgatcttctttggacaccccagagatccctttctctgctgtgatccatactcgggggacctttacaaagtgccgtcacctttgacctgtctggctcacactaggactgtcaccactttagctgtctgtatctctcctgaccatgacatctatctagctgctcagcccaggacagacctctgggtgtataaaccagctcagaatagttggcagcaacttgcagatcgcttgctgtgtcgtgagggcatggatgtggcatatctcaatggctatatctacattttgggggggcgagaccctattactggagttaagttgaaggaagtggaatgctacaatgttaagagaaaccagtgggcattggtggctccactgccccattcttttttatcctttgacctaatggtaattcgagactatctctatgctctcaacagtaagcgcatgttctgttatgatcctagccacaatatgtggctgaagtgcgtttctctgaagcgcaatgactttcaggaagcctgcgtcttcaatgaggagatctattgtatctgtgatatcccagtcatgaaggtctacaacccagttagggcagaatggaggcaaatgaataatattcccttggtctcagagaccaacaactacagaattatcaagcatggccaaaaattgttgctcatcacctctcgcaccccacagtggaaaaagaaccgggtgactgtgtatgaatatgatattaggggagaccaatggattaatataggtaccacattaggcctcttgcagtttgattctaactttttttgcctctctgctcgtgtttatccttcctgccttgaacctggtcagagtttcctcactgaagaagaagaaataccaagtgagtctagcactgaatgggacttaggtggattcagtgagccagactctgagtcaggaagttcaagttctctttctgatgatgatttttgggtgcgtgtagcgcctcagtgaaatgcacaggatcaacagggtttgttgtaactagattgaaacactaagttgtttttactgttttggaaaatatcttaaatatcctttttgttcctaaaggagaggaaaagttgattaacttctggtttggtttagaaaaagtaatgtttgaaatacgaaggtaatttaatgttacaaattttaacactcaaatcaaccttttaataattttctgtgctaagggtccagtatttatttgattatttagtatgtttatgtttcatgacactaatttagtcttttgatacattttacattctgtttactgccacaagcactgtggcaataacttttgaattttaatttttataatagaaaaatgattaggaattgctagatagtgttttgaaagcatatctttttcttcagaacaatgtagacttccaaaatggttaacctaaggggtctttacaaaatgtgttataagttaaacataatttgggaagttttacttttgttttcttctatgaagaaaaaaatgcaggctgggcgcggtggctcacgcctgtaatcctagcactttgggaggccgaggcaggtggatcacctgaggtcagttcaagaccagcctggccaacatggtgaaaccccgtctctactaaaaatacaaaaattagctgggcgtggtggcatgcgcctgtaatcccagctacccaggaggctgaggcaggagaattgctgaaacccgggagtcagaggctgcagagagccgagactgggccactgcactccagcctggatgacagagtgagactccgtctcaaaaaaaaaaaaaaaaaaaaaaggaaaaaaaaaaaagaaaaaaaaccatatgtgtattagggtgactgagtggtgacttcatttataataatacagagaatagctataagctcattgacagtaaaaacaacaaaccaggattctactgtttgaaaagaagtttcgttttaattttggaatttagaatgtgtatttgcaaagtcaccaattttcatctaaaaggttatattctagttgtgtcaccaaatcatcaaaaaaccttaaaaaagaagtaacttgctttgtaggtttgtattgttgatctaaacctgatacatgcttcatttaatcaggaataatccttttttttctgctggacatgtataaatttcactggattgtataaatttttatctattgccttaaacatttacatgattctcaatatgttttagctgtacagttttggtgttcatcttagaggattcttcagcagaagtgatatttctttactgttttgtgaggtaatactgattttgaaaatatatataagctaaaaacagtatttcgttgatatcagtagtcattgtgttaactataaagtcaagtgccagcaaagaactttaaaactgtaaagctgtgtatagaactgttttgtgtagcatggaaatattctgtcagctttttaaagtcactaaatgttcttgattatcagcttgaaggtatttttgtattacaagttgacagttgctgggtgtagtggctcatgcctgtaatcctagcaactcggggctgaggtgggaggattgcttcagcccaggagtttgagaccagcctgggcaacatagcaaaaccccatctctacaaaaataaaaaatatgtctgggcatggtggcccaagtctgagtcccagttacttgggaggatcacttgaatgtaggatcacttgagtctaggagttcggggctgcagctatcatctgcagctataatcatagctcactgcagctatgatcatgtctcagcactccagctttggcaacagaacgagatcccatctcttagaaaaacaaagttgatagttaaagaacataagtggatgatggcatttgaggccactagtgaaagtatgttttctctaaaatatttctctaatagtgatataaatggctattttattatgatgtttgtatgtgttttgtatttctctgtaaaccatgctccagtctttgtttttctgttaccataatgtaagagaaggtcctggaacagagactaaatcccacgaaactgacattgttaaacacactaaaacagaagtacttacctcttgaagatttaatatataatggttgacatgatacatgtacatgatgaatgaccagatgcttatggtctacattttcctttatcctgttagtattaccttccttaatctttgttcattaacatgctaattcctcttcagtgtttattttctagtgacagaatgctaacatttcttacaccctggcagaagggagagaaatgtgttttggggtgggtaactaaatttttgagtgaaatatcataagatgagaatggaaagagggagacacaaagagttataacaaaaaaacaatggtttttttagccatttgactggctctttaaatagtctacaagacattcacgtttaacatcacttttagtgaaataaaatgtgccatactagtatgtgcttcaaaagggcaaatgtgctttagtgccctaaggctaaattttggtcatttgacatcagagatgttgtaagtattgcacttaatacgcacctatttctcaatagtgttattttttggctagcattttctttaccactatcttgttgatagctttttgttctctaaggttgaaacatgacagtgcttatctcaaacagattacccatctgcagaactaaggaaagcaatttatgtatgaaagaaattcttgaattcgtcattctcaacctttgaattaaagcttagactaaatagtaatatatcgtgggaaggattttggttttgtgatatttctgtgaattaaggaatagatgttaaccattattttgtagaaaagtgatttgtatgtggttaattataaataaaactggtaccagaactta

SEQ ID NO: 9624 - protein, 87 aa, Homo sapiens
MQSREDAPRSRRLASPRGGKRPKKIHKPTVSAFFTGPEELKDTAHSAALLAQLKSFYDARLLCDVTIEVVTPGSGPGTGRLFPSRPA

SEQ ID NO: 9625 - DNA, 5249 bp, Homo sapiens
agttctcctgggcgcctagcattgtcgcccacgctgcagtagcggcttctgcggctccaagccagcgggtcctgtgaaggcgagcagacgcggagaaaggacgcgggagtgagagagggtgagtcagccactgtctaaacgataacgggaggcggttctgcggggtagggttgaattcagtaaatgggctcgtgctgctgtctcttcggagacgctgctatcttagcgtcagcgagggaaggttgaggaggagccagagccgggtcctgcagcgtttctcgccatcagcgcccgtcgccatctccaccatgcagtcccgggaagacgccccgcgctctcgccgcctagccagtccccgtggtgggaagcggcccaagaagattcacaaacccacagtttcggcctttttcacgggtccagaggaattaaaggacacggcccattctgcagccctgctggcacagctcaagtccttctacgatgcgcggctgctgtgtgatgtgaccatcgaggtggtgacgcctggcagcgggcctggcacgggtcgcctgttcccctgcaaccgcaatgtgctggccgcggcatgtccctacttcaagagcatgttcacaggtggcatgtacgagagccagcaggccagcgtgaccatgcacgatgtggacgccgagtccttcgaggtgttggtcgactactgctacacgggtcgtgtgtctctcagtgaggccaacgtggagcgcctgtacgcggcctccgacatgctacagctggaatatgtgcgggaagcctgtgcctccttcttagcccgacgtcttgacctgaccaactgcaccgccatcctcaagtttgcagatgcctttggccatcgcaagctgcgatcccaggcccagtcctatatagctcagaacttcaagcaactcagccacatgggttcaattcgggaggagactctagcagatctgaccctggcccagctgctggctgtcctgcgcttggatagtctggacgtggagagtgagcagacagtgtgccatgtggcagtgcagtggctggaggctgctcccaaagagcggggtcccagtgctgcagaagtcttcaagtgcgtgcgctggatgcacttcactgaagaagatcaggactacttagaagggctgctgaccaagcccatcgtgaagaagtactgcctggacgttattgaaggggccctgcagatgcgctatggtgacctgttgtacaagtctctggtgccagtgccaaacagcagcagcagcagtagcagcagcaactctcttgtatctgcagcagaaaatccaccccagagactgggtatgtgtgccaaggagatggtgatcttctttggacaccccagagatccctttctctgctgtgatccatactcgggggacctttacaaagtgccgtcacctttgacctgtctggctcacactaggactgtcaccactttagctgtctgtatctctcctgaccatgacatctatctagctgctcagcccaggacagacctctgggtgtataaaccagctcagaatagttggcagcaacttgcagatcgcttgctgtgtcgtgagggcatggatgtggcatatctcaatggctatatctacattttgggggggcgagaccctattactggagttaagttgaaggaagtggaatgctacaatgttaagagaaaccagtgggcattggtggctccactgccccattcttttttatcctttgacctaatggtaattcgagactatctctatgctctcaacagtaagcgcatgttctgttatgatcctagccacaatatgtggctgaagtgcgtttctctgaagcgcaatgactttcaggaagcctgcgtcttcaatgaggagatctattgtatctgtgatatcccagtcatgaaggtctacaacccagttagggcagaatggaggcaaatgaataatattcccttggtctcagagaccaacaactacagaattatcaagcatggccaaaaattgttgctcatcacctctcgcaccccacagtggaaaaagaaccgggtgactgtgtatgaatatgatattaggggagaccaatggattaatataggtaccacattaggcctcttgcagtttgattctaactttttttgcctctctgctcgtgtttatccttcctgccttgaacctggtcagagtttcctcactgaagaagaagaaataccaagtgagtctagcactgaatgggacttaggtggattcagtgagccagactctgagtcaggaagttcaagttctctttctgatgatgatttttgggtgcgtgtagcgcctcagtgaaatgcacaggatcaacagggtttgttgtaactagattgaaacactaagttgtttttactgttttggaaaatatcttaaatatcctttttgttcctaaaggagaggaaaagttgattaacttctggtttggtttagaaaaagtaatgtttgaaatacgaaggtaatttaatgttacaaattttaacactcaaatcaaccttttaataattttctgtgctaagggtccagtatttatttgattatttagtatgtttatgtttcatgacactaatttagtcttttgatacattttacattctgtttactgccacaagcactgtggcaataacttttgaattttaatttttataatagaaaaatgattaggaattgctagatagtgttttgaaagcatatctttttcttcagaacaatgtagacttccaaaatggttaacctaaggggtctttacaaaatgtgttataagttaaacataatttgggaagttttacttttgttttcttctatgaagaaaaaaatgcaggctgggcgcggtggctcacgcctgtaatcctagcactttgggaggccgaggcaggtggatcacctgaggtcagttcaagaccagcctggccaacatggtgaaaccccgtctctactaaaaatacaaaaattagctgggcgtggtggcatgcgcctgtaatcccagctacccaggaggctgaggcaggagaattgctgaaacccgggagtcagaggctgcagagagccgagactgggccactgcactccagcctggatgacagagtgagactccgtctcaaaaaaaaaaaaaaaaaaaaaaggaaaaaaaaaaaagaaaaaaaaccatatgtgtattagggtgactgagtggtgacttcatttataataatacagagaatagctataagctcattgacagtaaaaacaacaaaccaggattctactgtttgaaaagaagtttcgttttaattttggaatttagaatgtgtatttgcaaagtcaccaattttcatctaaaaggttatattctagttgtgtcaccaaatcatcaaaaaaccttaaaaaagaagtaacttgctttgtaggtttgtattgttgatctaaacctgatacatgcttcatttaatcaggaataatccttttttttctgctggacatgtataaatttcactggattgtataaatttttatctattgccttaaacatttacatgattctcaatatgttttagctgtacagttttggtgttcatcttagaggattcttcagcagaagtgatatttctttactgttttgtgaggtaatactgattttgaaaatatatataagctaaaaacagtatttcgttgatatcagtagtcattgtgttaactataaagtcaagtgccagcaaagaactttaaaactgtaaagctgtgtatagaactgttttgtgtagcatggaaatattctgtcagctttttaaagtcactaaatgttcttgattatcagcttgaaggtatttttgtattacaagttgacagttgctgggtgtagtggctcatgcctgtaatcctagcaactcggggctgaggtgggaggattgcttcagcccaggagtttgagaccagcctgggcaacatagcaaaaccccatctctacaaaaataaaaaatatgtctgggcatggtggcccaagtctgagtcccagttacttgggaggatcacttgaatgtaggatcacttgagtctaggagttcggggctgcagctatcatctgcagctataatcatagctcactgcagctatgatcatgtctcagcactccagctttggcaacagaacgagatcccatctcttagaaaaacaaagttgatagttaaagaacataagtggatgatggcatttgaggccactagtgaaagtatgttttctctaaaatatttctctaatagtgatataaatggctattttattatgatgtttgtatgtgttttgtatttctctgtaaaccatgctccagtctttgtttttctgttaccataatgtaagagaaggtcctggaacagagactaaatcccacgaaactgacattgttaaacacactaaaacagaagtacttacctcttgaagatttaatatataatggttgacatgatacatgtacatgatgaatgaccagatgcttatggtctacattttcctttatcctgttagtattaccttccttaatctttgttcattaacatgctaattcctcttcagtgtttattttctagtgacagaatgctaacatttcttacaccctggcagaagggagagaaatgtgttttggggtgggtaactaaatttttgagtgaaatatcataagatgagaatggaaagagggagacacaaagagttataacaaaaaaacaatggtttttttagccatttgactggctctttaaatagtctacaagacattcacgtttaacatcacttttagtgaaataaaatgtgccatactagtatgtgcttcaaaagggcaaatgtgctttagtgccctaaggctaaattttggtcatttgacatcagagatgttgtaagtattgcacttaatacgcacctatttctcaatagtgttattttttggctagcattttctttaccactatcttgttgatagctttttgttctctaaggttgaaacatgacagtgcttatctcaaacagattacccatctgcagaactaaggaaagcaatttatgtatgaaagaaattcttgaattcgtcattctcaacctttgaattaaagcttagactaaatagtaatatatcgtgggaaggattttggttttgtgatatttctgtgaattaaggaatagatgttaaccattattttgtagaaaagtgatttgtatgtggttaattataaataaaactggtaccag

SEQ ID NO: 9626 - protein, 674 aa, Homo sapiens; identical to SEQ ID NO: 1397

SEQ ID NO: 9627 - DNA, 1174 bp, Homo sapiens
tgatggcgagaaacgctgcaggacccggctctggctcctcctcaaccttccctcgctgacgctaagatagcagcgtctccgaagagacagcagcacgagcccatttactgaattcaaccctaccccgcagaaccgcctcccgttatcgtttagacagtggctgactcaccctctctcactcccgcgtcctttctccgcgtctgctcgccttcacaggacccgctggcttggagccgcagaagccgctactgcagcgtgggcgacaatgctaggcgcccaggagaactaccgctcccaggttgcctttcgcgccccgagggctgctgggactctcggactcccgggccgagaccgagggaaagaatccgctttgcatgtcgggagtagtagtttgtgtaatatcgcgatccttctctggtgttccttgttttagctgacgacactcgagagcgccaattttcctagattcgattttgtggtttggaactgtggttttggaatccagagtagtcgcctcgttctagtatccaattgctccagcaccaactggtgaaaagaccatcattcttctactcagttgcatttgaagctttgtcaaaaaccagacacaattggagacacaggttcttctatcaaggccttgactggaatggcatattttcagatatgaccacattgctttgaggaaatgaggctgatgttgcagagctgataaaacccccacagaaaggccagcctacctctggtgttggccagattgagaaataaagggaaagagtacgaaagagagaaattttaaagctgggtgtccgggggagacatcatatgtcagcaggttccgtgatgcccctcaagccacaaaaccagcaagtttttattagtgattttcaaaggggagggagtgtatgggtcacagagatcacatgcttcacaaggcaataaaatatcacaaggcaaatgggggcagagcgagatcacaggaccagggcaaaattaaaattgctaatgaagttttgagcacgcattgtcattgataacatcttaccaggagacagggtttgagagcagaaaaccggtctgactaaaatttactaggcaggaatttcctcatcctaataggcctgggagtgctacgggagaccggggcttatttcatcccttatctgcaaccgtc

SEQ ID NO: 9628 - protein, 55 aa, Homo sapiens [sequence omitted]

SEQ ID NO: 9629 - DNA, 1083 bp, Homo sapiens
tgatggcgagaaacgctgcaggacccggctctggctcctcctcaaccttccctcgctgacgctaagatagcagcgtctccgaagagacagcagcacgagcccatttactgaattcaaccctaccccgcagaaccgcctcccgttatcgtttagacagtggctgactcaccctctctcactcccgcgtcctttctccgcgtctgctcgccttcacaggacccgctggcttggagccgcagaagccgctactgcagcgtgggcgacaatgctaggcgcccaggagaactaccgctcccaggttgcctttcgcgccccgagggctgctgggactctcggactcccgggccgagaccgagggaaagaatccgctttgcatgtcgggagtagtagtttgtgtaatatcgcgatccttctctggtgttccttgttttagctgacgacactcgagagcgccaattttcctagattcgattttgtggtttggaactgtggttttggaatccagagtagtcgcctcgttctagtatccaattgctccagcaccaactggtgaaaagaccatcattcttctactcagttgcatttgaagctttgtcaaaaaccagacacaattggagacacaggttcttctatcaaggccttgactggaatggcatattttcagatatgaccacattgctttgaggaaatgaggctgatgttgcagagctgataaaacccccacagaaaggccagcctacctctgaacagggtcatgcccttccaacatcccatcctgatggctggaatatggacatgagggtgaaccaccttggaccatgtgaaacagggtaacaccccaagggcagtagaacaggaagacaacaagcctgggtctcagataactttgtagctcaggatccacataaaagattggactgttatatgagaaatccttttaaagatctataaggtctctcttgcatacaaccaacttatgtgctaactaatgtataaagtgagagaaaacctcatcctatgacatattctctgtactaataaagccttgaagacattgacactctggatcaggctgtgccttga

SEQ ID NO: 9630 - protein, 55 aa, Homo sapiens [sequence omitted]

SEQ ID NO: 9631 - DNA, 941 bp, Homo sapiens
tgatggcgagaaacgctgcaggacccggctctggctcctcctcaaccttccctcgctgacgctaagatagcagcgtctccgaagagacagcagcacgagcccatttactgaattcaaccctaccccgcagaaccgcctcccgttatcgtttagacagtggctgactcaccctctctcactcccgcgtcctttctccgcgtctgctcgccttcacaggacccgctggcttggagccgcagaagccgctactgcagcgtgggcgacaatgctaggcgcccaggagaactaccgctcccaggttgcctttcgcgccccgagggctgctgggactctcggactcccgggccgagaccgagggaaagaatccgctttgcatgtcgggagtagtagtttgtgtaatatcgcgatccttctctggtgttccttgttttagctgacgacactcgagagcgccaattttcctagattcgattttgtggtttggaactgtggttttggaatccagagtagtcgcctcgttctagtatccaattgctccagcaccaactggtgaaaagaccatcattcttctactcagttgcatttgaagctttgtcaaaaaccagacacaattggagacacaggttcttctatcaaggccttgactggaatggcatattttcagatatgaccacattgctttgaggaaatgaggctgatgttgcagagctgataaaacccccacagaaaggccagcctacctctgctgggttgtagaccttcatgactgggatgtcacagatacaatagatttcatcattgaagacacatgcttcctgaaagtcactacgtttaagagaagcacagttcagccacatattgtggctaggatcatagcaaagcatgcgcttactgttgacagcataaagatagttctgaaccactatgagttcaaaggaata

SEQ ID NO: 9632 - protein, 55 aa, Homo sapiens [sequence omitted]

SEQ ID NO: 9633 - DNA, 2316 bp, Homo sapiens
tgatggcgagaaacgctgcaggacccggctctggctcctcctcaaccttccctcgctgacgctaagatagcagcgtctccgaagagacagcagcacgagcccatttactgaattcaaccctaccccgcagaaccgcctcccgttatcgtttagacagtggctgactcaccctctctcactcccgcgtcctttctccgcgtctgctcgccttcacaggacccgctggcttggagccgcagaagccgctactgcagcgtgggcgacaatgctaggcgcccaggagaactaccgctcccaggttgcctttcgcgccccgagggctgctgggactctcggactcccgggccgagaccgagggaaagaatccgctttgcatgtcgggagtagtagtttgtgtaatatcgcgatccttctctggtgttccttgttttagctgacgacactcgagagcgccaattttcctagattcgattttgtggtttggaactgtggttttggaatccagagtagtcgcctcgttctagtatccaattgctccagcaccaactggtgaaaagaccatcattcttctactcagttgcatttgaagctttgtcaaaaaccagacacaattggagacacaggttcttctatcaaggccttgactggaatggcatattttcagatatgaccacattgctttgaggaaatgaggctgatgttgcagagctgataaaacccccacagaaaggccagcctacctctgggtctcactctgttccccaggctggagtgcaatggtgcaatcatagctcactgccaccttgaactcctggacttaagcaatcttcctgcctcaacctcctgagtagctgggaccacaggtgtgtgccaccacgctcagctggatttagctaatattgaaccattgttcctaacactgatttaacaaatactgaaccattactgccaagtggttcagaatctactaaattagtgtttgctgcaactttacagaacataactactgggaataatgaaaatcaacttcattcgtgcatgtgtgtgtttattagtgattgaaaggtggctcccaaaaagatatgttcatattctaattcatggaaccttattcggaaaaaggttctttgcagatgtaattaagatgaaattatcctggattatcaggataggccctaaatccaatgacaagtgtccttataacaaacaactaaagacagtaaaggagaagaccatgtgaatttgaagagtgttatcgtttcaagccgaggaacacctggagcaaccagaagctggaagatgcaagggaggattctccccagagccttcagagaggcacaactctgctgacaccttgattttggacttctggctgctagaactgtgaaataataagttactgctatttgaagccactaagtttgtggtaatttgttacagcagcctttggaaacttatacacagacacagacacacacacacacagaaacacacacacacaaatagttaacgaatatgtttttattttgtttgttttttgtttttttttttgagacagagtcttgctttgttgcccaggctggaatgcagtggcgtgatctcagaattcactgcaacctctgactcccaggttcaagagtttggaaacttatacacagacacagacagacagacacacacacacagacacacgcacacacacacacagttaacaaatatttttgttttgttttgtttttgttttttttggtttttttttggagacaagagtcttgctttattgctcaggctggagtgcagtggcgtgacctcagaattcactgcaacctctgactcccaggttcaagagattctcctgcctcagactcccgggtagctgggattataggtgtgtgccatcactaccagctactttttgtatttttagtagagatggagtttcaccgtgttggccaggctggtctcgaactcctgatcttgtgatccatccaccttggcctcccaaagtgctggattacaggcatgagccactgtgcccggcctacaacaaatatgctattttttaggggagagctaacattttgttccacattcatcatttattagtgtgaatgacagaaagcagatgtgacttttctctttgaaaagtaactagtaactgggtcaaggctggaatctaatacactgtttagctgattgttcttttgtatgtttcctctcaaatgactgcaacacagtgaagaaaatgattatacagcttttgttaatatatgttagagttggctgccttaagacatcaataaatactgaagagat

SEQ ID NO: 9634 - protein, 74 aa, Homo sapiens [sequence omitted]

SEQ ID NO: 9635 - DNA, 4857 bp, Homo sapiens
agcagtagttctcccgggcgcctagcgggatcgccagcgcggcagtgggggcttccgcggctgcaagccagcgggtcctgtgagggcgagcggaggcggagaaagggcgcgggagtgagagagggtgagtcagccactgtctatgcaataaagggaggcctcaccgcgggatagggctgaattcagaagtgcggcccgtgccgcagtctgttccaggacgcggcttgtcttagcgtcagcgagggaaggttgaggaggagccagagcctggtcctgcagcctttctcgccgtcagcgcccgtcgccatctccaccatgcagtcccgggaagacgtcccgcgctctcgccgcctcgccagtccccgtggtgggaggcggcccaagaggatttccaagccctcggtttcggcctttttcacgggtccagaggagttaaaggacacggcccattctgcagccctgctggcacagctcaagtccttctacgacgcgcggctgctgtgtgatgtgaccatcgaggtggtgacgcctggcagcgggcctggcacgggtcgcctcttttcctgcaatcgcaacgtgctagcagctgcgtgtccctacttcaagagcatgttcacaggtggcatgtacgagagccagcaggccagcgtgaccatgcacgatgtggacgccgagtccttcgaggtgttggtcgactactgctacacgggtcgtgtgtctctcagtgaggccaatgtgcagcgcctgtacgcggcctccgacatgctacagctggaatatgtgcgggaagcctgtgcctccttcttagcccgacgtcttgacctgaccaactgcaccgccatcctcaagtttgcagacgccttcgaccatcacaagcttcgatctcaggcccagtcctacatagctcacaacttcaagcagctcagccgaatgggttcaattcgggaggagactctagcagatctaaccctggcccagctgctggctgtcctacgcctggatagtctggacatagagagtgagcggactgtatgccatgtagctgtgcagtggctggaggctgctgccaaagagcggggtcccagtgctgcagaagtcttcaagtgcgtgcgctggatgcacttcactgaagaagatcaggactacttagaagggctgctgaccaagcccatcgtgaagaagtactgcctggacgttattgaaggggccctgcagatgcgctatggtgacctgttgtacaagtctctggtgccagtgccaaacagcagcagcagcagtagcagcagcaactctcttgtatctgcagcagaaaatccaccccagagactgggtatgtgtgccaaggagatggtgatcttctttggacatcctagagatccctttctctgctatgacccttactcgggggacatttacacaatgccatcccctttgaccagctttgctcacactaagactgtcacctcctcagctgtctgtgtgtccccagaccatgacatctatctagctgctcagcccaggaaagacctctgggtgtataaaccagctcagaatagttggcagcaacttgcagatcgcttgctgtgtcgtgagggcatggatgtggcatatctcaatggctacatctacattttggggggacgagaccctattactggagttaagttgaaggaagtggaatgctacagtgttcagagaaaccagtgggcattggtggctcctgtccctcattccttctattcctttgaactcatagtggttcagaactatctttatgctgtcaacagtaagcgcatgctttgctatgatcctagccacaatatgtggctgaactgtgcttctcttaaacgtagtgactttcaggaagcatgtgtcttcaatgatgaaatctattgtatctgtgacatcccagtcatgaaggtctacaacccagctaggggagaatggaggcggattagtaatattcctttggattcagagacccacaactaccagattgtcaatcatgaccaaaagttgcttctcatcacttctacaaccccacaatggaaaaagaaccgagtgacagtgtatgagtatgatactagggaagatcagtggattaatataggtaccatgttaggccttttgcagtttgactctggctttatttgcctttgtgctcgtgtttatccttcctgccttgaacctggtcagagttttattactgaggaagatgatgcacggagtgagtctagtactgaatgggacttagatggattcagtgagctggactctgagtcaggaagttcaagttctttttcagatgatgaagtctgggtgcaagtagcacctcagcgaaatgcacaggatcagcagggttctttgtaaatagtattttgagacactaagatgtttctactgctacggaatgtattttaaacacatatcgtttctttttcttggaaaaaaagttgattaggaccacagatttggtttagaaagggtaatattttgaaatactacaaggtttagacagtccatgaaatcgacctgtttaataatttaccatcctgaaagtccagaattaaaatatggaagcaagaactatataattgattaggatgcttggtaggtttttttcattgttcaaatattcattgcacagtggattgttttgattagttagtatgctttttttttaattaattcagtcttctgttaatttttaagttttggttagtgccacaaggaatttaactttttgatttgtataatagaaaactgaactaggaattgttagcggggttttgaaggatgtgtactttccttcaaaataaagtggtagattttcaaaattttacactagtcagttctttatattctaagttaaatgtagtttgtaaaattattttggttttcttctacaaaggaaaaaattggatttatatatataaggttactgcataatgatttcattttgataatgtgcagaatggcctcataagctcacagaaagtaaaaaaaaaaaaaaaaaaaaagaaaaaatcaggattccactgttttaaaagaaatctcagtttttattttggaatataaaatgtgtatttggtatatgtgaccaattttctatcccaaaaaacacccattcttagtaatgtcatgaattaaacacccttctaaaccaaaaaaaaaaaaaaaaacggtaacttgctttttatgtttgtgtttttaatttatgcccaatacatgctttactgactcagaggaacaattcctggacatataattgggtaatgcaaatttttatccactggtcatgatttgtcttaaaatgtttacttgcctccctaaaatattttggctgtgtaggtttggtgtttgtcctagaggattcttcaacagaaagtgatttattctttactgttttgtgaggtaatatggtttagaacatatgtataagctaaaaacagtattttactcagatcagtagttatcgtgtctatcagctataaaaaaaatcaactgccagccaagaactttaaaactttaagctgtgtattatagaaccgttttgtgtagcattggaatattgtccattttgtaagtcattgtgaatgttcttaattatcagcttgaaggtatttttgtattaaaagttgacattgaagaacctaagtggatgatgggatttggggccagtagtgaaagtatgtttcctctaaaatatttccctaaacagtggtatacatggttattttattatgagatttgtatatgttctgtgtttctctgtgaacaatgtttcagtctctctgtcaccatatgtaaggggaagtccacaaatatagactacattgcacaaaactaaaattgttaattacaagaaaatataggtgcttaccttttgaaggtttattaatacatatggttgtcacaatacgtatatatgataaatggtgtacatatacagatgtttatggtgtataaatttttctatacccaattagaattatcttcctgattctttattcaataacatgctaattcctcttctatgttctatagtgacagaatgctaacttttcttataccctggcagaggacagaggagtctggtctaggatggggaactgaatttttgaacgaaaaggaaagagaaaggatgaaaaaacaaacaaacaaaaaaacacacgataatgtttcttagtcattttgattggccatttgaacagtctacaagtttaacgttatttccagtgaagtaggatggctgacctagcaatacatgtttcttcaaaagggtaaacatgctttagtgacctaaagctaaattttgtacatttgacatcagggatgttataagtactgcacttaatacaaagctatttctcaattgtgttatttttgagacaaatttttcttcaccattaacttcttgttggtagctttttgttttgtaaaaattgagagatggcaatgcttatctcaaccagattatccatctgcagaattaaggtatgcaactggtaaataaaagacaaatgctccagtttgtctttctcaacctttgagttcttaacctttgagttaaaacctagtctaaatagtgggaatgtcttggtttacagtaaggttttcttgggaaggatcttggttttgtgatctatttgtgaattaaggagtagatgttaaccattattttatagataagtgatttgtacatggttagttataaataaaactggtactagaacccaggtttcctgactttctaattcaatggttctgctaaatgtacaaaattcttgctgtgcagtgaactagcagtgttgaaatatcttcatgacaagaacccttttctaagttttccaatta

SEQ ID NO: 9636 - protein, 684 aa, Homo sapiens; identical to SEQ ID NO: 1399

SEQ ID NO: 9637 - DNA, 3993 bp, Homo sapiens
agcagtagttctcccgggcgcctagcgggatcgccagcgcggcagtgggggcttccgcggctgcaagccagcgggtcctgtgagggcgagcggaggcggagaaagggcgcgggagtgagagagggtgagtcagccactgtctatgcaataaagggaggcctcaccgcgggatagggctgaattcagaagtgcggcccgtgccgcagtctgttccaggacgcggcttgtcttagcgtcagcgagggaaggttgaggaggagccagagcctggtcctgcagcctttctcgccgtcagcgcccgtcgccatctccaccatgcagtcccgggaagacgtcccgcgctctcgccgcctcgccagtccccgtggtgggaggcggcccaagaggatttccaagccctcggtttcggcctttttcacgggtccagaggagttaaaggacacggcccattctgcagccctgctggcacagctcaagtccttctacgacgcgcggctgctgtgtgatgtgaccatcgaggtggtgacgcctggcagcgggcctggcacgggtcgcctcttttcctgcaatcgcaacgtgctagcagctgcgtgtccctacttcaagagcatgttcacaggtggcatgtacgagagccagcaggccagcgtgaccatgcacgatgtggacgccgagtccttcgaggtgttggtcgactactgctacacgggtcgtgtgtctctcagtgaggccaatgtgcagcgcctgtacgcggcctccgacatgctacagctggaatatgtgcgggaagcctgtgcctccttcttagcccgacgtcttgacctgaccaactgcaccgccatcctcaagtttgcagacgccttcgaccatcacaagcttcgatctcaggcccagtcctacatagctcacaacttcaagcagctcagccgaatgggttcaattcgggaggagactctagcagatctaaccctggcccagctgctggctgtcctacgcctggatagtctggacatagagagtgagcggactgtatgccatgtagctgtgcagtggctggaggctgctgccaaagagcggggtcccagtgctgcagaagtcttcaagtgcgtgcgctggatgcacttcactgaagaagatcaggactacttagaagggctgctgaccaagcccatcgtgaagaagtactgcctggacgttattgaaggggccctgcagatgcgctatggtgacctgttgtacaagtctctggtgccagtgccaaacagcagcagcagcagtagcagcagcaactctcttgtatctgcagcagaaaatccaccccagagactgggtatgtgtgccaaggagatggtgatcttctttggacatcctagagatccctttctctgctatgacccttactcgggggacatttacacaatgccatcccctttgaccagctttgctcacactaagactgtcacctcctcagctgtctgtgtgtccccagaccatgacatctatctagctgctcagcccaggaaagacctctgggtgtataaaccagctcagaatagttggcagcaacttgcagatcgcttgctgtgtcgtgagggcatggatgtggcatatctcaatggctacatctacattttggggggacgagaccctattactggagttaagttgaaggaagtggaatgctacagtgttcagagaaaccagtgggcattggtggctcctgtccctcattccttctattcctttgaactcatagtggttcagaactatctttatgctgtcaacagtaagcgcatgctttgctatgatcctagccacaatatgtggctgaactgtgcttctcttaaacgtagtgactttcaggaagcatgtgtcttcaatgatgaaatctattgtatctgtgacatcccagtcatgaaggtctacaacccagctaggggagaatggaggcggattagtaatattcctttggattcagagacccacaactaccagattgtcaatcatgaccaaaagttgcttctcatcacttctacaaccccacaatggaaaaagaaccgagtgacagtgtatgagtatgatactagggaagatcagtggattaatataggtaccatgttaggccttttgcagtttgactctggctttatttgcctttgtgctcgtgtttatccttcctgccttgaacctggtcagagttttattactgaggaagatgatgcacggagtgagtctagtactgaatgggacttagatggattcagtgagctggactctgagtcaggaagttcaagttctttttcagatgatgaagtctgggtgcaagtagcacctcagcgaaatgcacaggatcagcagggttctttgtaaatagtattttgagacactaagatgtttctactgctacggaatgtattttaaacacatatcgtttctttttcttggaaaaaaagttgattaggaccacagatttggtttagaaagggtaatattttgaaatactacaaggtttagacagtccatgaaatcgacctgtttaataatttaccatcctgaaagtccagaattaaaatatggaagcaagaactatataattgattaggatgcttggtaggtttttttcattgttcaaatattcattgcacagtggattgttttgattagttagtatgctttttttttaattaattcagtcttctgttaatttttaagttttggttagtgccacaaggaatttaactttttgatttgtataatagaaaactgaactaggaattgttagcggggttttgaaggatgtgtactttccttcaaaataaagtggtagattttcaaaattttacactagtcagttctttatattctaagttaaatgtagtttgtaaaattattttggttttcttctacaaaggaaaaaattggatttatatatataaggttactgcataatgatttcattttgataatgtgcagaatggcctcataagctcacagaaagtaaaaaaaaaaaaaaaaaaaaagaaaaaatcaggattccactgttttaaaagaaatctcagtttttattttggaatataaaatgtgtatttggtatatgtgaccaattttctatcccaaaaaacacccattcttagtaatgtcatgaattaaacacccttctaaaccaaaaaaaaaaaaaaaaacggtaacttgctttttatgtttgtgtttttaatttatgcccaatacatgctttactgactcagaggaacaattcctggacatataattgggtaatgcaaatttttatccactggtcatgatttgtcttaaaatgtttacttgcctccctaaaatattttggctgtgtaggtttggtgtttgtcctagaggattcttcaacagaaagtgatttattctttactgttttgtgaggtaatatggtttagaacatatgtataagctaaaaacagtattttactcagatcagtagttatcgtgtctatcagctataaaaaaaatcaactgccagccaagaactttaaaactttaagctgtgtattatagaaccgttttgtgtagcattggaatattgtccattttgtaagtcattgtgaatgttcttaattatcagcttgaaggtatttttgtattaaaagttgacattgaagaacctaagtggatgatgggatttggggccagtagtgaaagtatgtttcctctaaaatatttccctaaacagtggtatacatggttattttattatgagatttgtatatgttctgtgtttctctgtgaacaatgtttcagtctctctgtcaccatatgtaaggggaagtccacaaatatagactacattgcacaaaactaaaattgttaattacaagaaaatataggtgcttaccttttgaaggtttattaatacatatggttgtcacaatacgtatatatgataaatggtgtacatatacagatgtttatggtgtataaatttttctatacccaattagaatt

SEQ ID NO: 9638 - protein, 684 aa, Homo sapiens; identical to SEQ ID NO: 1399

SEQ ID NO: 9639 - DNA, 569 bp, Homo sapiens
agtagttctcccgggcgcctagcgggatcgccagcgcggcagtgggggcttccgcggctgcaagccagcgggtcctgtgagggcgagcggaggcggagaaagggcgcgggagtgagagagggtgagtcagccactgtctatgcaataaagggaggcctcaccgcgggatagggctgaattcagaagtgcggcccgtgccgcagtctgttccaggacgcggcttgtcttagcgtcagcgagggaaggttgaggaggagccagagcctggtcctgcagcctttctcgccgtcagcgcccgtcgccatctccaccatgcagtcccgggaagacgtcccgcgctctcgccgcctcgccagtccccgtggtgggaggcggcccaagaggatttccaagcccttctacgacgcgcggctgctgtgtgatgtgaccatcgaggtggtgacgcctggcagcgggcctggcacgggtcgcctcttttcctgcaatcgcaacgtgctagcagctgcgtgtccctacttcaagagcatgttcacaggtggcatgtacgagagccagcaggccagcgtgac

SEQ ID NO: 9640 - protein, 84 aa, Homo sapiens
MQSREDVPRSRRLASPRGGRRPKRISKPFYDARLLCDVTIEVVTPGSGPGTGRLFSCNRNVLAAACPYFKSMFTGGMYESQQAS

SEQ ID NO: 9641 - DNA, 2184 bp, Homo sapiens
cgtgatctcgggtttgtcgggctgaaatgtggcgggtctcggaaggttccgacctcagtaaagagagctaacgtgtattcttctttttcttagatgctgagatgaatcgtcacctgtgtgtttggctttttagacatccatctcttaatggttacctccagtgtcacatccagctccattctcatcaatttagacagatacatcttgatacaaggctgcaagtttttagacaaaacaggaattgcattcttcatctgttaagtaagaattggtccaggagatattgccatcaagacaccaagatgctctggaagcataaagcactacagaaatatatggagaacctgagtaaggagtaccaaacacttgagcaatgtctgcagcatatccctgtgaatgaggaaaaccgaaggtccttgaacagaaggcatgctgagttggcacctcttgcagccatttaccaagaaattcaggagactgaacaagcaattgaagaattagaatcaatgtgtaaaagcctaaataaacaagatgaaaagcagttacaagaacttgcactggaagaaaggcaaaccattgatcaaaaaatcaacatgttgtacaatgagcttttccagagccttgtgccaaaggagaaatatgacaaaaatgatgttattttagaggtgacagctggaaggactactggaggtgacatctgccaacaatttacccgagaaatatttgacatgtaccagaattattcgtgctataaacactggcaatttgaacttctgaattatacaccagcagattatggtggactacatcatgcagccgcccgaatttccggtgacggtgtctataagcatttgaagtatgagggtgggattcaccgagttcagcgcatccccgaggtgggcctgtcctcaaggatgcagcgcattcacacaggaacgatgtcggttattgtccttcctcagccagatgaggtggatgtgaaattggaccccaaggatttgcgaatagatacatttcgagccaaaggagcaggagggcagcatgttaataaaactgatagtgccgtcagacttgtccacatccccacagggctagtagtagaatgccaacaagaaagatcacagataaaaaataaagaaatagcctttcgtgtgttgagagctagactctaccagcagattattgagaaagacaagcgtcagcaacaaagtgctagaaaactgcaggtgggaacaagagcccagtcagagcgaattcggacatataatttcacccaggatagagtcagtgaccacaggatagcatatgaagttcgtgatattaaggaatttttatgtggtgggaagggcctggatcagctaattcagagactgcttcaatcagcagatgaagaagccattgctgaacttttggatgaacaccttaaatcagcaaaataaatactaacttattattatttatgattatataaatgaaatggacctatatcaagaggcagactgaagcttggaaatcattatgaatatttgtaaattacagctttaagaacacattacacataaatatatgttttgtaattaatcgaagtcacatttcctgacctaagaatttattttaggtttcctgtaaagtacaatccaactcatcaagtagaaaataagcatgcatcattgaaaagagaaagtattgagaattgattgtgtcatttaggacaagtcacttgttctctttatatgccttttttccccagccatctatgaattaatttaaatatatttttaatctactacttcaggaaaatatggtaaaatttagtaaaatatgaattttagacttccttataaaccttttatttaaatacaaagtaccttggcctatagtggatgcttatgcctgtaatcccagtgctttgaagggccaaagggggaagatctcttgaggtaagaatttgagaccagcctgggcaaaatagaccccatgtctacaaaaaaactcaaaacataaagaaaaaccataatactgttaatcatgttaaagttaagacttagactgcaacttttaaataaaaattatgaagaatatgagtcattcaataacaatgagcatctgggtacagacagtaaagccctttgattgctgtatgaattccacactatataaacaataagctgatattttaaatag

SEQ ID NO: 9642 - protein, 445 aa, Homo sapiens; identical to SEQ ID NO: 1401

SEQ ID NO: 9643 - DNA, 1865 bp, Homo sapiens
cgtgatctcgggtttgtcgggctgaaatgtggcgggtctcggaaggttccgacctcagtaaagagagctaacgtgtattcttctttttcttagatgctgagatgaatcgtcacctgtgtgtttggctttttagacatccatctcttaatggttacctccagtgtcacatccagctccattctcatcaatttagacagatacatcttgatacaaggctgcaagtttttagacaaaacaggaattgcattcttcatctgttaagtaagaattggtccaggagatattgccatcaagacaccaagatgctctggaagcataaagcactacagaaatatatggagaacctgagtaaggagtaccaaacacttgagcaatgtctgcagcatatccctgtgaatgaggaaaaccgaaggtccttgaacagaaggcatgctgagttggcacctcttgcagccatttaccaagaaattcaggagactgaacaagcaattgaagaattagaatcaatgtgtaaaagcctaaataaacaagatgaaaagcagttacaagaacttgcactggaagaaaggcaaaccattgatcaaaaaatcaacatgttgtacaatgagcttttccagagccttgtgccaaaggagaaatatgacaaaaatgatgttattttagaggtgacagctggaaggactactggaggtgacatctgccaacaatttacccgagaaatatttgacatgtaccagaattattcgtgctataaacactggcaatttgaacttctgaattatacaccagcagattatggtggactacatcatgcagccgcccgaatttccggtgacggtgtctataagcatttgaagtatgagggtgggattcaccgagttcagcgcatccccgaggtgggcctgtcctcaaggatgcagcgcattcacacaggaacgatgtcggttattgtccttcctcagccagatgaggtggatgtgaaattggaccccaaggatttgcgaatagatacatttcgagccaaaggagcaggagggcagcatgttaataaaactgatagtgccgtcagacttgtccacatccccacagggctagtagtagaatgccaacaagaaagatcacagataaaaaataaagaaatagcctttcgtgtgttgagagctagactctaccagcagattattgagaaagacaagcgtcagcaacaaagtgctagaaaactgcaggtgggaacaagagcccagtcagagcgaattcggacatataatttcacccaggatagagtcagtgaccacaggatagcatatgaagttcgtgatattaaggaatttttatgtggtgggaagggcctggatcagctaattcagagactgcttcaatcagcagatgaagaagccattgctgaacttttggatgaacaccttaaatcagcaaaataaatactaacttattattatttatgattatataaatgaaatggacctatatcaagaggcagactgaagcttggaaatcattatgaatatttgtaaattacagctttaagaacacattacacataaatatatgttttgtaattaatcgaagtcacatttcctgacctaagaatttattttaggtttcctgtaaagtacaatccaactcatcaagtagaaaataagcatgcatcattgaaaagagaaagtattgagaattgattgtgtcatttaggacaagtcacttgttctctttatatgccttttttccccagccatctatgaattaatttaaatatatttttaatctactacttcaggaaaatatggtaaaatttagtaaaatatgaattttagacttccttataaaccttttatttaaatacaaag

SEQ ID NO: 9644 - protein, 445 aa, Homo sapiens; identical to SEQ ID NO: 1401

SEQ ID NO: 9645 - DNA, 1584 bp, Homo sapiens
cgtgatctcgggtttgtcgggctgaaatgtggcgggtctcggaaggttccgacctcagtaaagagagctaacgtgtattcttctttttcttagatgctgagatgaatcgtcacctgtgtgtttggctttttagacatccatctcttaatggttacctccagtgtcacatccagctccattctcatcaatttagacagatacatcttgatacaaggctgcaagtttttagacaaaacaggaattgcattcttcatctgttaagtaagaattggtccaggagatattgccatcaagacaccaagatgctctggaagcataaagcactacagaaatatatggagaacctgagtaaggagtaccaaacacttgagcaatgtctgcagcatatccctgtgaatgaggaaaaccgaaggtccttgaacagaaggcatgctgagttggcacctcttgcagccatttaccaagaaattcaggagactgaacaagcaattgaagaattagaatcaatgtgtaaaagcctaaataaacaagatgaaaagcagttacaagaacttgcactggaagaaaggcaaaccattgatcaaaaaatcaacatgttgtacaatgagcttttccagagccttgtgccaaaggagaaatatgacaaaaatgatgttattttagaggtgacagctggaaggactactggaggtgacatctgccaacaatttacccgagaaatatttgacatgtaccagaattattcgtgctataaacactggcaatttgaacttctgaattatacaccagcagattatggtggactacatcatgcagccgcccgaatttccggtgacggtgtctataagcatttgaagtatgagggtgggattcaccgagttcagcgcatccccgaggtgggcctgtcctcaaggatgcagcgcattcacacaggaacgatgtcggttattgtccttcctcagccagatgaggtggatgtgaaattggaccccaaggatttgcgaatagatacatttcgagccaaaggagcaggagggcagcatgttaataaaactgatagtgccgtcagacttgtccacatccccacagggctagtagtagaatgccaacaagaaagatcacagataaaaaataaagaaatagcctttcgtgtgttgagagctagactctaccagcagattattgagaaagacaagcgtcagcaacaaagtgctagaaaactgcaggtgggaacaagagcccagtcagagcgaattcggacatataatttcacccaggatagagtcagtgaccacaggatagcatatgaagttcgtgatattaaggaatttttatgtggtgggaagggcctggatcagctaattcagagactgcttcaatcagcagatgaagaagccattgctgaacttttggatgaacaccttaaatcagcaaaataaatactaacttattattatttatgattatataaatgaaatggacctatatcaagaggcagactgaagcttggaaatcattatgaatatttgtaaattacagctttaagaacacattacacataaatatatgttttgtaattaatcg

SEQ ID NO: 9646 - protein, 445 aa, Homo sapiens; identical to SEQ ID NO: 1401

SEQ ID NO: 9647 - DNA, 1708 bp, Homo sapiens
cgtgatctcgggtttgtcgggctgaaatgtggcgggtctcggaaggttccgacctcagtaaagagagctaacgtgtattcttctttttcttagatgctgagatgaatcgtcacctgtgtgtttggctttttagacatccatctcttaatggttacctccagtgtcacatccagctccattctcatcaatttagacagatacatcttgatacaaggctgcaagtttttagacaaaacaggaattgcattcttcatctgttaagtaagaattggtccaggagatattgccatcaagacaccaagatgctctggaagcataaagcactacagaaatatatggagaacctgagtaaggagtaccaaacacttgagcaatgtctgcagcatatccctgtgaatgaggaaaaccgaaggtccttgaacagaaggcatgctgagttggcacctcttgcagccatttaccaagaaattcaggagactgaacaagcaattgaagaattagaatcaatgtgtaaaaagacagagtcttgctctgtggcccaggctggaatgcagtagtgtaatcatagctcactttaaccttgaactcctggactcaagcaatcctccaacctcagcctcccaagtagctgggactacaggcctaaataaacaagatgaaaagcagttacaagaacttgcactggaagaaaggcaaaccattgatcaaaaaatcaacatgttgtacaatgagcttttccagagccttgtgccaaaggagaaatatgacaaaaatgatgttattttagaggtgacagctggaaggactactggaggtgacatctgccaacaatttacccgagaaatatttgacatgtaccagaattattcgtgctataaacactggcaatttgaacttctgaattatacaccagcagattatggtggactacatcatgcagccgcccgaatttccggtgacggtgtctataagcatttgaagtatgagggtgggattcaccgagttcagcgcatccccgaggtgggcctgtcctcaaggatgcagcgcattcacacaggaacgatgtcggttattgtccttcctcagccagatgaggtggatgtgaaattggaccccaaggatttgcgaatagatacatttcgagccaaaggagcaggagggcagcatgttaataaaactgatagtgccgtcagacttgtccacatccccacagggctagtagtagaatgccaacaagaaagatcacagataaaaaataaagaaatagcctttcgtgtgttgagagctagactctaccagcagattattgagaaagacaagcgtcagcaacaaagtgctagaaaactgcaggtgggaacaagagcccagtcagagcgaattcggacatataatttcacccaggatagagtcagtgaccacaggatagcatatgaagttcgtgatattaaggaatttttatgtggtgggaagggcctggatcagctaattcagagactgcttcaatcagcagatgaagaagccattgctgaacttttggatgaacaccttaaatcagcaaaataaatactaacttattattatttatgattatataaatgaaatggacctatatcaagaggcagactgaagcttggaaatcattatgaatatttgtaaattacagctttaagaacacattacacataaatatatgttttgtaattaatcg

SEQ ID NO: 9648 - protein, 281 aa, Homo sapiens
MLYNELFQSLVPKEKYDKNDVILEVTAGRTTGGDICQQFTREIFDMYQNYSCYKHWQFELLNYTPADYGGLHHAAARISGDGVYKHLKYEGGIHRVQRIPEVGLSSRMQRIHTGTMSVIVLPQPDEVDVKLDPKDLRIDTFRAKGAGGQHVNKTDSAVRLVHIPTGLVVECQQERSQIKNKEIAFRVLRARLYQQIIEKDKRQQQSARKLQVGTRAQSERIRTYNFTQDRVSDHRIAYEVRDIKEFLCGGKGLDQLIQRLLQSADEEAIAELLDEHLKSAK

SEQ ID NO: 9649 - DNA, 1561 bp, Homo sapiens
cgggtttgtcgggctgaaatgtggcgggtctcggaaggttccgacctcagtaaagagagctaacgtgtattcttctttttcttagcgtgttgctttgtcgcccacgctggttgcagtggtgcgatctcagttcactgcaaccttcgcctcccaggttcaagcgattatcctgcctcagcttcccgagcagctaggactacaggtgtgtgccatcacgctcagctaatttttttggtatttttagtagagatggggttttcccatgttggccaggctggtctcgaactcctgacctcagatgatctgcccgcctcggcctcccaaagtggtaggattacaggcgtgagccactgtgctcggcacattttgatgctgagatgaatcgtcacctgtgtgtttggctttttagacatccatctcttaatggttacctccagtgtcacatccagctccattctcatcaatttagacagatacatcttgatacaaggctgcaagtttttagacaaaacaggaattgcattcttcatctgttaagtaagaattggtccaggagatattgccatcaagacaccaagatgctctggaagcataaagcactacagaaatatatggagaacctgagtaaggagtaccaaacacttgagcaatgtctgcagcatatccctgtgaatgaggaaaaccgaaggtccttgaacagaaggcatgctgagttggcacctcttgcagccatttaccaagaaattcaggagactgaacaagcaattgaagaattagaatcaatgtgtaaaaagacagagtcttgctctgtggcccaggctggaatgcagtagtgtaatcatagctcactttaaccttgaactcctggactcaagcaatcctccaacctcagcctcccaagtagctgggactacaggcctaaataaacaagatgaaaagcagttacaagaacttgcactggaagaaaggcaaaccattgatcaaaaaatcaacatgttgtacaatgagcttttccagagccttgtgccaaaggagaaatatgacaaaaatgatgttattttagaggtgacagctggaaggactactggaggtgacatctgccaacaatttacccgagaaatatttgacatgtaccagaattattcgtgctataaacactggcaatttgaacttctgaattatacaccagcagattatggtaggcatattgaggaatttgcctgtaggagatactgaaaattattttacctctgatcttgattagaaccatattgtcccatttttttttgaaacttttggtgtatatctactaaacactgtggcataggctcatcaatcacagtggcttactattatagcagagttgttagctaggagaagacagtagaaaggagggaagcatttgcttagggagaaatatgtgaattagagaaaattcccctgaggaacttagatacgtatcttgcctcaaaatcatttttctctattattgaaagcaaaggtatattaaggtttttactttaaataactttataaaataatataagtattactaattaga

SEQ ID NO: 9650 - protein, 151 aa, Homo sapiens
MNRHLCVWLFRHPSLNGYLQCHIQLHSHQFRQIHLDTRLQVFRQNRNCILHLLSKNWSRRYCHQDTKMLWKHKALQKYMENLSKEYQTLEQCLQHIPVNEENRRSLNRRHAELAPLAAIYQEIQETEQAIEELESMCKKTESCSVAQAGMQ

SEQ ID NO: 9651 - DNA, 1103 bp, Homo sapiens
cggaaggttccgacctcagtaaagagagctaacgtgtattcttctttttcttaggaaagtattccatgctacatgtgcaagaaacttggaaaacactgaaaagtagaaaaaatagcaagcaaaaggatctcagctaaacgggaagcatttttgaaaagtgattgcacaattgagagtgaaaattactgagtcctgaacaggcaacttacattctaataccagctctgtctccatccagccgactgaatagtcgtgattaagttacttgacttccttggatatctagatccttaaagttaaagaattatacaagataataatattttcttcaaactttagaaaatgactttatgaaccgccttaagtttgtatgttttcatagctttcaagagcttgtttacacactcaattctagattctagatactttctagaaaataactgacttaactcattcaattgatatatttgttagttgtactcctactcatatgcttcagttaattatatatgttgaacaggtaggaagcagtgctgtttttatttattttaatatgttattcatacatttgaagaattatgttctttctgtaggcagctgaattttttttttttttgagacgaagtcttggtattgtcccccttgctggagtgcaatggcatgatctcggctcactgcaacctctgcctcctgggttcaggcaattctcctgcctcagactcctgagtagctgggattacaggcgcctgccaccacgcccggataatttttgtatttttagtagagacagtgtttcactatgttggctgggctggtctcgaactcctgccctcaggtgatccgcctgcctcagcctcccaaagtgctgggattactggcgtgagccactgctgccagccggcagttgaattttaagactgtggagctggctgaggcagtagatgaaacaagatttcttgatgttccttccaggtttattatgcatgtatctttagagatgatttttttttaaagactgtgtttattgtatttcagatgctgagatgaatcgtcacctgtgtgtttggctttttagacatccatctcttaatggttacctccag

SEQ ID NO: 9652 - protein, 36 aa, Homo sapiens
MLQLIIYVEQVGSSAVFIYFNMLFIHLKNYVLSVGS

SEQ ID NO: 9653 - DNA, 1193 bp, Homo sapiens
gtgaacgtgatctcgggtttgtcgggctgaaatgtggcgggtctcggaaggttccgacctcagtaaagagagctaacgtgtattcttctttttcttagcgtgttgctttgtcgcccacgctggttgcagtggtgcgatctcagttcactgcaaccttcgcctcccaggttcaagcgattatcctgcctcagcttcccgagcagctaggactacaggatctcagctaaacgggaagcatttttgaaaagtgattgcacaattgagagtgaaaattactgagtcctgaacaggcaacttacattctaataccagctctgtctccatccagccgactgaatagtcgtgattaagttacttgacttccttggatatctagatccttaaagttaaagaattatacaagataataatattttcttcaaactttagaaaatgactttatgaaccgccttaagtttgtatgttttcatagctttcaagagcttgtttacacactcaattctagattctagatactttctagaaaataactgacttaactcattcaattgatatatttgttagttgtactcctactcatatgcttcagttaattatatatgttgaacaggtaggaagcagtgctgtttttatttattttaatatgttattcatacatttgaagaattatgttctttctgtaggcagctgaattttttttttttttgagacgaagtcttggtattgtcccccttgctggagtgcaatggcatgatctcggctcactgcaacctctgcctcctgggttcaggcaattctcctgcctcagactcctgagtagctgggattacaggcgcctgccaccacgcccggataatttttgtatttttagtagagacagtgtttcactatgttggctgggctggtctcgaactcctgccctcaggtgatccgcctgcctcagcctcccaaagtgctgggattactggcgtgagccactgctgccagccggcagttgaattttaagactgtggagctggctgaggcagtagatgaaacaagatttcttgatgttccttccaggtttattatgcatgtatctttagagatgatttttttttaaagactgtgtttattgtatttcagatgctgagatgaatcgtcacctgtgtgtttggctttttagacatccatctcttaatggttacctccag

SEQ ID NO: 9654 - protein, 36 aa, Homo sapiens; identical to SEQ ID NO: 9652

SEQ ID NO: 9655 - DNA, 1325 bp, Homo sapiens
ggaagtgaacgtgatctcgggtactcacagttctttcctgatcttccccgccgcctcctgtattgcctctttatggaatcactccatatactgagttacacagcatggtttgcccgtgctgctgccccgcgggctgtcgcttctgacctgcctacactcagaactttccccaaagcatcagagtaatactgttactgtgatgggtaatggagaagtcgtgctgttctcagcgtgttgctttgtcgcccacgctggttgcagtggtgcgatctcagttcactgcaaccttcgcctcccaggttcaagcgattatcctgcctcagcttcccgagcagctaggactacaggatctcagctaaacgggaagcatttttgaaaagtgattgcacaattgagagtgaaaattactgagtcctgaacaggcaacttacattctaataccagctctgtctccatccagccgactgaatagtcgtgattaagttacttgacttccttggatatctagatccttaaagttaaagaattatacaagataataatattttcttcaaactttagaaaatgactttatgaaccgccttaagtttgtatgttttcatagctttcaagagcttgtttacacactcaattctagattctagatactttctagaaaataactgacttaactcattcaattgatatatttgttagttgtactcctactcatatgcttcagttaattatatatgttgaacaggtaggaagcagtgctgtttttatttattttaatatgttattcatacatttgaagaattatgttctttctgtaggcagctgaattttttttttttttgagacgaagtcttggtattgtcccccttgctggagtgcaatggcatgatctcggctcactgcaacctctgcctcctgggttcaggcaattctcctgcctcagactcctgagtagctgggattacaggcgcctgccaccacgcccggataatttttgtatttttagtagagacagtgtttcactatgttggctgggctggtctcgaactcctgccctcaggtgatccgcctgcctcagcctcccaaagtgctgggattactggcgtgagccactgctgccagccggcagttgaattttaagactgtggagctggctgaggcagtagatgaaacaagatttcttgatgttccttccaggtttattatgcatgtatctttagagatgatttttttttaaagactgtgtttattgtatttcagatgctgagatgaatcgtcacctgtgtgtttggctttttagacatccatctcttaatggttacctccag

SEQ ID NO: 9656 - protein, 58 aa, Homo sapiens
MGNGEVVLFSACCFVAHAGCSGAISVHCNLRLPGSSDYPASASRAARTTGSQLNGKHF

SEQ ID NO: 9657 - DNA, 608 bp, Homo sapiens
agtgaaccaggaagtgaacgtgatctcgggtactcacagttctttcctgatcttccccgccgcctcctgtattgcctctttatggaatcactccatatactgagttacacagcatggtttgcccgtgctgctgccccgcgggctgtcgcttctgacctgcctacactcagaactttccccaaagcatcagagtaatactgttactgtgatgggtaatggagaagtcgtgctgttctcaggtgtagttaaccttggagagtaaacatcttgttttgttttgttttccttaatgttgagattcatgaccttgaaaattatgcattctactactgttcctaaaatggaaattttagcaataagtattcgtacaaacatatatttgtcatccttttattctgtctgttagcaaatggatacactttctctaacgtgcttgaaatacgggggtggtggagtgtaacgtttgtgacagctggccattggtgctttcttcaacagttcttttaataatgtgatgcagtatcctaaaatctatcagtagaactctggaaactgaatattttaaagaccattctgactattttatttcctaggtgataatgctaagt

SEQ ID NO: 9658 - protein, 38 aa, Homo sapiens
MLRFMTLKIMHSTTVPKMEILAISIRTNIYLSSFYSVC

SEQ ID NO: 9659 - DNA, 575 bp, Homo sapiens
agagagcacggcagccactaccggccgaggcggctgtgcccgggcactgcggagagcggcgtgaagtttctggaaagagcgcggcgggggtgaggcgagccgcagaagaccgcggaaaggaagcgcacggaggagcggctcggcagcccccgtgggccggccggagcgggaaagtggggtcccgcgacctccgagtttctcactctgtcacccaggctggaatgcagtggtgaatcacagctcagtacaaccttgacctcccaggctgaagtggtcttcccatttcagcctccaaagtagctgggaccagaggcacacagaaccacacctggctaatttttttatttgtagaggtgaggtcttgccatgttgcctaggctggtctcaaactcctgagttcaagcaatcttcccaccttggctccctaaagtgctgggattacaggaagaaaaattgaggcatggagatagaaagactgtaaattgcgatagccaagggctggatcccactggattagtcaaattaacggtgaaaaccaaaaactccacatttggctggatagtgagtggaggggg

SEQ ID NO: 9660 - protein, 68 aa, Homo sapiens
GEPQKTAERKRTEERLGSPRGPAGAGKWGPATSEFLTLSPRLECSGESQLSTTLTSQAEVVFPFQPPK

SEQ ID NO: 9661 - DNA, 648 bp, Homo sapiens
gtgtctttccttcagcctcgtcccaaatgccgtgggagggaaggcactctctgtcaagctgctgtcaccttacctgaagtaaggagtccacgcctgcatgtccgaggaaaacagttttctcaaacacattagttgaaaaactgaagacgctgcctaaaatacaagctgagttagagacagcccttgtaagactaggaaaggccttgtgaggacataaccaggaagagagtcctcaccagaacctgaccatacctgcaccctgatctcaagcttccagcttccagaaccatgagaaatcaatgtttgttgttttagccacccagtctacagaaatttgttatagccaccctagctgactaccacattggacatcacagcaaacactacaaccagtaagtctctgcttgtattaactggaacatttccaaagcctgtcctactcaggataaatgcacaaaagaaaaattagtagttgacggcagaattcttaagagagcagttttgcattttttaccaagtaatacttatttaacttctagggcagtaaagtaagagaaattgttactctccacctcctgccatcatgaatttaggaaatgtagaaagttattctgttaataaagatgtgaacttgctgttgaagagaaa

SEQ ID NO: 9662 - protein, 43 aa, Homo sapiens
SKESTPACPRKTVFSNTLVEKLKTLPKIQAELETALVRLGKAL

SEQ ID NO: 9663 - DNA, 2010 bp, Homo sapiens
agagagaagaccgcgaggaacggaaagcgcatgcgtcctagtggtgctgcagcgcccggggagtcgcggaggggaggggtgaaaatgggcttgcgggactgacgcacgcgcattgggataccagatccccgcctcctgctccaggtttcccctcctccttcaccaccctcccggaagtggagccgccctcgcgcccaccagcggctaccccctgcggcaggccccgcccacacaggctccgccccccggcgctccgccccctcctcttgtagtggcgccggcttgcatcccaggtcgtggcggttttggtgcctgaagcagggagcgcggagtcgttcccgagagaggcggccaggctatgctcgccggtttccggcgttccgctccggccagccagagtctctgtctcaacctgtgtccgtgctccagcagtctcctcagcccggccccgcggcgcggttggcggcggcgccccaggcgcgccccctcctccgatggcggcggagatccagcccaagcctctgacccgcaagccgatcctgctgcagcggatggaggggtcccaggaggtggtgaatatggccgtgatcgtgcccaaagaggagggcgtcatcagcgtctccgaggacagatccaatggaaaacattgtaaacatacaccagtggcaagcattctgcaatgaacagaagaaattcatggctgaaatggagtacatggatgtaggacccttttgaaattcacagagaagccttatgagaaagtttgattttttccataaaggcaaaattttattaaaaagactgcttctggacctagaaattctttggcacagtattgtttttatgggatatattccataaaatatattgaaggaatatattggtagatgtcactttcccagtctgtaactactggagatggaactgatcaatttctaactgctgtggaaaattcataagcaaattcatggaatcaagaaaaggagaagggtagttaaacctaagctgctttaatattttatttatttttttaagactagttaagtacggtagtgagaaggggaagagagtagaacaaggagttcaatctgtaactgactgtgaacaattgagataataaaactaccttcagaccatcctaagctcctttaatattaaggtgttattatagtattgaaacttctgattcccatttcaccacatttaccttgaaggaaacagctttactggggtatattttcaagtgtttggagacgctgaagtagtgtatattaatgaaactgaagaataaatttcatttgattataggatgaaagaaatgcaatgttcagctatgtcttagcctaattttcactttcctagtgtacaatgtaaataatagaaattattttgtcatggagttactgttaaataaggttcacccataagtctggaattattattaatatactttttttcaagttgacaagtctgtgcttctttgggtcatatactcaaacatgaacataactttgttatttagagctcagttttggttatggttttcattaaaataattgatctatattcttgctttccaaaattcaatgttaatgtcacttggtacaatgctaaatatatgaaaatgtaatattgattttcatcacaacctacaaagccattaccattcactgctttagctagaaactagtaatcttcattcctgaactctgaggttaaagccgcaagtaatgttccatacctgaatggcagtgttccataaattcttaatgaaaccctggtttatctttttgacctttgacttcttcattgcctttatgtgtgcctttgaaaacacttaacattttccattttaaacggtgttatacagtatatacttcatgtccattttattttctcttctgtgagttccctatggagctttgtgtgtcttattcattgtatcatcattagggcctaacatggtacctggcatgcaatacgtcctcaatacacgtttgttgtatcagt

SEQ ID NO: 9664 - protein, 97 aa, Homo sapiens
MLAGFRRSAPASQSLCLNLCPCSSSLLSPAPRRGWRRRPRRAPSSDGGGDPAQASDPQADPAAADGGVPGGGEYGRDRAQRGGRHQRLRGQIQWKTL

SEQ ID NO: 9665 - DNA, 794 bp, Homo sapiens
agagagaagaccgcgaggaacggaaagcgcatgcgtcctagtggtgctgcagcgcccggggagtcgcggaggggaggggtgaaaatgggcttgcgggactgacgcacgcgcattgggataccagatccccgcctcctgctccaggtttcccctcctccttcaccaccctcccggaagtggagccgccctcgcgcccaccagcggctaccccctgcggcaggccccgcccacacaggctccgccccccggcgctccgccccctcctcttgtagtggcgccggcttgcatcccaggtcgtggcggttttggtgcctgaagcagggagcgcggagtcgttcccgagagaggcggccaggctatgctcgccggtttccggcgttccgctccggccagccagagtctctgtctcaacctgtgtccgtgctccagcagtctcctcagcccggccccgcggcgcggttggcggcggcgccccaggcgcgccccctcctccgatggcggcggagatccagcccaagcctctgacccgcaagccgatcctgctgcagcggatggaggggtcccaggaggtggtgaatatggccgtgatcgtgcccaaagaggagggcgtcatcagcgtctccgaggacagcccttataagatcctagttgtgaccgtttcaattaatttcatgacccactaaaggattgtgaacaagagtttgaaatattacagagctttagaagaactgttcgtgtttggttaaagagagacagtggacagtattggccaagcgtataccatgcaatgcctt

SEQ ID NO: 9666 - protein, 93 aa, Homo sapiens
MLAGFRRSAPASQSLCLNLCPCSSSLLSPAPRRGWRRRPRRAPSSDGGGDPAQASDPQADPAAADGGVPGGGEYGRDRAQRGGRHQRLRGQPL

SEQ ID NO: 9667 - DNA, 1941 bp, Homo sapiens
agagagaagaccgcgaggaacggaaagcgcatgcgtcctagtggtgctgcagcgcccggggagtcgcggaggggaggggtgaaaatgggcttgcgggactgacgcacgcgcattgggataccagatccccgcctcctgctccaggtttcccctcctccttcaccaccctcccggaagtggagccgccctcgcgcccaccagcggctaccccctgcggcaggccccgcccacacaggctccgccccccggcgctccgccccctcctcttgtagtggcgccggcttgcatcccaggtcgtggcggttttggtgcctgaagcagggagcgcggagtcgttcccgagagaggcggccaggctatgctcgccggtttccggcgttccgctccggccagccagagtctctgtctcaacctgtgtccgtgctccagcagtctcctcagcccggccccgcggcgcggttggcggcggcgccccaggcgcgccccctcctccgatggcggcggagatccagcccaagcctctgacccgcaagccgatcctgctgcagcggatggaggggtcccaggaggtggtgaatatggccgtgatcgtgcccaaagaggagggcgtcatcagcgtctccgaggacaggacagttcgtgtttggttaaagagagacagtggacagtattggccaagcgtataccatgcaatgccttctccatgttcatgcatgtcttttaacccggaaacaagaagactgtccataggtctagacaatggtacaatctcagagtttatattgtcagaagattataacaagatgactcctgtgaaaaactatcaagcgcatcagagcagagtgacgatgatcctgtttgtcctggagctggagtgggtgctgagcacaggacaggacaagcaatttgcctggcactgctctgagagtgggcagcgcctgggaggttatcggaccagtgctgtggcctcaggcctgcaatttgatgttgaaacccggcatgtgtttatcggtgaccactcaggccaagtaacaatcctcaaactggagcaagaaaactgcaccctggtcacaacattcagaggacacacaggtggggtgaccgctctctgttgggacccagtccagcgggtgttgttctcaggcagttcagatcactctgtcatcatgtgggacatcggtgggagaaaaggaacagccatcgagctccaaggacacaacgacagagtccaggccctctcctatgcacagcacacgcgacaattgatctcctgtggcggtgatggtgggattgtcgtctggaacatggacgtggagaggcaggagacccctgaatggttggacagtgattcctgccaaaagtgtgatcagcctttcttctggaacttcaagcaaatgtgggacagtaagaaaattggtctaagacagcaccactgccgcaagtgtgggaaggccgtctgtggcaagtgcagctccaagcgctcctccatccccctgatgggcttcgagtttgaagtgagggtctgtgacagctgccacgaggccatcacagatgaagaacgtgcacccacagccaccttccatgacagtaaacataacattgtgcatgtgcatttcgatgcaaccagaggatggttactgacttctggaactgacaaggttattaagttgtgggatatgaccccagtcgtgtcttgatgactctcccaggaatcagaaagatagtatttactaaagaaacggttgttttaacccaaatcattaccagagtggtaaagcagacatgtgagaagtaagaaagaaactaaagaccctgaatgaatttgcagattacccatgtgcacagtggggacctggccagtgagcactcgcaaggggactcttccaacttgttcatacaatataaaagaagctatttttttaacaaatggtttatacagtc

SEQ ID NO: 9668 - protein, 400 aa, Homo sapiens; identical to SEQ ID NO: 1403

SEQ ID NO: 9669 - DNA, 4032 bp, Homo sapiens
agagagaagaccgcgaggaacggaaagcgcatgcgtcctagtggtgctgcagcgcccggggagtcgcggaggggaggggtgaaaatgggcttgcgggactgacgcacgcgcattgggataccagatccccgcctcctgctccaggtttcccctcctccttcaccaccctcccggaagtggagccgccctcgcgcccaccagcggctaccccctgcggcaggccccgcccacacaggctccgccccccggcgctccgccccctcctcttgtagtggcgccggcttgcatcccaggtcgtggcggttttggtgcctgaagcagggagcgcggagtcgttcccgagagaggcggccaggctatgctcgccggtttccggcgttccgctccggccagccagagtctctgtctcaacctgtgtccgtgctccagcagtctcctcagcccggccccgcggcgcggttggcggcggcgccccaggcgcgccccctcctccgatggcggcggagatccagcccaagcctctgacccgcaagccgatcctgctgcagcggatggaggggtcccaggaggtggtgaatatggccgtgatcgtgcccaaagaggagggcgtcatcagcgtctccgaggacaggacagttcgtgtttggttaaagagagacagtggacagtattggccaagcgtataccatgcaatgccttctccatgttcatgcatgtcttttaacccggaaacaagaagactgtccataggtctagacaatggtacaatctcagagtttatattgtcagaagattataacaagatgactcctgtgaaaaactatcaagcgcatcagagcagagtgacgatgatcctgtttgtcctggagctggagtgggtgctgagcacaggacaggacaagcaatttgcctggcactgctctgagagtgggcagcgcctgggaggttatcggaccagtgctgtggcctcaggcctgcaatttgatgttgaaacccggcatgtgtttatcggtgaccactcaggccaagtaacaatcctcaaactggagcaagaaaactgcaccctggtcacaacattcagaggacacacaggtggggtgaccgctctctgttgggacccagtccagcgggtgttgttctcaggcagttcagatcactctgtcatcatgtgggacatcggtgggagaaaaggaacagccatcgagctccaaggacacaacgacagagtccaggccctctcctatgcacagcacacgcgacaattgatctcctgtggcggtgatggtgggattgtcgtctggaacatggacgtggagaggcaggagacccctgaatggttggacagtgattcctgccaaaagtgtgatcagcctttcttctggaacttcaagcaaatgtgggacagtaagaaaattggtctaagacagcaccactgccgcaagtgtgggaaggccgtctgtggcaagtgcagctccaagcgctcctccatccccctgatgggcttcgagtttgaagtgagggtctgtgacagctgccacgaggccatcacagatgaagaacgtgcacccacagccaccttccatgacagtaaacataacattgtgcatgtgcatttcgatgcaaccagaggatggttactgacttctggaactgacaaggttattaagttgtgggatatgaccccagtcgtgtcttgatgactctcccaggaatcagaaagatagtatttactaaagaaacggttgttttaacccaaatcattaccagagtggtaaagcagacatgtgagaagtaagaaagaaactaaagaccctgaatgaatttgcagattacccatgtgcacagtggggacctggccagtgagcactcgcaaggggactcttccaacttgttcatacaatataaaagaagctatttttttaacaaatggtttatacagtctggctgtgctgcattgttttgagtgtaccgaaaaatctgtgtggggtgtttaatttttatacttttcaacaccccattttacttgttgctttgtcagagaaataagggaggtatctactcagagtattttggtcattatactttctgtgtttacttcaacatgtgtcacgtggccagcggctttttcttctcttccctctgcacctacctgcaccttctctgcctttcctggaggggatgtatttatgttatttattcccagtgtttctgctttcatgtcctcctcagtggagagatttggaaactcatcatgtggattcaccagccagctgctggaattgcctgaagagcgatttgtttgtaatgtctgcctcattcacgttcttatgaagtagaaaagactgtgtttctgcctcagttgcctctgtctttcccacattaaaaaaaaaaatgctgtgagaaagctgctcccaaccatggttatcacagaagtagattattttaactcagagcttcaacgatcagtgcctggatcatttagaattcagttggagcctcctgagcctcttgttttagcttttttgacgcagctctccctcactcgtaacaatgaaaacaaatgacacacacacaaaatcctacatcagcggccctcaaccttgttggcagcagggaccggtttcaaaatgaaactgttccacctcggatcagcaggcattagcttctcataaggagcacgcaacctaaatccctcgcatgcgcagttcacaatagagtttctgctcctgtgagaatctgacgccaccgctgatctgatgggaggcggagcccaggcagtaacacttgcttgcccactgctcacgtctgatgggtgcccccattcctcacaggctatggaccagtacccatctgcagcccagggttggggacccccaccatacatgctctgaaaataagtgtctttaagttgtgtttttctgtgtgacatcatctctgaacttgaacatgttcattacggcaagattgtaatcctgctgtattcctcgccctctgtattctatccctttaaaaactagatatttaaacattttatcctaatgtgtttcatcagaacactttgcacactttcttactaaaacggtatgtgggtggtccgagacagaatggtacctacagtgcaggctatgtttctgtgggaatggaaaagaggactttagaaagtgaacctgaagaactcttatttctaagggaatccagtcaagcttgagaaaatgaaatattcttgtgtgtagtgattcagctcaggatattgaagtcccttttaaaaatcttattttcacctgtaaaaatagaataaaaattaatggcaagcctgcgccaggtgcctgcccctcctaagcactttacacgcacagctcattcaacctcacgtgtcgggagcatcagggagctcaccagtctcttgaggatcacaggccaattgcttgtccttcccgacccaagccccaccccacagtgtcttgctctcttctgattttacaggttttttggcagtaatacacatgggagtgaaattgaaatcctccctattattttccctcttttcctggaaagccgttttttgccctcacaatcattcattacttctctaactagggggaagtactacaagctgtcctcaggtactgcccctacgtgtgtttccctgggatggggccttgctagaggtgattctgctgccccagcattgggaagcaggaccagtgcatgtgccccatgcagccacggtacatggaagctgtcacttgagccatcagaccggctcagcccatgtgaccggagctctgaagaggcacacacgcatgccccgcacaggctgttagcacttgtcgcctcgctgccctggtccagactacccttgcttgcgtcagtcaaaactgttgtaactactttgagtcttttctgcatgattgctctttgagagaactttaacaagggaattaaatttaaaatattcaaatatctattttgtagtttattactagaagctgcagccacttactaagttgtatgtaatataggactgtgtgt

SEQ ID NO: 9670 - protein, 400 aa, Homo sapiens; identical to SEQ ID NO: 1403

SEQ ID NO: 9671 - DNA, 266 bp, Homo sapiens
cacactggaaccacaaagaaaaacaagtgccacctctgttgtcaggaagctcacagggggagacaggtcatagaacattacaacaaagcaagggtttctccatgatagacagatgctactgtgtggaaactgcaagtgaattgaggtggccagcggtttcaagactcagagactcaagctgggtgttgtccagtattgtccagcctctggtcccctcttgccaaggagctcagttctcacattaatgaccttggtacaacagaccc

SEQ ID NO: 9672 - protein, 47 aa, Homo sapiens
MIDRCYCVETASELRWPAVSRLRDSSWVLSSIVQPLVPSCQGAQFSH

SEQ ID NO: 9673 - DNA, 3324 bp, Homo sapiens
agtttgatctcagactgctgtgctagcaatcagcaagactgtgggcgtaggaccctccgagccaggagtttatattgtcagaagattataacaagatgactcctgtgaaaaactatcaagcgcatcagagcagagtgacgatgatcctgtttgtcctggagctggagtgggtgctgagcacaggacaggacaagcaatttgcctggcactgctctgagagtgggcagcgcctgggaggttatcggaccagtgctgtggcctcaggcctgcaatttgatgttgaaacccggcatgtgtttatcggtgaccactcaggccaagtaacaatcctcaaactggagcaagaaaactgcaccctggtcacaacattcagaggacacacaggtggggtgaccgctctctgttgggacccagtccagcgggtgttgttctcaggcagttcagatcactctgtcatcatgtgggacatcggtgggagaaaaggaacagccatcgagctccaaggacacaacgacagagtccaggccctctcctatgcacagcacacgcgacaattgatctcctgtggcggtgatggtgggattgtcgtctggaacatggacgtggagaggcaggagacccctgaatggttggacagtgattcctgccaaaagtgtgatcagcctttcttctggaacttcaagcaaatgtgggacagtaagaaaattggtctaagacagcaccactgccgcaagtgtgggaaggccgtctgtggcaagtgcagctccaagcgctcctccatccccctgatgggcttcgagtttgaagtgagggtctgtgacagctgccacgaggccatcacagatgaagaacgtgcacccacagccaccttccatgacagtaaacataacattgtgcatgtgcatttcgatgcaaccagaggatggttactgacttctggaactgacaaggttattaagttgtgggatatgaccccagtcgtgtcttgatgactctcccaggaatcagaaagatagtatttactaaagaaacggttgttttaacccaaatcattaccagagtggtaaagcagacatgtgagaagtaagaaagaaactaaagaccctgaatgaatttgcagattacccatgtgcacagtggggacctggccagtgagcactcgcaaggggactcttccaacttgttcatacaatataaaagaagctatttttttaacaaatggtttatacagtctggctgtgctgcattgttttgagtgtaccgaaaaatctgtgtggggtgtttaatttttatacttttcaacaccccattttacttgttgctttgtcagagaaataagggaggtatctactcagagtattttggtcattatactttctgtgtttacttcaacatgtgtcacgtggccagcggctttttcttctcttccctctgcacctacctgcaccttctctgcctttcctggaggggatgtatttatgttatttattcccagtgtttctgctttcatgtcctcctcagtggagagatttggaaactcatcatgtggattcaccagccagctgctggaattgcctgaagagcgatttgtttgtaatgtctgcctcattcacgttcttatgaagtagaaaagactgtgtttctgcctcagttgcctctgtctttcccacattaaaaaaaaaaatgctgtgagaaagctgctcccaaccatggttatcacagaagtagattattttaactcagagcttcaacgatcagtgcctggatcatttagaattcagttggagcctcctgagcctcttgttttagcttttttgacgcagctctccctcactcgtaacaatgaaaacaaatgacacacacacaaaatcctacatcagcggccctcaaccttgttggcagcagggaccggtttcaaaatgaaactgttccacctcggatcagcaggcattagcttctcataaggagcacgcaacctaaatccctcgcatgcgcagttcacaatagagtttctgctcctgtgagaatctgacgccaccgctgatctgatgggaggcggagcccaggcagtaacacttgcttgcccactgctcacgtctgatgggtgcccccattcctcacaggctatggaccagtacccatctgcagcccagggttggggacccccaccatacatgctctgaaaataagtgtctttaagttgtgtttttctgtgtgacatcatctctgaacttgaacatgttcattacggcaagattgtaatcctgctgtattcctcgccctctgtattctatccctttaaaaactagatatttaaacattttatcctaatgtgtttcatcagaacactttgcacactttcttactaaaacggtatgtgggtggtccgagacagaatggtacctacagtgcaggctatgtttctgtgggaatggaaaagaggactttagaaagtgaacctgaagaactcttatttctaagggaatccagtcaagcttgagaaaatgaaatattcttgtgtgtagtgattcagctcaggatattgaagtcccttttaaaaatcttattttcacctgtaaaaatagaataaaaattaatggcaagcctgcgccaggtgcctgcccctcctaagcactttacacgcacagctcattcaacctcacgtgtcgggagcatcagggagctcaccagtctcttgaggatcacaggccaattgcttgtccttcccgacccaagccccaccccacagtgtcttgctctcttctgattttacaggttttttggcagtaatacacatgggagtgaaattgaaatcctccctattattttccctcttttcctggaaagccgttttttgccctcacaatcattcattacttctctaactagggggaagtactacaagctgtcctcaggtactgcccctacgtgtgtttccctgggatggggccttgctagaggtgattctgctgccccagcattgggaagcaggaccagtgcatgtgccccatgcagccacggtacatggaagctgtcacttgagccatcagaccggctcagcccatgtgaccggagctctgaagaggcacacacgcatgccccgcacaggctgttagcacttgtcgcctcgctgccctggtccagactacccttgcttgcgtcagtcaaaactgttgtaactactttgagtcttttctgcatgattgctctttgagagaactttaacaagggaattaaatttaaaatattcaaatatctattttgtagtttattactagaagctgcagccacttactaagttgtatgtaatataggactgtgtgt

SEQ ID NO: 9674 - protein, 297 aa, Homo sapiens [sequence omitted]

SEQ ID NO: 9675 - DNA, 1563 bp, Homo sapiens
tttgctaaataaccaaacagctgtactcatttatacttctcatggagaacagggagttttctgacatcccacatcctcaccaatagtgattgttccctccctttctggttttgcccttttggagacagaggtaaaatagtatctcatttttatttgcattctctgcttaacagtaaatttgagcctctcttcatatatgttagccattcagacttccctgactgtgaattgcatgctcatatcttttgtatcatctgccattttctcaactgcttcttgttatttccgtattgattttccaggggttctttgtatacagtaatttgcaggagttgtttgttacaaactttataaatatcttctcctagtctctcttaactctgtgctatgatactatttaataacctgggggttttgtgttagtttattatatattgaacatgttccatgtctttaaatatttatttgtttttactacataattttaatggtaataagctggtatttgagaaattgtttcacaaacaaacattaatactgccccctccagcctcatctctcatttccccatctgtgctccagccatccccaggtctcagttgtcttatttgtctgagaacctcagcctgggtcagaggctcctgtgatctctctgccaaagcactctgtgcttctccctcttgggccttcacacacttatgcttatgtaaataattattaatcatattttcatgatggtggagattcttattcaccactacatcccatccccagggcctgccacagaataggcattcagtaaatattttttgaatgattgactgagaaatcacacctctgtttcttttaaacacatcctgatagctccataagtttcatcagggtcagtggtttccattgtcctgactgctggccacagtgacctgttctgtgctttatttgacaagacccctgaatggttggacagtgattcctgccaaaagtgtgatcagcctttcttctggaacttcaagcaaatgtgggacagtaagaaaattggtctaagacagcaccactgccgcaagtgtgggaaggccgtctgtggcaagtgcagctccaagcgctcctccatccccctgatgggcttcgagtttgaagtgagggtctgtgacagctgccacgaggccatcacagatgaagaacgtgcacccacagccaccttccatgacagtaaacataacattgtgcatgtgcatttcgatgcaaccagaggatggttactgacttctggaactgacaaggttattaagttgtgggatatgaccccagtcgtgtcttgatgactctcccaggaatcagaaagatagtatttactaaagaaacggttgttttaacccaaatcattaccagagtggtaaagcagacatgtgagaagtaagaaagaaactaaagaccctgaatgaatttgcagattacccatgtgcacagtggggacctggccagtgagcactcgcaaggggactcttccaacttgttcatacaatataaaagaagctatttttttaacaaatggtttatacagtc

SEQ ID NO: 9676 - protein, 100 aa, Homo sapiens
MWDSKKIGLRQHHCRKCGKAVCGKCSSKRSSIPLMGFEFEVRVCDSCHEAITDEERAPTATFHDSKHNIVHVHFDATRGWLLTSGTDKVIKLWDMTPVVS

SEQ ID NO: 9677 - DNA, 3654 bp, Homo sapiens
tttgctaaataaccaaacagctgtactcatttatacttctcatggagaacagggagttttctgacatcccacatcctcaccaatagtgattgttccctccctttctggttttgcccttttggagacagaggtaaaatagtatctcatttttatttgcattctctgcttaacagtaaatttgagcctctcttcatatatgttagccattcagacttccctgactgtgaattgcatgctcatatcttttgtatcatctgccattttctcaactgcttcttgttatttccgtattgattttccaggggttctttgtatacagtaatttgcaggagttgtttgttacaaactttataaatatcttctcctagtctctcttaactctgtgctatgatactatttaataacctgggggttttgtgttagtttattatatattgaacatgttccatgtctttaaatatttatttgtttttactacataattttaatggtaataagctggtatttgagaaattgtttcacaaacaaacattaatactgccccctccagcctcatctctcatttccccatctgtgctccagccatccccaggtctcagttgtcttatttgtctgagaacctcagcctgggtcagaggctcctgtgatctctctgccaaagcactctgtgcttctccctcttgggccttcacacacttatgcttatgtaaataattattaatcatattttcatgatggtggagattcttattcaccactacatcccatccccagggcctgccacagaataggcattcagtaaatattttttgaatgattgactgagaaatcacacctctgtttcttttaaacacatcctgatagctccataagtttcatcagggtcagtggtttccattgtcctgactgctggccacagtgacctgttctgtgctttatttgacaagacccctgaatggttggacagtgattcctgccaaaagtgtgatcagcctttcttctggaacttcaagcaaatgtgggacagtaagaaaattggtctaagacagcaccactgccgcaagtgtgggaaggccgtctgtggcaagtgcagctccaagcgctcctccatccccctgatgggcttcgagtttgaagtgagggtctgtgacagctgccacgaggccatcacagatgaagaacgtgcacccacagccaccttccatgacagtaaacataacattgtgcatgtgcatttcgatgcaaccagaggatggttactgacttctggaactgacaaggttattaagttgtgggatatgaccccagtcgtgtcttgatgactctcccaggaatcagaaagatagtatttactaaagaaacggttgttttaacccaaatcattaccagagtggtaaagcagacatgtgagaagtaagaaagaaactaaagaccctgaatgaatttgcagattacccatgtgcacagtggggacctggccagtgagcactcgcaaggggactcttccaacttgttcatacaatataaaagaagctatttttttaacaaatggtttatacagtctggctgtgctgcattgttttgagtgtaccgaaaaatctgtgtggggtgtttaatttttatacttttcaacaccccattttacttgttgctttgtcagagaaataagggaggtatctactcagagtattttggtcattatactttctgtgtttacttcaacatgtgtcacgtggccagcggctttttcttctcttccctctgcacctacctgcaccttctctgcctttcctggaggggatgtatttatgttatttattcccagtgtttctgctttcatgtcctcctcagtggagagatttggaaactcatcatgtggattcaccagccagctgctggaattgcctgaagagcgatttgtttgtaatgtctgcctcattcacgttcttatgaagtagaaaagactgtgtttctgcctcagttgcctctgtctttcccacattaaaaaaaaaaatgctgtgagaaagctgctcccaaccatggttatcacagaagtagattattttaactcagagcttcaacgatcagtgcctggatcatttagaattcagttggagcctcctgagcctcttgttttagcttttttgacgcagctctccctcactcgtaacaatgaaaacaaatgacacacacacaaaatcctacatcagcggccctcaaccttgttggcagcagggaccggtttcaaaatgaaactgttccacctcggatcagcaggcattagcttctcataaggagcacgcaacctaaatccctcgcatgcgcagttcacaatagagtttctgctcctgtgagaatctgacgccaccgctgatctgatgggaggcggagcccaggcagtaacacttgcttgcccactgctcacgtctgatgggtgcccccattcctcacaggctatggaccagtacccatctgcagcccagggttggggacccccaccatacatgctctgaaaataagtgtctttaagttgtgtttttctgtgtgacatcatctctgaacttgaacatgttcattacggcaagattgtaatcctgctgtattcctcgccctctgtattctatccctttaaaaactagatatttaaacattttatcctaatgtgtttcatcagaacactttgcacactttcttactaaaacggtatgtgggtggtccgagacagaatggtacctacagtgcaggctatgtttctgtgggaatggaaaagaggactttagaaagtgaacctgaagaactcttatttctaagggaatccagtcaagcttgagaaaatgaaatattcttgtgtgtagtgattcagctcaggatattgaagtcccttttaaaaatcttattttcacctgtaaaaatagaataaaaattaatggcaagcctgcgccaggtgcctgcccctcctaagcactttacacgcacagctcattcaacctcacgtgtcgggagcatcagggagctcaccagtctcttgaggatcacaggccaattgcttgtccttcccgacccaagccccaccccacagtgtcttgctctcttctgattttacaggttttttggcagtaatacacatgggagtgaaattgaaatcctccctattattttccctcttttcctggaaagccgttttttgccctcacaatcattcattacttctctaactagggggaagtactacaagctgtcctcaggtactgcccctacgtgtgtttccctgggatggggccttgctagaggtgattctgctgccccagcattgggaagcaggaccagtgcatgtgccccatgcagccacggtacatggaagctgtcacttgagccatcagaccggctcagcccatgtgaccggagctctgaagaggcacacacgcatgccccgcacaggctgttagcacttgtcgcctcgctgccctggtccagactacccttgcttgcgtcagtcaaaactgttgtaactactttgagtcttttctgcatgattgctctttgagagaactttaacaagggaattaaatttaaaatattcaaatatctattttgtagtttattactagaagctgcagccacttactaagttgtatgtaatataggactgtgtgt

SEQ ID NO: 9678 - protein, 100 aa, Homo sapiens; identical to SEQ ID NO: 9676

SEQ ID NO: 9679 - DNA, 3715 bp, Homo sapiens
gaatgattgactgagaaatcacacctctgtttcttttaaacacatcctgatagctccataagtttcatcagggtcagtggtttccattgtcctgactgctggccacagtgacctgttctgtgctttatttgacaagacccctgaatggttggacagtgattcctgccaaaagtgtgatcagcctttcttctggaacttcaagcaaatgtgggacagtaagaaaattggtctaagacaggtgagtgatatggatgcttcatcaaaatgtaattatatggaaatagctcaaccatgtgatcttagaagaaataacacccctgggtgggagttgtggtgagggtaaattattatcctggagtcacctcgtgattgcacagtaatttactctgtctaccatagcccattcctactggattcagtttctgtagtggttggttcccagtaagcagttagggatgtgattttagaattctgttggcctctattgcagtgcaccttacaattagaggtgtcatgcttagttcgtatggaaaccagaccatgaaattatataagtggtgtttctctctccttattttactttccctccttctgattaattttagttatttagatctacttataatacagcattttcaatctgattccatggttctgtttggtcttccccaaggaaatcaaatgttaggtcacctaggcttaccatggccaaagtcagcagattcaatcaggtttcctgcatgttctccttcatccagcagcataatctcctgagacggcagtttctcagacaccccgctttaagatcacctggcccctgggtggttcctctgtagttcctagtatgatcattggaaaggaccaagagtagggaaagcaggagagtggggtggtatccctgtcaggtgtgttacccaacagtccttgttgaataaacagagccccagagaagaacacatccaatgtgttccctttagttctggggctctcttgttcagcatcctcacctggatgcagttgattacacctctctgccaggaggggtgagatgcgggggcctcaggagctgagggagccgtgatgagtatctattttatctccctcctccagcaccactgccgcaagtgtgggaaggccgtctgtggcaagtgcagctccaagcgctcctccatccccctgatgggcttcgagtttgaagtgagggtctgtgacagctgccacgaggccatcacagatgaagaacgtgcacccacagccaccttccatgacagtaaacataacattgtgcatgtgcatttcgatgcaaccagaggatggttactgacttctggaactgacaaggttattaagttgtgggatatgaccccagtcgtgtcttgatgactctcccaggaatcagaaagatagtatttactaaagaaacggttgttttaacccaaatcattaccagagtggtaaagcagacatgtgagaagtaagaaagaaactaaagaccctgaatgaatttgcagattacccatgtgcacagtggggacctggccagtgagcactcgcaaggggactcttccaacttgttcatacaatataaaagaagctatttttttaacaaatggtttatacagtctggctgtgctgcattgttttgagtgtaccgaaaaatctgtgtggggtgtttaatttttatacttttcaacaccccattttacttgttgctttgtcagagaaataagggaggtatctactcagagtattttggtcattatactttctgtgtttacttcaacatgtgtcacgtggccagcggctttttcttctcttccctctgcacctacctgcaccttctctgcctttcctggaggggatgtatttatgttatttattcccagtgtttctgctttcatgtcctcctcagtggagagatttggaaactcatcatgtggattcaccagccagctgctggaattgcctgaagagcgatttgtttgtaatgtctgcctcattcacgttcttatgaagtagaaaagactgtgtttctgcctcagttgcctctgtctttcccacattaaaaaaaaaaatgctgtgagaaagctgctcccaaccatggttatcacagaagtagattattttaactcagagcttcaacgatcagtgcctggatcatttagaattcagttggagcctcctgagcctcttgttttagcttttttgacgcagctctccctcactcgtaacaatgaaaacaaatgacacacacacaaaatcctacatcagcggccctcaaccttgttggcagcagggaccggtttcaaaatgaaactgttccacctcggatcagcaggcattagcttctcataaggagcacgcaacctaaatccctcgcatgcgcagttcacaatagagtttctgctcctgtgagaatctgacgccaccgctgatctgatgggaggcggagcccaggcagtaacacttgcttgcccactgctcacgtctgatgggtgcccccattcctcacaggctatggaccagtacccatctgcagcccagggttggggacccccaccatacatgctctgaaaataagtgtctttaagttgtgtttttctgtgtgacatcatctctgaacttgaacatgttcattacggcaagattgtaatcctgctgtattcctcgccctctgtattctatccctttaaaaactagatatttaaacattttatcctaatgtgtttcatcagaacactttgcacactttcttactaaaacggtatgtgggtggtccgagacagaatggtacctacagtgcaggctatgtttctgtgggaatggaaaagaggactttagaaagtgaacctgaagaactcttatttctaagggaatccagtcaagcttgagaaaatgaaatattcttgtgtgtagtgattcagctcaggatattgaagtcccttttaaaaatcttattttcacctgtaaaaatagaataaaaattaatggcaagcctgcgccaggtgcctgcccctcctaagcactttacacgcacagctcattcaacctcacgtgtcgggagcatcagggagctcaccagtctcttgaggatcacaggccaattgcttgtccttcccgacccaagccccaccccacagtgtcttgctctcttctgattttacaggttttttggcagtaatacacatgggagtgaaattgaaatcctccctattattttccctcttttcctggaaagccgttttttgccctcacaatcattcattacttctctaactagggggaagtactacaagctgtcctcaggtactgcccctacgtgtgtttccctgggatggggccttgctagaggtgattctgctgccccagcattgggaagcaggaccagtgcatgtgccccatgcagccacggtacatggaagctgtcacttgagccatcagaccggctcagcccatgtgaccggagctctgaagaggcacacacgcatgccccgcacaggctgttagcacttgtcgcctcgctgccctggtccagactacccttgcttgcgtcagtcaaaactgttgtaactactttgagtcttttctgcatgattgctctttgagagaactttaacaagggaattaaatttaaaatattcaaatatctattttgtagtttattactagaagctgcagccacttactaagttgtatgtaatataggactgtgtgt

SEQ ID NO: 9680 - protein, 99 aa, Homo sapiens
MSIYFISLLQHHCRKCGKAVCGKCSSKRSSIPLMGFEFEVRVCDSCHEAITDEERAPTATFHDSKHNIVHVHFDATRGWLLTSGTDKVIKLWDMTPVVS

SEQ ID NO: 9681 - DNA, 1730 bp, Homo sapiens
gagaatactgtagaatacatgtaggagaatactgtagaatacatgtaggagaatactgtaggagaatactgtagaatacatgtaggagaatactgtaggagaatactgtaggagaatacatgtaggagaatacatgtaggagaatactgtagaatacatgtaggagaatactgtaggagaatactgtaggagaatacatgtaggagaatactgtaggagaatactgtaggagaatacatgtactgtaggagaatacatgtaggagaatactgtaggagaatactgtagaatacatgtaggagaatactgtagaatacatgtaggagaatactgtaggagaatacatgtaggagaatactgtaggagaatacatgtaggagaatactgtaggagaatacatgtaggagaatactgtaggagaatactgtaggagaatacatgtaggagaatactgtaggagaatacatgtactgtaggagaatacatgtaggagaatacatgtactgtaggagaatactgtaggagaatacaatgtgttgcttcaagccactaattttgtggtcattggtcacaacagcaagaagcactgctctacagggggtgaagagtggaaggggtcacaggctttagtttgtaaatctctgttacctttattgcagataaccgtctcctcaggaggaatgttggttcagaaactgaacaccaatgatctccagtccgaaagaacaccatttgatggaactatggtctatgcacaaaacaagaggcagcaagtggttctgacggagcggtgggcccaagggcacccggccatccatttttcttccatgcatcctggctgggccgacaccccaggtgtgaggcaggcgatgccggggttccacgccaggttcggggaccgcctgcgctccgaggcccagggcgcggacaccatgctgtggctggccctctcctctgccgcagccgcacagcccagcggccgcttctttcaagtgggctcctaagggggcaggcgtgtgagtggacgccatccgaagacagcacttgacctcgggtggaagccaggctctttgcttggcttctctttcctctgttcttgatgagaaccacccttgcttgaggaattctgaagcgctggtgacccctggggtatccgggaggatggccgcaccccttcctgctgatcacccaaacgtggtctcccgtccagccctggctgcagcctcccagttcccaaactgcactttacatatcaatccatgctgcctgatccctgtgggacctttgacagcagggatgggggtctaacagctgtagggtgctgccactccagcaggcgtcggttcaaggcctgagcagcacagggacatggacccagccacgctgcagcagctcacacctctctgcggttccctctcacttttagatcggaagccagtttctacacacttgcctctcgctacagcgtcctcctcaccggccgaagaggagaaactcattgaaatcctggaacagctggctcagacatttaaataggccaacccagacacagtgcggtaccagaattgccttagaagataccagaaggtgcggtctagggaccagtgaataagaagaccccacttcaacttcccctcgaagacgttgtgcctcacagcgaggcctacaagggatgggaacttttatttcaaaataaatactaccgaggctgtgatcaggctcaccttgaa

SEQ ID NO: 9682 - protein, 107 aa, Homo sapiens
MLVQKLNTNDLQSERTPFDGTMVYAQNKRQQVVLTERWAQGHPAIHFSSMHPGWADTPGVRQAMPGFHARFGDRLRSEAQGADTMLWLALSSAAAAQPSGRFFQVGS

SEQ ID NO: 9683 - DNA, 1972 bp, Homo sapiens
gaggccgcgccgggagcgcggtggggctaggcgtggggcgctcccggcatgtccctgtaccgcagcgtcgtgtggttcgccaaggggctgcgcgagtacaccaagagtggctatgaatctgcatgtaaagactttgtccctcatgacttggaggtccagattcctggaagagtctttttggtcactggaggaaacagcggcattggcaaagcaactgcccttgaaatcgccaagcgagaacatttttctgcacattgtggacttgtctgatcccaagcaaatctggaaatttgttgaaaatttcaagcaggaacataaactccatgttctgatcaataatgcaggttgcatggtcaataaaagagagctcacagaagatggacttgaaaaaaactttgctgccaatactctgggtgtgtacattctcacgaccggcctgatccctgtgctggagaaagaacacgacccccgagtgataaccgtctcctcaggaggaatgttggttcagaaactgaacaccaatgatctccagtccgaaagaacaccatttgatggaactatggtctatgcacaaaacaagaggcagcaagtggttctgacggagcggtgggcccaagggcacccggccatccatttttcttccatgcatcctggctgggccgacaccccaggtgtgaggcaggcgatgccggggttccacgccaggttcggggaccgcctgcgctccgaggcccagggcgcggacaccatgctgtggctggccctctcctctgccgcagccgcacagcccagcggccgcttctttcaaggtgacttcctccctggctgtgaaggcagctgacacagggctaggggcagcagctgggccttcgaggcgcaccttcccctccgtgaaacctggggtgggactgtcccctggggggtgcctgggcttctttggcgagatgattgctttgcctgctgaggttagttttgggaagcgcttcactccaggttggtagcttctttggagacttgtgataaccctgtcatcaaggtcctgtgagaacgggagaggcagttcctaccttgggaatggaagattttctctgcagtttgctgaggcccaggaggggcgctattcaaagctgcactgcaaagggagtaacggactctgcttctctgcagtgcaaagggtgtaagggactctgcttctctatttttggaagcagtgatctgttcacgtctctccccagtgggctcctaagggggcaggcgtgtgagtggacgccatccgaagacagcacttgacctcgggtggaagccaggctctttgcttggcttctctttcctctgttcttgatgagaaccacccttgcttgaggaattctgaagcgctggtgacccctggggtatccgggaggatggccgcaccccttcctgctgatcacccaaacgtggtctcccgtccagccctggctgcagcctcccagttcccaaactgcactttacatatcaatccatgctgcctgatccctgtgggacctttgacagcagggatgggggtctaacagctgtagggtgctgccactccagcaggcgtcggttcaaggcctgagcagcacagggacatggacccagccacgctgcagcagctcacacctctctgcggttccctctcacttttagatcggaagccagtttctacacacttgcctctcgctacagcgtcctcctcaccggccgaagaggagaaactcattgaaatcctggaacagctggctcagacatttaaataggccaacccagacacagtgcggtaccagaattgccttagaagataccagaaggtgcggtctagggaccagtgaataagaagaccccacttcaacttcccctcgaagacgttgtgcctcacagcgaggcctacaagggatgggaacttttatttcaaaataaatactaccgaggctgtgatcaggctcaccttgaa

SEQ ID NO: 9684 - protein, 242 aa, Homo sapiens; identical to SEQ ID NO: 1407

SEQ ID NO: 9685 - DNA, 1199 bp, Homo sapiens
gggcggaggccgcgccgggagcgcggtggggctaggcgtggggcgctcccggcatgtccctgtaccgcagcgtcgtgtggttcgccaaggggctgcgcgagtacaccaagagtggctatgaatctgcatgtaaagactttgtccctcatgacttggaggtccagattcctggaagagtctttttggtcactggaggaaacagcggcattggcaaagcaactgcccttgaaatcgccaagcgaggtggcacagttcacctggtttgtcgagatcaagccccagcagaagatgccaggggtgagatcatccgggagagcggtaaccagaacatttttctgcacattgtggacttgtctgatcccaagcaaatctggaaatttgttgaaaatttcaagcaggaacataaactccatgttctgatcaataatgcaggttgcatggtcaataaaagagagctcacagaagatggacttgaaaaaaactttgctgccaatactctgggtgtgtacattctcacgaccggcctgatccctgtgctggagaaagaacacgacccccgagtgataaccgtctcctcaggaggaatgttggttcagaaactgaacaccaatgatctccagtccgaaagaacaccatttgatggaactatggtctatgcacaaaacaagaggcagcaagtggttctgacggagcggtgggcccaagggcacccggccatccatttttcttccatgcatcctggctgggccgacaccccaggtgtgaggcaggcgatgccggggttccacgccaggttcggggaccgcctgcgctccgaggcccagggcgcggacaccatgctgtggctggccctctcctctgccgcagccgcacagcccagcggccgcttctttcaagatcggaagccagtttctacacacttgcctctcgctacagcgtcctcctcaccggccgaagaggagaaactcattgaaatcctggaacagctggctcagacatttaaataggccaacccagacacagtgcggtaccagaattgccttagaagataccagaaggtgcggtctagggaccagtgaataagaagaccccacttcaacttcccctcgaagacgttgtgcctcacagcgaggcctacaagggatgggaacttttatttcaaaataaatactaccgaggctgtgatcaggctcaccttg

SEQ ID NO: 9686 - protein, 317 aa, Homo sapiens
MSLYRSVVWFAKGLREYTKSGYESACKDFVPHDLEVQIPGRVFLVTGGNSGIGKATALEIAKRGGTVHLVCRDQAPAEDARGEIIRESGNQNIFLHIVDLSDPKQIWKFVENFKQEHKLHVLINNAGCMVNKRELTEDGLEKNFAANTLGVYILTTGLIPVLEKEHDPRVITVSSGGMLVQKLNTNDLQSERTPFDGTMVYAQNKRQQVVLTERWAQGHPAIHFSSMHPGWADTPGVRQAMPGFHARFGDRLRSEAQGADTMLWLALSSAAAAQPSGRFFQDRKPVSTHLPLATASSSPAEEEKLIEILEQLAQTFK

SEQ ID NO: 9687 - DNA, 1390 bp, Homo sapiens
gaggccgcgccgggagcgcggtggggctaggcgtggggcgctcccggcatgtccctgtaccgcagcgtcgtgtggttcgccaaggggctgcgcgagtacaccaagagtggctatgaatctgcatgtaaagactttgtccctcatgacttggaggtccagattcctggaagagtctttttggtcactggaggaaacagcggcattggcaaagcaactgcccttgaaatcgccaagcgagaacatttttctgcacattgtggacttgtctgatcccaagcaaatctggaaatttgttgaaaatttcaagcaggaacataaactccatgttctgatcaataatgcaggttgcatggtcaataaaagagagctcacagaagatggacttgaaaaaaactttgctgccaatactctgggtgtgtacattctcacgaccggcctgatccctgtgctggagaaagaacacgacccccgagtgataaccgtctcctcaggaggaatgttggttcagaaactgaacaccaatgatctccagtccgaaagaacaccatttgatggaactatggtctatgcacaaaacaagaggcagcaagtggttctgacggagcggtgggcccaagggcacccggccatccatttttcttccatgcatcctggctgggccgacaccccagacaggaatgagcaggagctgaggaaggtagtgggagaggcccagactgcctcaccactccccaggtttttggaaataatgatgcatgaaggtaaatgccagccacaaggacacagctcgaatgatctggaagcgtgttggagcagcggtggaggggagcagaattctcttccggattggcctcaccaactccatgacctcaggcagctcacctgggctctctgcagctctttcctcctctacaaacaagggaactgaaagcagcagcagccacagcacacaccccagggtgcacccgcggcgccaagaactggtctcagcgctgtctgcggattaacgcatttgtcctcaagcctctgtggagtggccactactgtctattatcacacccatttacagatgagggaactgaggcccagagaggctaagacctcccagccgggcctggccatggggttttgggaatcaggctctcacacactgctggcatggcctttctgaaaatcactatttatcagaagccttggaattcatcctaagaaataaagatagggaaaacaaggttgcttatcacagtgctggtggtaggagatgaagttaataaattatagaacacctgtgcaaaatctgttcagggctgaagactctgctgccaatcatgcctatggaaaaaccctgtgtgcactatatcattaaatgaagataccaagttcctgaata

SEQ ID NO: 9688 - protein, 271 aa, Homo sapiens; identical to SEQ ID NO: 1405

SEQ ID NO: 9689 - DNA, 1406 bp, Homo sapiens
cagtgccactatgtgggcagaagcacagcttgactcagaccctgacaactgttgatctgggagagggaaagagaagactgtttaaaacctgttgagaaggtactgatgacatggagattaatttgacaccagtccctcagagaaaatcagaaagtgcagttgacagaagggtcacgttcacactacaatatcaattgcaactcaacaaggactccagtcgccaaggagcttaattataatctagacactcatacgtctactgggaggatcaaggcagctgagaagaaggaagcgtgtaatgtagaaagcaacagaaaaaaggaaacggaacttcttggctctttttctaaaaatgaatcagttcccgaagttgaagccctgctggcaagattacgagctttataagttaaactggtttttaaaaaaaatgattaagccaaatataaagccatgctctaaactataacacttgaaaaaattgcttttatgtaagtgactttatatagttttaaattatgatatatattagaaaaataaagctaaatatatgattgcaatgctttttctatgtactggaggttttggtttattcaagattgtaccgggctttaatccttttttttttttttttgtctcctggtattcctcagttctttatttggtggttaaattatacatattgctttagagagcaggtaggtggccatgtgttcagcagtgtgtccttaagaaaataccatctttctaagccactggaatttttactttactatttttaacattaatggatgtcaggtcatcaacctcaagtctttacatatccatgtatattccatatatattgtttatataggcccaagtttctccttaattgggatctatatactaccagcacaacatcaaaaacatgtaattgaatacatcagagctatatatgtaaggaaatgactggtgaccccattatcatcattgttgaattcatgttaagtagaccctctaggggaccataaggcaattgagcacataacgaaaaatgatgcaataagaatgtatgcactctctttgccaaatgcatgtgcttttgtgtaacgtggatgtaaacagaattgcagtgctgccgaaattcttgatcttggctaagagagtatttttccccttgtaattatgactctgagataaaattgccattttgaaatttccaaagtaacaactttttttattttatgaataaacttgggattgcaatttctctgatctgacaatcaataactttaacaaagatctaaataagtgtttcaaggaaagttttcctaagcaaatgtaatattacctcatttgggcatcattactctgttaattctatatcaaaggaaataaacttgctacttgcactaaatgaaaaaaaa

SEQ ID NO: 9690 - protein, 40 aa, Homo sapiens
MEINLTPVPQRKSESAVDRRVTFTLQYQLQLNKDSSRQGA

SEQ ID NO: 9691 - DNA, 4803 bp, Homo sapiens
tgatccggcggcgcgggattggccagtcccgggccaacacgggtggcgggagttttcagatgtgttggctgcggccccgacttcagcggttgggctaggctgtgctgactgtttgggtggcggaccccgggagtaaaacctgttgtcgatccctcagcttccagcttgcggcttgctgagtggccaccttctttccggtccccggagctgcggggaaagatggaacggcaccagccgcggctgcaccacccggcccaaggctcagccgctgggactccctacccttcctcagcctctctccgcggctgccgggaaagcaagatgccgcgcaggaagggcccccaacaccctccgccgcccagtggccccgaggagcctggggagaagcgccccaagtttcatttaaatattaggacactgacggatgatatgctggacaaatttgccagcataagaattccagggagcaagaaagagagacctccacttcccaacctgaagactgcatttgcaagcagtgattgctcagcagcacctttagagatgatggagaactttccaaagccactgtcagagaatgaactcttagaactttttgaaaaaatgatggaagatatgaatttaaatgaagataaaaaggcaccattgcgggaaaaggacttcagtatcaaaaaagaaatggtgatgcagtacattaatactgcttctaagacaggaagtcttaagagaagccgacagatctcacctcaggaattcattcatgagctgaaaatggggtctgcagatgagagacttgtcacatgcctggagtctctccgagtgtctttgaccagcaatcctgtgagttgggtggaaagctttggacatgaagggcttggattattattagacattttggaaaaactgattagtggaaaaatccaagaaaaagttgtaaagaaaaatcaacataaagtcatacagtgtctaaaagccctgatgaatacgcagtatggcttggaaagaattatgagtgaggagaggagcctttccttattggccaaagccgtggatcccagacaccccaatatgatgacagatgtggttaaacttctctctgcggtatgcattgtaggggaagaaagcatccttgaagaagttttagaagctttaacttcagctggtgaagaaaaaaaaattgacagatttttttgtattgtggaaggcctccggcacaattcagttcaactgcaagtagcttgtatgcagctcatcaatgccctggttacatctcctgatgatttggatttcaggcttcacatcagaaatgaatttatgcgttgtggattgaaagagatattgccaaatttaaaatgcattaagaatgatggcctggatatccaacttaaagtctttgatgagcataaagaagaagatttgtttgagttatcccatcgccttgaagatattagagctgaacttgaatatccatatgatgtttacaacatggtgtggagcacagttaaagaaactagagcagagggatattttatttctattcttcagcatcttttgctgattcgaaatgattattttataaggcaacaatacttcaaattaattgatgagtgtgtatcccagattgtattgcatagagatggaatggatccagacttcacatatcgaaaaagactagatttagatttaacccagtttgtagacatttgcatagatcaagcaaaactagaagagtttgaagagaaagcatcagaactttacaagaaatttgaaaaagagtttaccgaccaccaagaaactcaggctgaattgcagaaaaaagaggcaaagattaatgagcttcaagcagagctacaagcttttaagtctcagtttggtgccttgccagctgattgtaatattcctttgcctccctctaaagaaggtggaactggccactcagcacttcctcctccgcctccactgccttctggtggaggggtgccgcctccacctcctcccccaccacctcctccacttccaggaatgcggatgccattcagtggtcctgtgcctccaccacctcccctgggattccttggaggacaaaattctcctcctctaccaatcctgccatttgggttgaaaccaaagaaagaatttaaacctgaaatcagcatgagaagattgaattggttaaagatcagacctcatgaaatgactgaaaactgtttctggataaaagtaaatgaaaataagtatgaaaacgtggatttgctttgtaaacttgagaatacattttgttgccaacaaaaagagagaagagaagaggaagatattgaagagaagaaatcgattaagaaaaaaattaaagaacttaagtttttagattctaaaattgcccagaacctttcaatcttcctgagctcttttcgggtgccatatgaggaaatcagaatgatgatattggaagtagatgaaacacggttggcagagtctatgattcagaacttaataaagcatcttcctgatcaagagcaattaaattcattgtctcagttcaagagtgaatatagcaacttatgtgaacctgagcagtttgtggttgtgatgagcaatgtgaagagactacggccacggctcagtgctattctctttaagcttcagtttgaagagcaggtgaacaacatcaaacctgacatcatggctgtcagtactgcctgcgaagagataaagaagagcaaaagctttagcaagttgctggaacttgtattgctaatgggaaactacatgaatgctggctcccggaatgctcaaaccttcggatttaaccttagctctctctgtaaactaaaggacacaaaatcagcagatcagaaaacaacgctacttcatttcctggtagaaatatgtgaagagaagtaccctgatatactgaattttgtggatgatttggaacctttagacaaagctagtaaagtctctgtagaaacgctggaaaagaatttgaggcagatgggaaggcagcttcaacagcttgagaaggaattggaaacctttccccctcctgaggacttgcatgacaagtttgtgacaaagattatacagatttgttatcagtgcaaaagaacaatatgagacactttcgaagttacacgaaaacatggaaaagttataccagagtataataggatactatgccattgatgtgaagaaggtgtctgtggaagactttcttactgacctgaataacttcagaaccacattcatgcaagcaataaaggagaatatcaaaaaaagagaagcagaggaaaaagaaaaacgtgtcagaatagctaaagaattagcagagcgagaaagactcgaacgccaacaaaagaaaaagcgtttattagaaatgaagactgagggtgatgagacaggagtgatggataatctgctggaggccttgcagtccggggctgccttccgcgacagaagaaaaaggacaccgatgccaaaagatgttcggcagagtctcagtccaatgtctcagaggcctgttctgaaagtttgtaaccatgaaaatcagaaagtgcagttgacagaagggtcacgttcacactacaatatcaattgcaactcaacaaggactccagtcgccaaggagcttaattataatctagacactcatacgtctactgggaggatcaaggcagctgagaagaaggaagcgtgtaatgtagaaagcaacagaaaaaaggaaacggaacttcttggctctttttctaaaaatgaatcagttcccgaagttgaagccctgctggcaagattacgagctttataagttaaactggtttttaaaaaaaatgattaagccaaatataaagccatgctctaaactataacacttgaaaaaattgcttttatgtaagtgactttatatagttttaaattatgatatatattagaaaaataaagctaaatatatgattgcaatgctttttctatgtactggaggttttggtttattcaagattgtaccgggctttaatccttttttttttttttttgtctcctggtattcctcagttctttatttggtggttaaattatacatattgctttagagagcaggtaggtggccatgtgttcagcagtgtgtccttaagaaaataccatctttctaagccactggaatttttactttactatttttaacattaatggatgtcaggtcatcaacctcaagtctttacatatccatgtatattccatatatattgtttatataggcccaagtttctccttaattgggatctatatactaccagcacaacatcaaaaacatgtaattgaatacatcagagctatatatgtaaggaaatgactggtgaccccattatcatcattgttgaattcatgttaagtagaccctctaggggaccataaggcaattgagcacataacgaaaaatgatgcaataagaatgtatgcactctctttgccaaatgcatgtgcttttgtgtaacgtggatgtaaacagaattgcagtgctgccgaaattcttgatcttggctaagagagtatttttccccttgtaattatgactctgagataaaattgccattttgaaatttccaaagtaacaactttttttattttatgaataaacttgggattgcaatttctctgatctgacaatcaataactttaacaaagatctaaataagtgtttcaaggaaagttttcctaagcaaatgtaatattacctcatttgggcatcattactctgttaattctatatcaaaggaaataaacttgctacttgcactaaatgaaaaaaaa

SEQ ID NO: 9692 - protein, 964 aa, Homo sapiens
MERHQPRLHHPAQGSAAGTPYPSSASLRGCRESKMPRRKGPQHPPPPSGPEEPGEKRPKFHLNIRTLTDDMLDKFASIRIPGSKKERPPLPNLKTAFASSDCSAAPLEMMENFPKPLSENELLELFEKMMEDMNLNEDKKAPLREKDFSIKKEMVMQYINTASKTGSLKRSRQISPQEFIHELKMGSADERLVTCLESLRVSLTSNPVSWVESFGHEGLGLLLDILEKLISGKIQEKVVKKNQHKVIQCLKALMNTQYGLERIMSEERSLSLLAKAVDPRHPNMMTDVVKLLSAVCIVGEESILEEVLEALTSAGEEKKIDRFFCIVEGLRHNSVQLQVACMQLINALVTSPDDLDFRLHIRNEFMRCGLKEILPNLKCIKNDGLDIQLKVFDEHKEEDLFELSHRLEDIRAELEYPYDVYNMVWSTVKETRAEGYFISILQHLLLIRNDYFIRQQYFKLIDECVSQIVLHRDGMDPDFTYRKRLDLDLTQFVDICIDQAKLEEFEEKASELYKKFEKEFTDHQETQAELQKKEAKINELQAELQAFKSQFGALPADCNIPLPPSKEGGTGHSALPPPPPLPSGGGVPPPPPPPPPPPLPGMRMPFSGPVPPPPPLGFLGGQNSPPLPILPFGLKPKKEFKPEISMRRLNWLKIRPHEMTENCFWIKVNENKYENVDLLCKLENTFCCQQKERREEEDIEEKKSIKKKIKELKFLDSKIAQNLSIFLSSFRVPYEEIRMMILEVDETRLAESMIQNLIKHLPDQEQLNSLSQFKSEYSNLCEPEQFVVVMSNVKRLRPRLSAILFKLQFEEQVNNIKPDIMAVSTACEEIKKSKSFSKLLELVLLMGNYMNAGSRNAQTFGFNLSSLCKLKDTKSADQKTTLLHFLVEICEEKYPDILNFVDDLEPLDKASKVSVETLEKNLRQMGRQLQQLEKELETFPPPEDLHDKFVTKIIQICYQCKRTI

SEQ ID NO: 9693 - DNA, 569 bp, Homo sapiens
atcatttgagcagccgacagtgctgacagtgccactatgtgggcagaagcacagcttgactcagaccctgacaactgttgatctgggagagggaaagagaagactgtttaaaacctgttgagaaggtactgatgacatggagattaatttgacaccagtccctcagagaagaaaagcaatgtccattcagacgtgaggaatttgaacaagaaggagatacaccatatacaaatagaaaccgagatttgcaactcagaaatgtatttagcacagaggagtaaagtttgaagccgaagcctgtgtttaagccatggagacagatgacctcaagctctctccctcagggaagtgttcacatttaaggttgaccaagggagagtgtgtgtgcggttggagcagcaagggtgggtgtcaccaggtggattatcttgatggatctctgcctaaaagcataagatcaacggaaccatgtcatctgaatagaagctagtgaatgggattgggtgcagtaaaatggaaatcctttttaatgaaagataagagctgcatccttacctctcaacctttca

SEQ ID NO: 9694 - protein, 59 aa, Homo sapiens
METDDLKLSPSGKCSHLRLTKGECVCGWSSKGGCHQVDYLDGSLPKSIRSTEPCHLNRS

SEQ ID NO: 9695 - DNA, 219 bp, Homo sapiens
atatgtaccttatcccagtggagtttacagtagcataattaaatgggaagtaaaagtcataacattactgcttcaagtatttcaggatattgaagcattactttgctgccagaaatacataaccttggaaaaaaatgttcggcagagtctcagtccaatgtctcagaggcctgttctgaaagtttgtaaccatggtaataaaccgtatttataaattgc

SEQ ID NO: 9696 - protein, 31 aa, Homo sapiens
SITLLPEIHNLGKKCSAESQSNVSEACSESL

SEQ ID NO: 9697 - DNA, 2710 bp, Homo sapiens
ggaacctggcattgatcctcagtttagaacaggccagttaccatattgtccggagtgggtccttgacattcaggaaagatacatccttagacctttcaaaatttgtcatgcctctctaacctaaaacagccctcattaaatgcactttaatccgagcactgtatggcttggaaagaattatgagtgaggagaggagcctttccttattggccaaagccgtggatcccagacaccccaatatgatgacagatgtggttaaacttctctctgcggtatgcattgtaggggaagaaagcatccttgaagaagttttagaagctttaacttcagctggtgaagaaaaaaaaattgacagatttttttgtattgtggaaggcctccggcacaattcagttcaactgcaagtagcttgtatgcagctcatcaatgccctggttacatctcctgatgatttggatttcaggcttcacatcagaaatgaatttatgcgttgtggattgaaagagatattgccaaatttaaaatgcattaagaatgatggcctggatatccaacttaaagtctttgatgagcataaagaagaagatttgtttgagttatcccatcgccttgaagatattagagctgaacttgaatatccatatgatgtttacaacatggtgtggagcacagttaaagaaactagagcagagggatattttatttctattcttcagcatcttttgctgattcgaaatgattattttataaggcaacaatacttcaaattaattgatgagtgtgtatcccagattgtattgcatagagatggaatggatccagacttcacatatcgaaaaagactagatttagatttaacccagtttgtagacatttgcatagatcaagcaaaactagaagagtttgaagagaaagcatcagaactttacaagaaatttgaaaaagagtttaccgaccaccaagaaactcaggctgaattgcagaaaaaagaggcaaagattaatgagcttcaagcagagctacaagcttttaagtctcagtttggtgccttgccagctgattgtaatattcctttgcctccctctaaagaaggtggaactggccactcagcacttcctcctccgcctccactgccttctggtggaggggtgccgcctccacctcctcccccaccacctcctccacttccaggaatgcggatgccattcagtggtcctgtgcctccaccacctcccctgggattccttggaggacaaaattctcctcctctaccaatcctgccatttgggttgaaaccaaagaaagaatttaaacctgaaatcagcatgagaagattgaattggttaaagatcagacctcatgaaatgactgaaaactgtttctggataaaagtaaatgaaaataagtatgaaaacgtggatttgctttgtaaacttgagaatacattttgttgccaacaaaaagagagaagagaagaggaagatattgaagagaagaaatcgattaagaaaaaaattaaagaacttaagtttttagattctaaaattgcccagaacctttcaatcttcctgagctcttttcgggtgccatatgaggaaatcagaatgatgatattggaagtagatgaaacacggttggcagagtctatgattcagaacttaataaagcatcttcctgatcaagagcaattaaattcattgtctcagttcaagagtgaatatagcaacttatgtgaacctgagcagtttgtggttgtgatgagcaatgtgaagagactacggccacggctcagtgctattctctttaagcttcagtttgaagagcaggtgaacaacatcaaacctgacatcatggctgtcagtactgcctgcgaagagataaagaagagcaaaagctttagcaagttgctggaacttgtattgctaatgggaaactacatgaatgctggctcccggaatgctcaaaccttcggatttaaccttagctctctctgtaaactaaaggacacaaaatcagcagatcagaaaacaacgctacttcatttcctggtagaaatatgtgaagagaagtaccctgatatactgaattttgtggatgatttggaacctttagacaaagctagtaaagtctctgtagaaacgctggaaaagaatttgaggcagatgggaaggcagcttcaacagcttgagaaggaattggaaacctttccccctcctgaggacttgcatgacaagtttgtgacaaagattatacagatttgttatcagtgcaaaagaacaatatgagacactttcgaagttacacgaaaacatggaaaagttataccagagtataataggatactatgccattgatgtgaagaaggtgtctgtggaagactttcttactgacctgaataacttcagaaccacattcatgcaagcaataaaggagaatatcaaaaaaagagaagcagaggaaaaagaaaaacgtgtcagaatagctaaagaattagcagagcgagaaagactcgaacgccaacaaaagaaaaagcgtttattagaaatgaagactgagggtgatgagacaggagtgatggataatctgctggaggccttgcagtccggggctgccttccgcgacagaagaaaaaggacaccgatgccaaaagatgttcggcagagtctcagtccaatgtctcagaggcctgttctgaaagtttgtaaccatg

SEQ ID NO: 9698 - protein, 701 aa, Homo sapiens
MSEERSLSLLAKAVDPRHPNMMTDVVKLLSAVCIVGEESILEEVLEALTSAGEEKKIDRFFCIVEGLRHNSVQLQVACMQLINALVTSPDDLDFRLHIRNEFMRCGLKEILPNLKCIKNDGLDIQLKVFDEHKEEDLFELSHRLEDIRAELEYPYDVYNMVWSTVKETRAEGYFISILQHLLLIRNDYFIRQQYFKLIDECVSQIVLHRDGMDPDFTYRKRLDLDLTQFVDICIDQAKLEEFEEKASELYKKFEKEFTDHQETQAELQKKEAKINELQAELQAFKSQFGALPADCNIPLPPSKEGGTGHSALPPPPPLPSGGGVPPPPPPPPPPPLPGMRMPFSGPVPPPPPLGFLGGQNSPPLPILPFGLKPKKEFKPEISMRRLNWLKIRPHEMTENCFWIKVNENKYENVDLLCKLENTFCCQQKERREEEDIEEKKSIKKKIKELKFLDSKIAQNLSIFLSSFRVPYEEIRMMILEVDETRLAESMIQNLIKHLPDQEQLNSLSQFKSEYSNLCEPEQFVVVMSNVKRLRPRLSAILFKLQFEEQVNNIKPDIMAVSTACEEIKKSKSFSKLLELVLLMGNYMNAGSRNAQTFGFNLSSLCKLKDTKSADQKTTLLHFLVEICEEKYPDILNFVDDLEPLDKASKVSVETLEKNLRQMGRQLQQLEKELETFPPPEDLHDKFVTKIIQICYQCKRTI

SEQ ID NO: 9699 - DNA, 2279 bp, Homo sapiens
ggaacctggcattgatcctcagtttagaacaggccagttaccatattgtccggagtgggtccttgacattcaggaaagatacatccttagacctttcaaaatttgtcatgcctctctaacctaaaacagccctcattaaatgcactttaatccgagcactgtatggcttggaaagaattatgagtgaggagaggagcctttccttattggccaaagccgtggatcccagacaccccaatatgatgacagatgtggttaaacttctctctgcggtatgcattgtaggggaagaaagcatccttgaagaagttttagaagctttaacttcagctggtgaagaaaaaaaaattgacagatttttttgtattgtggaaggcctccggcacaattcagttcaactgcaagtagcttgtatgcagctcatcaatgccctggttacatctcctgatgatttggatttcaggcttcacatcagaaatgaatttatgcgttgtggattgaaagagatattgccaaatttaaaatgcattaagaatgatggcctggatatccaacttaaagtctttgatgagcataaagaagaagatttgtttgagttatcccatcgccttgaagatattagagctgaacttgaatatccatatgatgtttacaacatggtgtggagcacagttaaagaaactagagcagagggatattttatttctattcttcagcatcttttgctgattcgaaatgattattttataaggcaacaatacttcaaattaattgatgagtgtgtatcccagattgtattgcatagagatggaatggatccagacttcacatatcgaaaaagactagatttagatttaacccagtttgtagacatttgcatagatcaagcaaaactagaagagtttgaagagaaagcatcagaactttacaagaaatttgaaaaagagtttaccgaccaccaagaaactcaggctgaattgcagaaaaaagaggcaaagattaatgagcttcaagcagagctacaagcttttaagtctcagtttggtgccttgccagctgattgtaatattcctttgcctccctctaaagaaggtggaactggccactcagcacttcctcctccgcctccactgccttctggtggaggggtgccgcctccacctcctcccccaccacctcctccacttccaggaatgcggatgccattcagtggtcctgtgcctccaccacctcccctgggattccttggaggacaaaattctcctcctctaccaatcctgccatttgggttgaaaccaaagaaagaatttaaacctgaaatcagcatgagaagattgaattggttaaagatcagacctcatgaaatgactgaaaactgtttctggataaaagtaaatgaaaataagtatgaaaacgtggatttgctttgtaaacttgagaatacattttgttgccaacaaaaagagagaagagaagaggaagatattgaagagaagaaatcgattaagaaaaaaattaaagaacttaagtttttagattctaaaattgcccagaacctttcaatcttcctgagctcttttcgggtgccatatgaggaaatcagaatgatgatattggaagtagatgaaacacggttggcagagtctatgattcagaacttaataaagcatcttcctgatcaagagcaattaaattcattgtctcagttcaagagtgaatatagcaacttatgtgaacctgagcagtttgtggttgtgatgagcaatgtgaagagactacggccacggctcagtgctattctctttaagcttcagtttgaagagcaggtgaacaacatcaaacctgacatcatggctgtcagtactgcctgcgaagagataaagaagagcaaaagctttagcaagttgctggaacttgtattgctaatgggaaactacatgaatgctggctcccggaatgctcaaaccttcggatttaaccttagctctctctgtaaactaaaggacacaaaatcagcagatcagaaaacaacgctacttcatttcctggtagaaatatgtgaagagaagtaccctgatatactgaattttgtggatgatttggaacctttagacaaagctagtaaaggtttgtgcctttttaagaaacatttcatggctctgatcttcagtgctaaaagactgaaaattataccttttatttgtatgtactttccactttctcacagtgttttcatacccaatatctcattttaaaaataaagagagttgtaggatatt

SEQ ID NO: 9700 - protein, 691 aa, Homo sapiens
MSEERSLSLLAKAVDPRHPNMMTDVVKLLSAVCIVGEESILEEVLEALTSAGEEKKIDRFFCIVEGLRHNSVQLQVACMQLINALVTSPDDLDFRLHIRNEFMRCGLKEILPNLKCIKNDGLDIQLKVFDEHKEEDLFELSHRLEDIRAELEYPYDVYNMVWSTVKETRAEGYFISILQHLLLIRNDYFIRQQYFKLIDECVSQIVLHRDGMDPDFTYRKRLDLDLTQFVDICIDQAKLEEFEEKASELYKKFEKEFTDHQETQAELQKKEAKINELQAELQAFKSQFGALPADCNIPLPPSKEGGTGHSALPPPPPLPSGGGVPPPPPPPPPPPLPGMRMPFSGPVPPPPPLGFLGGQNSPPLPILPFGLKPKKEFKPEISMRRLNWLKIRPHEMTENCFWIKVNENKYENVDLLCKLENTFCCQQKERREEEDIEEKKSIKKKIKELKFLDSKIAQNLSIFLSSFRVPYEEIRMMILEVDETRLAESMIQNLIKHLPDQEQLNSLSQFKSEYSNLCEPEQFVVVMSNVKRLRPRLSAILFKLQFEEQVNNIKPDIMAVSTACEEIKKSKSFSKLLELVLLMGNYMNAGSRNAQTFGFNLSSLCKLKDTKSADQKTTLLHFLVEICEEKYPDILNFVDDLEPLDKASKGLCLFKKHFMALIFSAKRLKIIPFICMYFPLSHSVFIPNISF

SEQ ID NO: 9701 - DNA, 2222 bp, Homo sapiens
tgatccggcggcgcgggattggccagtcccgggccaacacgggtggcgggagttttcagatgtgttggctgcggccccgacttcagcggttgggctaggctgtgctgactgtttgggtggcggaccccgggagtaaaacctgttgtcgatccctcagcttccagcttgcggcttgctgagtggccaccttctttccggtccccggagctgcggggaaagatggaacggcaccagccgcggctgcaccacccggcccaaggctcagccgctgggactccctacccttcctcagcctctctccgcggctgccgggaaagcaagatgccgcgcaggaagggcccccaacaccctccgccgcccagtggccccgaggagcctggggagaagcgccccaagtttcatttaaatattaggacactgacggatgatatgctggacaaatttgccagcataagaattccagggagcaagaaagagagacctccacttcccaacctgaagactgcatttgcaagcagtgattgctcagcagcacctttagagatgatggagaactttccaaagccactgtcagagaatgaactcttagaactttttgaaaaaatgatggaagatatgaatttaaatgaagataaaaaggcaccattgcgggaaaaggacttcagtatcaaaaaagaaatggtgatgcagtacattaatactgcttctaagacaggaagtcttaagagaagccgacagatctcacctcaggaattcattcatgagctgaaaatggggtctgcagatgagagacttgtcacatgcctggagtctctccgagtgtctttgaccagcaatcctgtgagttgggtggaaagctttggacatgaagggcttggattattattagacattttggaaaaactgattagtggaaaaatccaagaaaaagttgtaaagaaaaatcaacataaagtcatacagtgtctaaaagccctgatgaatacgcagtatggcttggaaagaattatgagtgaggagaggagcctttccttattggccaaagccgtggatcccagacaccccaatatgatgacagatgtggttaaacttctctctgcggtatgcattgtaggggaagaaagcatccttgaagaagttttagaagctttaacttcagctggtgaagaaaaaaaaattgacagatttttttgtattgtggaaggcctccggcacaattcagttcaactgcaagtagcttgtatgcagctcatcaatgccctggttacatctcctgatgatttggatttcaggcttcacatcagaaatgaatttatgcgttgtggattgaaagagatattgccaaatttaaaatgcattaagaatgatggcctggatatccaacttaaagtctttgatgagcataaagaagaagatttgtttgagttatcccatcgccttgaagatattagagctgaacttgaatatccatatgatgtttacaacatggtgtggagcacagttaaagaaactagagcagagggatattttatttctattcttcagcatcttttgctgattcgaaatgattattttataaggcaacaatacttcaaattaattgatgagtgtgtatcccagattgtattgcatagagatggaatggatccagacttcacatatcgaaaaagactagatttagatttaacccagtttgtagacatttgcatagatcaagcaaaactagaagagtttgaagagaaagcatcagaactttacaagaaatttgaaaaagagtttaccgaccaccaagaaactcaggctgaattgcagaaaaaagaggcaaagattaatgagcttcaagcagagctacaagcttttaagtctcagtttggtgccttgccagctgattgtaatattcctttgcctccctctaaagaaggtggaactggccactcagcacttcctcctccgcctccactgccttctggtggaggggtgccgcctccacctcctcccccaccacctcctccacttccaggaatgcggatgccattcagtggtcctgtgcctccaccacctcccctgggattccttggaggacaaaattctcctcctctaccaatcctgccatttgggttgaaaccaaagaaagaatttaaacctgaaatcagcatgagaagattgaattggttaaagatcagacctcatgaaatgactgaaaactgtttctggataaaagt

SEQ ID NO: 9702 - protein, 666 aa, Homo sapiens
MERHQPRLHHPAQGSAAGTPYPSSASLRGCRESKMPRRKGPQHPPPPSGPEEPGEKRPKFHLNIRTLTDDMLDKFASIRIPGSKKERPPLPNLKTAFASSDCSAAPLEMMENFPKPLSENELLELFEKMMEDMNLNEDKKAPLREKDFSIKKEMVMQYINTASKTGSLKRSRQISPQEFIHELKMGSADERLVTCLESLRVSLTSNPVSWVESFGHEGLGLLLDILEKLISGKIQEKVVKKNQHKVIQCLKALMNTQYGLERIMSEERSLSLLAKAVDPRHPNMMTDVVKLLSAVCIVGEESILEEVLEALTSAGEEKKIDRFFCIVEGLRHNSVQLQVACMQLINALVTSPDDLDFRLHIRNEFMRCGLKEILPNLKCIKNDGLDIQLKVFDEHKEEDLFELSHRLEDIRAELEYPYDVYNMVWSTVKETRAEGYFISILQHLLLIRNDYFIRQQYFKLIDECVSQIVLHRDGMDPDFTYRKRLDLDLTQFVDICIDQAKLEEFEEKASELYKKFEKEFTDHQETQAELQKKEAKINELQAELQAFKSQFGALPADCNIPLPPSKEGGTGHSALPPPPPLPSGGGVPPPPPPPPPPPLPGMRMPFSGPVPPPPPLGFLGGQNSPPLPILPFGLKPKKEFKPEISMRRLNWLKIRPHEMTENCFWI

SEQ ID NO: 9703 - DNA, 497 bp, Homo sapiens
ctgacttcctccaagtgatactacctgccttctctgccaaaccctctggccctaacctatcatgtatgaaaggtgaaataggagcatactctgatttcacagttttaaccatcatcctgtgaccccaaaagtccatcacaggagggcatatgcacaaagacattaaatgtaaaagaaatggcctgtgctgagcaacagagaaagctgtatcagagataaaaccaaacagatgaattacctcacaggattgctggtcaaagacactcggagagactccaggcatgtgacaagtctctcatctgcagaccccattttcagctcatgaatgaattcctgagattcaccatccaacggcaggaaatgaattgtgtaagttcaaaagaagatcaggtgaagtggtacgaaattcggtgtttttcatgttttttgtttttattaatttactataatgttattcaaaacaacattcccaataaagcaaaacaaattagcactgt

SEQ ID NO: 9704 - protein, 57 aa, Homo sapiens
MNEFLRFTIQRQEMNCVSSKEDQVKWYEIRCFSCFLFLLIYYNVIQNNIPNKAKQIS

SEQ ID NO: 9705 - DNA, 610 bp, Homo sapiens
tccaagtgatactacctgccttctctgccaaaccctctggccctaacctatcatgtatgaaaggtgaaataggagcatactctgatttcacagttttaaccatcatcctgtgaccccaaaagtccatcacaggagggcatatgcacaaagacattaaatgtaaaagaaatggcctgtgctgagcaacagagaaagctgtatcagagataaaaccaaacagtaagcttcctatgacacagctccagtggaagaagagaaagcaccacctcattactgcaaggtggaaacagaagtccaagagagattctttgttaccacttgacatggatgggaatctagatgaattacctcacaggattgctggtcaaagacactcggagagactccaggcatgtgacaagtctctcatctgcagaccccattttcagctcatgaatgaattcctgagattcaccatccaacggcaggaaatgaattgtgtaagttcaaaagaagatcaggtgaagtggtacgaaattcggtgtttttcatgttttttgtttttattaatttactataatgttattcaaaacaacattcccaataaagcaaaacaaattagcactgtaaa

SEQ ID NO: 9706 - protein, 125 aa, Homo sapiens
MTQLQWKKRKHHLITARWKQKSKRDSLLPLDMDGNLDELPHRIAGQRHSERLQACDKSLICRPHFQLMNEFLRFTIQRQEMNCVSSKEDQVKWYEIRCFSCFLFLLIYYNVIQNNIPNKAKQIST

SEQ ID NO: 9707 - DNA, 598 bp, Homo sapiens
ttttaggtagaggaaagttaatgctctaaatcctcgtgtaggacgcccaacatctggacgcacacagcatgactactagtgctgagcagccacccacagagggcatatgcacaaagacattaaatgtaaaagaaatggcctgtgctgagcaacagagaaagctgtatcagagataaaaccaaacagtaagcttcctatgacacagctccagtggaagaagagaaagcaccacctcattactgcaaggtggaaacagaagtccaagagagattctttgttaccacttgacatggatgggaatctaggtactccctgatggagagaaggaggactgcctcattatgctcaccatgtaacctacaatagcaccatggaagggggatgtggacgtctgttatcactgggtggttgtgaaagccctgactctattggcttctttggacataatgccagtggggagggggaagaatgcctcattaatgccatctgtgggtagaaatccaggctacccactttgctttttgatagtgtggtgggggatggggccacatatttttttctgcgatatttagcagaaatacaaagcagttattgccaa

SEQ ID NO: 9708 - protein, 35 aa, Homo sapiens
MTTSAEQPPTEGICTKTLNVKEMACAEQQRKLYQR

SEQ ID NO: 9709 - DNA, 334 bp, Homo sapiens
ctcgtgtaggacgcccaacatctggacgcacacagcatgactactagtgctgagcagccacccacaatgaattacctcacaggattgctggtcaaagacactcggagagactccaggcatgtgacaagtctctcatctgcagaccccattttcagctcatgaatgaattcctgagattcaccatccaacggcaggaaatgaattgtgtaagttcaaaagaagatcaggtgaagtggtacgaaattcggtgtttttcatgttttttgtttttattaatttactataatgttattcaaaacaacattcccaataaagcaaaacaaattagcactgt

SEQ ID NO: 9710 - protein, 57 aa, Homo sapiens; identical to SEQ ID NO: 9704

SEQ ID NO: 9711 - DNA, 398 bp, Homo sapiens
gacgcacacagcatgactactagtgctgagcagccacccacagagggcatatgcacaaagacattaaatgtaaaagaaatggcctgtgctgagcaacagagaaagctgtatcagagataaaaccaaacagatgaattacctcacaggattgctggtcaaagacactcggagagactccaggcatgtgacaagtctctcatctgcagaccccattttcagctcatgaatgaattcctgagattcaccatccaacggcaggaaatgaattgtgtaagttcaaaagaagatcaggtgaagtggtacgaaattcggtgtttttcatgttttttgtttttattaatttactataatgttattcaaaacaacattcccaataaagcaaaacaaattagcactgt

SEQ ID NO: 9712 - protein, 57 aa, Homo sapiens; identical to SEQ ID NO: 9704

SEQ ID NO: 9713 - DNA, 860 bp, Homo sapiens
atgaaaatcaggctctactcttgcacggaccaaggacatgtatgtctatctggaattatgaggttctaggcttggctgtgtgaagatcaaagcagaggaagccacacaatgcagagaatcaacagtggagctatgcctagtgagaagcaaagagacactggatggcctgagagggaaagagactgagaaaagctgtcagcttttagttcctggttccagtcctttgtgacggccagcttgattagagtctggttatgaacacaccaatttctgtagtccagccacaagctcaagcaactgcagcctaactgtccttggaaatcctccaacaatgccaaaggagacttcagcaatgatttaagcatatttgtataggacttttaaaagtacaatagttttaggttgattatcgcaccattcaaacacactaataaaaaaaggcaacaaggtttgcaggaagtcagcagctgatagccacagagaaaaggtcatttggaaaatatagccatttttggaagactgagcagccaaggttcttaagtataggagattgggacaaaacaaaaaaaaggtttataacagttcactacttcatctacatcctcaagccaacacctatgaaaaagataatggtgtccgatgacaggcctctgctaacagtgtaaggctatctgtgaactcctcagtctacacatatcttcctcagcctctgggattccatttccacccaagaattaaattgatagaaagaaaaacagcaaaatatacacatatttttccactattaaatccaataatgatgacttaatttcagcaaaacatcatcaatcgcattaaattaatgttgctgttaatttgaa

SEQ ID NO: 9714 - protein, 39 aa, Homo sapiens
AAKVLKYRRLGQNKKKVYNSSLLHLHPQANTYEKDNGVR

SEQ ID NO: 9715 - DNA, 546 bp, Homo sapiens
gaagatcaaagcagaggaagccacacaatgcagagaatcaacagtggagctatgcctagtgagaagcaaagagacactggatggcctgagagggaaagagactgagaaaagctgtcagcttttagttcctggttccagtcctttgtgacggccagcttgattagagagaaaaggtcatttggaaaatatagccatttttggaagactgagcagccaaggttcttaagtataggagattgggacaaaacaaaaaaaaggtttataacagttcactacttcatctacatcctcaagccaacacctatgaaaaagataatggtgtccgatgacaggcctctgctaacagtgtaaggctatctgtgaactcctcagtctacacatatcttcctcagcctctgggattccatttccacccaagaattaaattgatagaaagaaaaacagcaaaatatacacatatttttccactattaaatccaataatgatgacttaatttcagcaaaacatcatcaatcgcattaaattaatgttgctgttaatttgaa

SEQ ID NO: 9716 - protein, 39 aa, Homo sapiens; identical to SEQ ID NO: 9714

SEQ ID NO: 9717 - DNA, 423 bp, Homo sapiens
ccagagttacagcatagtgaaacttcaagaactaggtttttctggaccatcccagtgcgcatgaatcagatttaaaaagaaagaaacatacaagaaatacataaatcatactatatgacgatagcccagaagattgcatggaggatctttgtgtttcctgtagaagaaaagaaaaatggaatttccatctcttgcatcagcacttgacagctggagttattgttgaccaggcatcaagaaaggagggatatgcatcagaaatcattttgcctgaaataagcacaactccatggaggacaatgacacattttctctggtgatcttgtaattggggatgatgtaaacatgagtctaatctgcattttgtctaagaaattcttcatcatgagcatcttccaataaaacgtggttccttacaacatg

SEQ ID NO: 9718 - protein, 60 aa, Homo sapiens [sequence omitted]

SEQ ID NO: 9719 - DNA, 953 bp, Homo sapiens
cgctttttctctctatcagtccttgtgtctatcactcgctgcggtcagctgccacaccaattctttggtgtggctaggcaagaaccttacgtgttacattttggcgagccagccaggagtctccaggaaaggcatctagatcgtcacatgcttcttccctccaggtaaattgcagacgtgatgctcagaattaaactgtcaggatgctgccattctgctgcatgctccggacagctggccgttagggagcactgcaggcttggaagaggtgacttgtctccctgtgtacagccctctgggtagagcagctgtcatctaaatacagatgctgatctccaaaagaagttccagtttggttacagagagttacagcatagtgaaacttcaagaactaggtttttctggaccatcccagtgcgcatgaatcaggtgattttatcttttgttcctctccttgctatccctaatctgtcaggcagtcctaaatctataccatcaggcttgtttgttctacttctctatccttttattatggttccattaactcacatccaaggatgtcaagagaataaatagcccaataaaacaaaagaatatacttccagatttaaaaagaaagaaacatacaagaaatacataaatcatactatatgacgatagcccagaagattgcatggaggatctttgtgtttcctgtagaagaaaagaaaaatggaatttccatctcttgcatcagcacttgacagctggagttattgttgaccaggcatcaagaaaggagggatatgcatcagaaatcattttgcctgaaataagcacaactccatggaggacaatgacacattttctctggtgatcttgtaattggggatgatgtaaacatgagtctaatctgcattttgtctaagaaattcttcatcatgagcatcttccaataaaacgtggttccttac

SEQ ID NO: 9720 - protein, 32 aa, Homo sapiens
MLISKRSSSLVTESYSIVKLQELGFSGPSQCA

SEQ ID NO: 9721 - DNA, 6500 bp, Homo sapiens
ctttctccttccctcttgcctccagtgactgtctccaggatttctctcttcctatttcaggaggactctcacaggctcccacagcctgtgttaagctgaggtttcccctagatctcgtatatccccaacacatacctccacgcacacacatccccaagaacctcgagctcacaccaacagacacacgcgcgcatacacactcgctctcgcttgtccatctccctcccgggggagccggcgcgcgctcccacctttgccgcacactccggcgagccgagcccgcagcgctccaggattctgcggctcggaactcggattgcagctctgaacccccatggtggttttttaaacacttcttttccttctcttcctcgttttgattgcaccgtttccatctgggggctagaggagcaaggcagcagccttcccagccagcccttgttggcttgccatcgtccatctggcttataaaagtttgctgagcgcagtccagagggctgcgctgctcgtcccctcggctggcagaagggggtgacgctgggcagcggcgaggagcgcgccgctgcctctggcgggctttcggcttgaggggcaaggtgaagagcgcaccggccgtggggtttaccgagctggatttgtatgttgcaccatgccttcttggatcggggctgtgattcttcccctcttggggctgctgctctccctccccgccggggcggatgtgaaggctcggagctgcggagaggtccgccaggcgtacggtgccaagggattcagcctggcggacatcccctaccaggagatcgcaggggaacacttaagaatctgtcctcaggaatatacatgctgcaccacagaaatggaagacaagttaagccaacaaagcaaactcgaatttgaaaaccttgtggaagagacaagccattttgtgcgcaccacttttgtgtccaggcataagaaatttgacgaatttttccgagagctcctggagaatgcagaaaagtcactaaatgatatgtttgtacggacctatggcatgctgtacatgcagaattcagaagtcttccaggacctcttcacagagctgaaaaggtactacactgggggtaatgtgaatctggaggaaatgctcaatgacttttgggctcggctcctggaacggatgtttcagctgataaaccctcagtatcacttcagtgaagactacctggaatgtgtgagcaaatacactgaccagctcaagccatttggagacgtgccccggaaactgaagattcaggttacccgcgccttcattgctgccaggacctttgtccaggggctgactgtgggcagagaagttgcaaaccgagtttccaaggtcagcccaaccccagggtgtatccgtgccctcatgaagatgctgtactgcccatactgtcgggggcttcccactgtgaggccctgcaacaactactgtctcaacgtcatgaagggctgcttggcaaatcaggctgacctcgacacagagtggaatctgtttatagatgcaatgctcttggtggcagagcgactggaggggccattcaacattgagtcggtcatggacccgatagatgtcaagatttctgaagccattatgaacatgcaagaaaacagcatgcaggtgtctgcaaaggtctttcagggatgtggtcagcccaaacctgctccagccctcagatctgcccgctcagctcctgaaaattttaatacacgtttcaggccctacaatcctgaggaaagaccaacaactgctgcaggcacaagcttggaccggctggtcacagacataaaagagaaattgaagctctctaaaaaggtctggtcagcattaccctacactatctgcaaggacgagagcgtgacagcgggcacgtccaacgaggaggaatgctggaacgggcacagcaaagccagatacttgcctgagatcatgaatgatgggctcaccaaccagatcaacaatcccgaggtggatgtggacatcactcggcctgacactttcatcagacagcagattatggctctccgtgtgatgaccaacaaactaaaaaacgcctacaatggcaatgatgtcaatttccaggacacaagtgatgaatccagtggctcagggagtggcagtgggtgcatggatgacgtgtgtcccacggagtttgagtttgtcaccacagaggcccccgcagtggatcccgaccggagagaggtggactcttctgcagcccagcgtggccactccctgctctcctggtctctcacctgcattgtcctggcactgcagagactgtgcagataatcttgggtttttggtcagatgaaactgcattttagctatctgaatggccaactcacttcttttcttacactcttggacaatggaccatgccacaaaaacttaccgttttctatgagaagagagcagtaatgcaatctgcctccctttttgttttcccaaagagtaccgggtgccagactgaactgcttcctctttccttcagctatctgtggggaccttgtttattctagagagaattcttactcaaatttttcgtaccaggagattttcttaccttcatttgcttttatgctgcagaagtaaaggaatctcacgttgtgagggttttttttttctcatttaaaataaaaaaggaagaaagaaaataattttccttgtaaaatcgggccaaaccccaagacagctacattttcaacaaaaaagcaaacagagaaaaataaatgaactttaacactgtaagttcagcattgacagccaacttccagtgtaagcttttttgtgacaaatccgggtttaaaaatgcttatggggagaaagcttaaagtttgttctaaatgtagtgaaaatgcactgttgtcttggaggtatcatcttgcactctaaccaaacaacaccaaattaatctggaggtactgatactaaatttggaatcccgtctttaatatgagaacacaaattactacaactcagtacctctgtcttactctgcccaatttcaatttagtaatggcaccattattcttaattcccttaatgtctgtccgctgtatccaattggcacagattttccccttcatcttcaattactagtagctacccccatcaattcaccttcctcaagagtctcaattgaaaataatctttgatgatacaatctctgcttttgccacaggtttgacattaactagacgtttctgcccctgtgctcattaccctcccaaaacaatagtttttttaatgaattgaaacacaattagatccattcctgagttttcatttttaactatttactttgtgtcagttggtttctgcatcacaagggcattctcttacaaaacaactcacaacagaaaaaaaaagtcaagacaaaaaatatatatatatagtattgacatggagatttctttcacttttttagtcttagtatgatcatctatttttatatctatgtatatataaatcacagattttaacttcttaattccaagctcagggttgacacacctttgtaagaaaatgttttgtcaaccagctcttcttgttttgtgctgctcaaagaagggattcctcagtgatcggtgagcaccaagaatcaagaaagagaactttttatgtatctaactgtccatttattaaaaatttgccagggcacacccttctgcatgagtgtgcttcagcctgggtgctccagactacaccaaactcatgggatgagccattggtgtgcagggctttaccggtgatggaaactgtatgtgtaaagaatgttattcatgaaaaaccattgctttcatgtaaaacaccttcggcctaggattcctgcctggcacttggatacattacctaactcaataggccagtttagagccacagcctaacctgttcaccaagtaggccaaagccaggcctttcgctccccctgacagagagaagcaaaataaacccaactgggggctttatgaatacagttggctatccatatgtttcttagtttttatgatgcatctggagtagggaaaagtaatgtttcaagacaccatagtaggccagttacattttaattaactcatcgacagtattgacacgtaaatggtatttttcaatctgttctcatcaaaattaaaattagttattgatttagtcatcacatttaagtagaacacatgtggcacaatagtattaagtatatttgagcacttttgcaagacagaaagtatttacaagcatctattgctactttatgcctaatgaaatataaaatgtaggatgatgagagactttgtggcattctttcatttaaacctttatgaaattaaccatctagttcatcattacatactcctagaaaaccatccatttcactgcccacattttggcttcctaccacaaattccacataagacttctctatgaaggaccagtcatttacattgctcatttcattctgtgttcagaagtcagtattgtctttctccaataattaaggtgcaatacaaattaaatcaaccttgattttccagactatttgaataataacttgcttttatggctttaaactccaggtctttcctttttaaaatatttctgcattctcttttatgaactagatcaggatgccttgtttttcctgtgctttcacccccaaaaggttttgtgcatgtgtatgaatacacataatattagtgaatgtgaacccatgttctatacgcactaaacacacagttaatatataaacgcctgcttcatttgtttcaacaccttcattatcaatatgattcatattgatgagatatagtgatgcataatgagccaggcagagagctgaaatgatatcagttaatgatgtcacagtgttagcaccctgcatggatgtggtcaaaatatcattcaagttgtacttcctagtttttatcatcatactactatgtcatatgattttcagactaatttaacatgagaaatgttttggccctaaaggatttcacttaacctagttaccctatttcagtaagtattttggaattcaaccctcgaattattttttctcatttcagcatagtgataggggatgcaatgaggcttcattattttttatgacctgcccctcatttgctctgatgttccctaaattctgtaatcatatcataacttttgttatgaatagagaggaatgggctcactgaaacctgacactagaaattggtgggtgatgctcataactgcaaacacttagcttattgaagtgcctctatttacatgttctttagttataatatgtatttttctaacagaaatacacgtctgtaattggtatatattatactttgtatgtgtcacaacaaaagctaaacagaggctaaagtctttagcagagaagaatgaattacaaatttaccaataagagctctgtttatggttctgtattgaaggacaaccatgacaaccttctgtcattttcacgaaggccaagttggtactttgattatagccatcgtagaacattagcactagaaatctgtctcccttacaatgacttacctagctagcatcaagtaacttgtatcacctgctttaaatgtaagggatagaaaatactattttgtctacactgaaaaacattattattcattgataagtagtaataattataaaagtaacattctttaaagcaaacacattgaaaatattattacaggcagaaccctgatttttaatttatattccctgctgcagacattagccttctttaattcttttgccattacatacatgtttcggctacagactgaacacgaactaaagtccctaaggaggaaaaaaccttaacatattcctgagatgtgattcttttattacttctttttgcaaagctaattatcaaatgatttgattaaacctagacgcattaggaaatgcaagttttacctaaaacttgcagaaatttaaacacatttccatttacttactaacgaacagacctgatttttatttaaaaacacaatttagctttgccaacagaagagtaaaggaaaccataacttataaatttgtaatgtgttcctccttgttggagacattagccagtgtttagttttagaccaacttatacaaagagagtattgatttgtacacattctggagacttgctatatcatggtttgctatggcacagactcagcttagcatggggacattttgaacttcattcaaagttgagtagttactggaacctttgacattgccttgtaatgaggtacttccaaaaaaagacccctaacaatggcataatagtgaggtctctctgtgcatatacataatatatatgcaggataaatgtgtgcaccaatcaaatctaaaattttatgtgactgtcaaatgaatattatttgggttaagatttttcatttctgatttggatagaaaattgctattaatcttgtattaaaatagtttttaaaaatct

SEQ ID NO: 9722 - protein, 555 aa, Homo sapiens; identical to SEQ ID NO: 1411

SEQ ID NO: 9723 - DNA, 7117 bp, Homo sapiens
ctttctccttccctcttgcctccagtgactgtctccaggatttctctcttcctatttcaggaggactctcacaggctcccacagcctgtgttaagctgaggtttcccctagatctcgtatatccccaacacatacctccacgcacacacatccccaagaacctcgagctcacaccaacagacacacgcgcgcatacacactcgctctcgcttgtccatctccctcccgggggagccggcgcgcgctcccacctttgccgcacactccggcgagccgagcccgcagcgctccaggattctgcggctcggaactcggattgcagctctgaacccccatggtggttttttaaacacttcttttccttctcttcctcgttttgattgcaccgtttccatctgggggctagaggagcaaggcagcagccttcccagccagcccttgttggcttgccatcgtccatctggcttataaaagtttgctgagcgcagtccagagggctgcgctgctcgtcccctcggctggcagaagggggtgacgctgggcagcggcgaggagcgcgccgctgcctctggcgggctttcggcttgaggggcaaggtgaagagcgcaccggccgtggggtttaccgagctggatttgtatgttgcaccatgccttcttggatcggggctgtgattcttcccctcttggggctgctgctctccctccccgccggggcggatgtgaaggctcggagctgcggagaggtccgccaggcgtacggtgccaagggattcagcctggcggacatcccctaccaggagatcgcaggggaacacttaagaatctgtcctcaggaatatacatgctgcaccacagaaatggaagacaagttaagccaacaaagcaaactcgaatttgaaaaccttgtggaagagacaagccattttgtgcgcaccacttttgtgtccaggcataagaaatttgacgaatttttccgagagctcctggagaatgcagaaaagtcactaaatgatatgtttgtacggacctatggcatgctgtacatgcagaattcagaagtcttccaggacctcttcacagagctgaaaaggtactacactgggggtaatgtgaatctggaggaaatgctcaatgacttttgggctcggctcctggaacggatgtttcagctgataaaccctcagtatcacttcagtgaagactacctggaatgtgtgagcaaatacactgaccagctcaagccatttggagacgtgccccggaaactgaagattcaggttacccgcgccttcattgctgccaggacctttgtccaggggctgactgtgggcagagaagttgcaaaccgagtttccaaggtcagcccaaccccagggtgtatccgtgccctcatgaagatgctgtactgcccatactgtcgggggcttcccactgtgaggccctgcaacaactactgtctcaacgtcatgaagggctgcttggcaaatcaggctgacctcgacacagagtggaatctgtttatagatgcaatgctcttggtggcagagcgactggaggggccattcaacattgagtcggtcatggacccgatagatgtcaagatttctgaagccattatgaacatgcaagaaaacagcatgcaggtgtctgcaaaggtctttcagggatgtggtcagcccaaacctgctccagccctcagatctgcccgctcagctcctgaaaattttaatacacgtttcaggccctacaatcctgaggaaagaccaacaactgctgcaggcacaagcttggaccggctggtcacagacataaaagagaaattgaagctctctaaaaaggtctggtcagcattaccctacactatctgcaaggacgagagcgtgacagcgggcacgtccaacgaggaggaatgctggaacgggcacagcaaagccagatacttgcctgagatcatgaatgatgggctcaccaaccagatcaacaatcccgaggtggatgtggacatcactcggcctgacactttcatcagacagcagattatggctctccgtgtgatgaccaacaaactaaaaaacgcctacaatggcaatgatgtcaatttccaggacacaagtgatgaatccagtggctcagggagtggcagtgggtgcatggatgacgtgtgtcccacggagtttgagtttgtcaccacagaggcccccgcagtggatcccgaccggagagaggtggactcttctgcagcccagcgtggccactccctgctctcctggtctctcacctgcattgtcctggcactgcagagactgtgcagataatcttgggtttttggtcagatgaaactgcattttagctatctgaatggccaactcacttcttttcttacactcttggacaatggaccatgccacaaaaacttaccgttttctatgagaagagagcagtaatgcaatctgcctccctttttgttttcccaaagagtaccgggtgccagactgaactgcttcctctttccttcagctatctgtggggaccttgtttattctagagagaattcttactcaaatttttcgtaccaggagattttcttaccttcatttgcttttatgctgcagaagtaaaggaatctcacgttgtgagggttttttttttctcatttaaaataaaaaaggaagaaagaaaataattttccttgtaaaatcgggccaaaccccaagacagctacattttcaacaaaaaagcaaacagagaaaaataaatgaactttaacactgtaagttcagcattgacagccaacttccagtgtaagcttttttgtgacaaatccgggtttaaaaatgcttatggggagaaagcttaaagtttgttctaaatgtagtgaaaatgcactgttgtcttggaggtatcatcttgcactctaaccaaacaacaccaaattaatctggaggtactgatactaaatttggaatcccgtctttaatatgagaacacaaattactacaactcagtacctctgtcttactctgcccaatttcaatttagtaatggcaccattattcttaattcccttaatgtctgtccgctgtatccaattggcacagattttccccttcatcttcaattactagtagctacccccatcaattcaccttcctcaagagtctcaattgaaaataatctttgatgatacaatctctgcttttgccacaggtttgacattaactagacgtttctgcccctgtgctcattaccctcccaaaacaatagtttttttaatgaattgaaacacaattagatccattcctgagttttcatttttaactatttactttgtgtcagttggtttctgcatcacaagggcattctcttacaaaacaactcacaacagaaaaaaaaagtcaagacaaaaaatatatatatatagtattgacatggagatttctttcacttttttagtcttagtatgatcatctatttttatatctatgtatatataaatcacagattttaacttcttaattccaagctcagggttgacacacctttgtaagaaaatgttttgtcaaccagctcttcttgttttgtgctgctcaaagaagggattcctcagtgatcggtgagcaccaagaatcaagaaagagaactttttatgtatctaactgtccatttattaaaaatttgccagggcacacccttctgcatgagtgtgcttcagcctgggtgctccagactacaccaaactcatgggatgagccattggtgtgcagggctttaccggtgatggaaactgtatgtgtaaagaatgttattcatgaaaaaccattgctttcatgtaaaacaccttcggcctaggattcctgcctggcacttggatacattacctaactcaataggccagtttagagccacagcctaacctgttcaccaagtaggccaaagccaggcctttcgctccccctgacagagagaagcaaaataaacccaactgggggctttatgaatacagttggctatccatatgtttcttagtttttatgatgcatctggagtagggaaaagtaatgtttcaagacaccatagtaggccagttacattttaattaactcatcgacagtattgacacgtaaatggtatttttcaatctgttctcatcaaaattaaaattagttattgatttagtcatcacatttaagtagaacacatgtggcacaatagtattaagtatatttgagcacttttgcaagacagaaagtatttacaagcatctattgctactttatgcctaatgaaatataaaatgtaggatgatgagagactttgtggcattctttcatttaaacctttatgaaattaaccatctagttcatcattacatactcctagaaaaccatccatttcactgcccacattttggcttcctaccacaaattccacataagacttctctatgaaggaccagtcatttacattgctcatttcattctgtgttcagaagtcagtattgtctttctccaataattaaggtgcaatacaaattaaatcaaccttgattttccagactatttgaataataacttgcttttatggctttaaactccaggtctttcctttttaaaatatttctgcattctcttttatgaactagatcaggatgccttgtttttcctgtgctttcacccccaaaaggttttgtgcatgtgtatgaatacacataatattagtgaatgtgaacccatgttctatacgcactaaacacacagttaatatataaacgcctgcttcatttgtttcaacaccttcattatcaatatgattcatattgatgagatatagtgatgcataatgagccaggcagagagctgaaatgatatcagttaatgatgtcacagtgttagcaccctgcatggatgtggtcaaaatatcattcaagttgtacttcctagtttttatcatcatactactatgtcatatgattttcagactaatttaacatgagaaatgttttggccctaaaggatttcacttaacctagttaccctatttcagtaagtattttggaattcaaccctcgaattattttttctcatttcagcatagtgataggggatgcaatgaggcttcattattttttatgacctgcccctcatttgctctgatgttccctaaattctgtaatcatatcataacttttgttatgaatagagaggaatgggctcactgaaacctgacactagaaattggtgggtgatgctcataactgcaaacacttagcttattgaagtgcctctatttacatgttctttagttataatatgtatttttctaacagaaatacacgtctgtaattggtatatattatactttgtatgtgtcacaacaaaagctaaacagaggctaaagtctttagcagagaagaatgaattacaaatttaccaataagagctctgtttatggttctgtattgaaggacaaccatgacaaccttctgtcattttcacgaaggccaagttggtactttgattatagccatcgtagaacattagcactagaaatctgtctcccttacaatgacttacctagctagcatcaagtaacttgtatcacctgctttaaatgtaagggatagaaaatactattttgtctacactgaaaaacattattattcattgataagtagtaataattataaaagtaacattctttaaagcaaacacattgaaaatattattacaggcagaaccctgatttttaatttatattccctgctgcagacattagccttctttaattcttttgccattacatacatgtttcggctacagactgaacacgaactaaagtccctaaggaggaaaaaaccttaacatattcctgagatgtgattcttttattacttctttttgcaaagctaattatcaaatgatttgattaaacctagacgcattaggaaatgcaagttttacctaaaacttgcagaaatttaaacacatttccatttacttactaacgaacagacctgatttttatttaaaaacacaatttagctttgccaacagaagagtaaaggaaaccataacttataaatttgtaatgtgttcctccttgttggagacattagccagtgtttagttttagaccaacttatacaaagagagtattgatttgtacacattctggagacttgctatatcatggtttgctatggcacagactcagcttagcatggggacattttgaacttcattcaaagttgagtagttactggaacctttgacattgccttgtaatgaggtacttccaaaaaaagacccctaacaatggcataatagtgaggtctctctgtgcatatacataatatatatgcaggataaatgtgtgcaccaatcaaatctaaaattttatgtgactgtcaaatgaatattatttgggttaagatttttcatttctgatttggatagaaaattgctattaatcttgtattaaaatagtttttaaaaatctaccagtgccctttctgcattttcttaattattgtcatagtctaaatttcagagccatggaattttttgtgtttgagacatttttagaagcttcaatattaaaaaacaacaacaaacctcgtatattaaaacagtgccactctcctaagtacactcagcatctgaaatcaggaactatttgaactttagaacatttagagcttcccaaatgtgtatggaaaatactgtagcgctgttcttttgtactgatttcttctcagaggataaatttagtgacttgaaaactgatgtcaatactttataaatgaggtcagaaaataagatcaaatgtgaaaagactaataatttcccaatttagccaattgcattgatttttatacttctgaaatgtttccatcctctcaggcatgctaaatattgtataacctgctaaagatttatttcacaaatgcttattgaactcttattctctataaaccctgctctaggggatttatcactggctgtgaaaaaccaccagttgaaaattattcattccttaatgcagctaatcataattattacagataaataatgtatttcaagaatgatcttataaataaaggaacccatacaaac

SEQ ID NO: 9724 - protein, 555 aa, Homo sapiens; identical to SEQ ID NO: 1411

SEQ ID NO: 9725 - DNA, 1389 bp, Homo sapiens
ggcctcagaggcggcgggtccggcgcgggcgcagcggtgcgggcgctcggctggggcgcggggcggggacgcggccgctgcccgctttgcgccgctcctccctgcgcgagtagcgctggccccggcgtcgaggcggccatggcgacccggagcccgctccccacccaccccgcctgctccgccctcccctccgccccgcgccacctttgatggctcggacctcagccggccaccgccagccctgctcgcgcgcccgcgccgccgccgcccgcgggtattaatagccggcgccgccgcgccctcggccgccgggggcttgggagccgccgatcccggagcccgagccgggagagggagccgccgcagccgccggcgctgtggagatattctctaagccgctttcatcatgggagaaatagagcagaggccgaccccaggatcacgactgggggccccggaaaattcggggatcagtaccttggaacgtggacagaagccgcccccaacaccttcaggaaaactcgtgtccatcaaaatccagatgctggatgacacccaggaggcatttgaagttccaatggtgtcctcatcctccttcctcaaagccaccggctcctcctggacgggttgggtactgagatgctccatgaagcccaagcaccattcacatctaattgagaagtttggagaggacagaattctcactcatcttacaggctctatttcttacacaaactgggctggaagtagaagcttagcggtcacagtcactgaagagcttcttaatcttttttgagtcaggacttgaagtcctgtttcattatttcattcaaagaaattgattggcaatggccagagttaaattcaaaggtgacattaacacatttcagtgcccaataagtgatttttctgctgggtaggagtagatacagatgtgatctcagatacgtgaagctgcatacagaggggcccatccactcctaaacgggtctccaggaggcttggtttgatctactagatttggtgcctcttaaagggaagcaatacagcttttctgctgtgggttgtttgccactaggggaagattcatttctattccagccataaattagaccaaagagagggatttggtttattgctagtgcagaagttaaaaaccatcttcctttcctgagtggtctcttaattagattctttagtttttaaatgttaactggaattgctgaagtttaattcctgaaagggtttagtttttaaaaggagtacctcatttaccatattactgtgttctgagaaatctacagtaatttttgtgtaacttttttattcaaagaatggattgttaattgtaaagccatttagaaaggcgaataaagtcagatctacttt

SEQ ID NO: 9726 - protein, 129 aa, Homo sapiens; identical to SEQ ID NO: 1413

SEQ ID NO: 9727 - DNA, 1380 bp, Homo sapiens
gccacggccgttgggagcctgagactcaaacatggcagcgccaccttctccaggaaggacggccgaccaagcagaccaggtatgcaccttcctcttcaaaaagcctggacggaaaggggctgcaggcctcagaaagcgcccggcctgcgaccccgagcacggagagagcagcagcagcggggacgagggcgacacagtggctcagcccccgcgggtggcaccgaggccccggggcctccacagctggcagaaggcggctcacggcgacaggaggggcgaggaggcggcgcctgagagcctcgacgtggtgtacaggtccacccgctcggcgaagcctgtggggccagaggacatgggggccaccgctgacttcgagcaggacaccgagaaggagcaccatacgccgaccatcctcaagtgcagccagcgggtccaggaggcactgcggggtcgggagcacgaccacatctaccggggaatccacagctacctgaggtacctgaagcccaaggacacgtccatgggcaactcctcctcggggatggcgaggaagggccccatacgtgcgccagggcatctgcgcgccactgtgcgctgggattaccagcctgacatctgcaaggactacaaggagactggcttctgtggcttcggggacagctgcaaattcctccacgaccgttccgattacaagctcgggtgggagattgaacgggagcttgaagagggtcgctactgtatctgcgaggacgaaaaccatgaagtgggaagcgaggaagaggaaataccattcaggtgtttcatatgtcgccaggccttccaaaacccagtcgtcaccaagtgcaggcattatttctgcgagagctgcgcgctggagcacttccgggccaccccgcgctgctacatctgtgaccagccaaccggcggcatctttaaccccgccaaagaactgatggcgaaactgcaaaagcttcaggctgcagaaggaaaaaagagataagaaagactcaagtctgtatgtacactggggagaagcagcctgttgagtaagatgagagagatgacagtcttcctgcaatcccatgcctgagtatgtaaccaaaagaattgaaatccggatctcaaagaggtatgtgcactcccatgttcactgcagaattatttgcaaaagccaagaggtgtaaacaacccaagtgtccatggatggatgaatggacaaacaaaatgcgatacacacacacaatggaatgctattaagccttaacgggaaggaaatccttttaaagatttaaactgatccttttaaggatcacatgctacaactagaatgaaccttgaagacgacactgctaagtgaaataaactagtcacaaaatgacc

SEQ ID NO: 9728 - protein, 322 aa, Homo sapiens; identical to SEQ ID NO: 1417

SEQ ID NO: 9729 - DNA, 725 bp, Homo sapiens
gcagagagagccgccgccgagcgggtggcggagcagtccccagcctccagccggcctggctgcgcgcaaccgcgccggccccgggcacaggggcaactgccgacccctctcacccgccgcgcggggctggtttccgagccgagtcccggccatcgccgcgtcgcctggcgcccggctccggcggacccttctccggcaggttgctttcagctatgtaacgtttttcgatcccatgagatggaaatcgaccagtgcttgctagagtcccttccccttggccaacggcagcgtctagtgaagcgcatgcgctgtgagcaaatcaaagcctactatgagcgcgagaaggcttttcagaagcaggaagggttcctgaaaaggctgaagcatgcgaagaatccgaaagttcacttcaacctcacggacatgctacaggacgcgattatccaccacaatgacaaagaagtgcttcggctcctgaaggagggggcagacccccacaccctcgtctcctcgggagggtccctgctccatctgtgtgctcggtatgataatgccttcattgcagaaattctgattgacagaggagtcaacgtcaaccaccaggatgaagacttctggacgcccatgcacattgcctgtgcctgcgataaccctgatattgtcctgcttcttgtattagctggagccaatgtccttctccaggatgtgaatggaaatatcccatt

SEQ ID NO: 9730 - protein, 161 aa, Homo sapiens
MEIDQCLLESLPLGQRQRLVKRMRCEQIKAYYEREKAFQKQEGFLKRLKHAKNPKVHFNLTDMLQDAIIHHNDKEVLRLLKEGADPHTLVSSGGSLLHLCARYDNAFIAEILIDRGVNVNHQDEDFWTPMHIACACDNPDIVLLLVLAGANVLLQDVNGNI

SEQ ID NO: 9731 - DNA, 6874 bp, Homo sapiens
ctgcgctcggagactttcagtgaaagcagaggagagatttccaaaggttgtattttccttctggttggagcctctcatccacattgtggttgctttcagctatgtaacgtttttcgatcccatgagatggaaatcgaccagtgcttgctagagtcccttccccttggccaacggcagcgtctagtgaagcgcatgcgctgtgagcaaatcaaagcctactatgagcgcgagaaggcttttcagaagcaggaagggttcctgaaaaggctgaagcatgcgaagaatccgaaagttcacttcaacctcacggacatgctacaggacgcgattatccaccacaatgacaaagaagtgcttcggctcctgaaggagggggcagacccccacaccctcgtctcctcgggagggtccctgctccatctgtgtgctcggtatgataatgccttcattgcagaaattctgattgacagaggagtcaacgtcaaccaccaggatgaagacttctggacgcccatgcacattgcctgtgcctgcgataaccctgatattgtcctgcttcttgtattagctggagccaatgtccttctccaggatgtgaatggaaatatcccattagattatgctgtagaagggacagaatccagctctatcctgttgacctatctggatgaaaatggagtggatttgacctcactgcgccagatgaagcttcagagaccaatgagtatgttaacagatgtcaaacacttcttatcatctggaggaaatgtcaatgagaaaaacgatgaaggagtaaccctgttacacatggcgtgtgcgagtggctacaaggaggtggtgtctcttatcctggaacatggtggagacctcaacatagtagatgatcagtactggactcccctccacttggcagccaaatatggccagacaaatctggtgaaacttctcctgatgcatcaggcaaacccacacctcgtgaactgtaatgaggagaaggcgtcagatattgctgcctctgagtttattgaggaaatgctgctgaaagccgaaattgcctgggaagaaaaaatgaaagagcctttatctgcttctaccttagctcaagaagagccctatgaagagatcattcacgatcttcccgtactgtcgagtaagctcagtcccctggtgttaccaattgccaagcaagacagtttgttggaaaaagacattatgttcaaagatgcaacaaaaggtctgtgtaagcagcagtctcaggacagcatccctgaaaaccccatgatgagcggttccaccaaacccgagcaggtcaagctaatgcctcctgccccaaacgatgacctggcaacgctcagcgagctcaatgatggcagcctgctctatgagattcagaagcgctttgggaacaatcagatctatacattcattggagacattcttttgcttgttaacccatacaaggagcttccaatttattcttccatggtgtcccagctgtatttcagctcctcagggaagctgtgttcctcgctgcctcctcacctcttctcctgtgtggagagagcctttcaccagctcttccgggaacagcggcctcagtgtttcatcctcagtggagaaaggggatcaggaaagtctgaagccagcaaacaaatcataagacacctcacctgcagggctggcgccagcagggccacactggattccagattcaaacatgtcgtgtgcatcttagaagcctttggacatgccaagaccacacttaatgatttgtccagttgcttcatcaagtattttgaactgcagttctgtgagaggaaacaacagctaaccggagccagaatttatacatatttgctagagaaatccagacttgtttcacaacctcttggccagagcaattttctcattttctacttgttgatggatgggttatctgctgaagaaaaatatggacttcatcttaataatttatgtgcacaccggtatttgaaccagaccatacaggatgatgcatccacaggggagcgttctctgaacagggagaaattggctgttttgaaacgagccctgaatgtagttggcttcagcagcttggaggtggagaatctgttcgtaattctagcagcaatattgcaccttggagacattcggtttactgccctgaatgaggggaactccgccttcgtttctgacctccagctcctggaacaagtggctggaatgttacaagtatcaacagatgaattggcatctgccttaacaactgatattcaatattttaaaggggatatgataatacgacgacataccatacagattgctgagtttttccgagacctcttggccaagtccctgtacagtcgtttgtttagctttttggtgaataccatgaattcttgcctccacagtcaagatgaacagaaaagcatgcagacattggatattggaatattggacatttttggttttgaagagtttcaaaagaatgaatttgaacaactttgtgtcaacatgaccaatgagaagatgcaccactatatcaatgaagtgctttttctccacgagcaagtggaatgtgtacaagagggagttaccatggaaacagcatattctcctggtaaccagaatggagttttggacttttttttccagaagccatctggatttctcaccttattggatgaagaaagtcaaatgatttggtcagtggaatcaaattttccaaaaaaactacaaagtctcctagaatcctcaaacacaaatgcggtgtactcccccatgaaggatgggaatgggaatgttgccctcaaagaccacggtacagccttcaccatcatgcactacgcaggaagggtaatgtatgatgttgttggggcgattgaaaaaaataaagactccctttcacagaatcttctatttgtaatgaaaactagtgaaaatgtcgtgatcaatcatttgttccagtcgaaattgtcacaaacaggatccctcgtatctgcctatccttcctttaaattccgaggacataagtctgccctgctcagtaagaaaatgacagcttcttcaattattggagaaaacaagaattatctagaacttagtaagttattaaaaaagaaaggaacttctacatttcttcaaagattggaacgaggagatccagtcaccatagcatcacaactcaggaaatcactaatggatattattggaaaacttcagaagtgcactccacacttcattcattgcatcaggcccaataactcaaagctgccagatacttttgataatttttacgtgtctgctcagctacaatatattggggtcctggagatggtgaagatcttccgatatggataccctgttcgcctttccttctcggatttcctgtcaaggtataagccactggctgatacattcctgcgtgagaagaaggaacagtcagctgccgagcgatgtcgacttgttctccagcagtgtaaattacaaggctggcagatgggagtccgaaaagtgtttctaaaatactggcatgctgaccaactcaatgatttgtgcctacagttgcagagaaaaattataacctgccaaaaagttatcagaggatttttagcacgccagcacctgcttcagagaataagcatcagacaacaagaggtgacttctatcaatagctttctgcagaacacagaggacatggggctgaaaacctacgatgccctggtcattcagaatgcttcagacattgcccgggaaaatgaccggctccgtagtgaaatgaacgctccctaccataaagagaagttagaggtcaggaacatgcaagaggaaggaagcaaaagaaccgatgacaagagtggacccaggcatttccaccccagctccatgtcagtctgcgcggccgtggatggcctgggccagtgcctcgttggcccgtccatctggtctccttcgctgcactcggtgttcagcatggatgacagcagcagcctcccgtctccacggaaacagcccccgcccaagccaaagagggaccccaacacccggctgagtgcttcctatgaggctgtgagcgcctgcctctccgcggccagggaagcggccaacgaagctctggcccggcccagaccgcacagcgacgactacagcaccatgaagaagattcctcctcgaaagcccaagcgcagccccaacaccaagctcagcggctcctacgaggagatatcggggtcccggcccggggacgcgaggcccgcgggcgccccgggggcagcagcgcgcgttctgacccccgggactccgcagtgcgcgctgcccccggcggcgcctccgggtgacgaggacgacagcgagcctgtgtacatcgagatgctggggcacgcggccaggcccgatagcccggaccccggggagtccgtgtacgaggagatgaagtgttgcctgcccgacgacggcggcccgggcgcgggctccttcctgctccacggcgcatcgccgcccctgctccaccgcgcgccggaggacgaggcggcggggcccccaggggacgcgtgcgacatcccgccgcccttccccaacctgctgccgcaccggccgcccctgctggtgttccccccgacccccgtcacctgctcccccgcctccgacgagtcgcccctgacacccctggaggtgaagaagctgccagtcctggagaccaacctcaagtaccccgtgcagccggaggggtcgagcccgctgtccccgcagtactccaagagccagaagggcgacggcgacaggcccgcgtcccccggcctggcgctgttcaacgggtccggccgagcctccccgccgtccacgccgcccccgcccccgcccccgcccgggccgccccccgcgccctacaggccctgcgcgcacttggccttcccgccggagcccgccccggtgaacgcggggaaagcggggccgagcgcagaggcgcccaaggttcacccaaagccaaactctgcccccgtggccgggccctgcagctccttccccaagatcccatattcccccgtgaaggccaccagggcggacgccaggaaggccggctccagtgcctcgccccccgcgccctacagccctcccagctccaggcctctcagcagccccctggacgagctcgccagcctcttcaactcggggaggagtgtgcttcggaaatccgcggcgggaagaaaaatcagggaagcagaaggttttgaaactaacatgaacataagtagccgagatgaccctagtacgtcagaaattacttccgagactcaagacagaaatgcaaataaccatggaattcagttatctaattcactatctagtgctataactgctgaaaatggaaattccatctcaaatggtttacctgaagaagatggatactcacggttgtctataagtggcacagggacttcgacatttcaaagacacagggacagtcacaccactcaggtaatccatcagctgaggctctcagagaatgaaagtgtggccctgcaggaactcttggactggaggagaaagctctgtgaggaaggacaagactggcagcagatcctgcaccacgctgagcccagggtgcctcccccaccaccttgcaagaagcccagccttctgaagaagccggaaggggcctcctgcaacaggctgccgtctgagctctgggacaccaccatttgatgtggcctgaactgcagacttacaaaatagaactgcctactgattccgggctgcaacaacagaaggctgccttctgacatgcgctggggcttctctccacgcatttagacaaaaaaagcacaggacacagacactaaatatatgagatcccgtgtgtgtgtgtgtgtgtttgtgtgtgtgtgtgtgggttctttcttatccatctcgtggtgatacactctgattttcaagctcctcatttacggctctgtgctacccctaggtagcaagagagaggctgggaaaagtgtggacgtggccagagcgagagagtagcggaggaaaggagcaatccatgcacactctgtacagttgtttttctacggttcaacagtctgtttattgtacttccaatggttttattataatacagtatacgggacatatattttatttctttgtagctacttgtgttttattggtattataaacctgataattatttacatgtttattactgtaattttataaatttatgcaattggtggtgcttcctttcttcaaaatacagattttaaaaaatcatttctagattatttttttcctccacagtccttttttttcacctaacgcacctaaatcttgaaactacattgttgttttagcttcgccagtgtcaccccttgcaaaactatgaattgagccccatgttttaggtgttactcatggatgaggaggctgttctttcctatgccctgtatttctggataagtggattgtgtaccctttagttaaatttcacctcccgacttcagcatagatcacaggaaatcacatggcacacggttaaacacgtatggcttcaaatccatagccggtggtgtaaaatgatcatattcattcaaaggcctacacagtacaaatgagcacgctgccatgtactggtttgagcagtaggggctgcatcgcacagcgctcgtcccccgggacttacactgcatgattccctcactgtatatcctcaaccctcccataatgcaaggccttgttcattgatgtgctttcgtcggctgtcggaaagttctgagcagtggctccagaccaccttgtcttgctacttggaactttttattcataccagcctttgaaaagttactgtgccaataaagaggtacaactgtgttcttctatt

SEQ ID NO: 9732 - protein, 1858 aa, Homo sapiens; identical to SEQ ID NO: 1419

SEQ ID NO: 9733 - DNA, 3529 bp, Homo sapiens
ggagagatttccaaaggttgtattttccttctggttggagcctctcatccacattgtggttgctttcagctatgtaacgtttttcgatcccatgagatggaaatcgaccagtgcttgctagagtcccttccccttggccaacggcagcgtctagtgaagcgcatgcgctgtgagcaaatcaaagcctactatgagcgcgagaaggcttttcagaagcaggaagggttcctgaaaaggctgaagcatgcgaagaatccgaaagttcacttcaacctcacggacatgctacaggacgcgattatccaccacaatgacaaagaagtgcttcggctcctgaaggagggggcagacccccacaccctcgtctcctcgggagggtccctgctccatctgtgtgctcggtatgataatgccttcattgcagaaattctgattgacagaggagtcaacgtcaaccaccaggatgaagacttctggacgcccatgcacattgcctgtgcctgcgataaccctgatattgtcctgcttcttgtattagctggagccaatgtccttctccaggatgtgaatggaaatatcccattagattatgctgtagaagggacagaatccagctctatcctgttgacctatctggatgaaaatggagtggatttgacctcactgcgccagatgaagcttcagagaccaatgagtatgttaacagatgtcaaacacttcttatcatctggaggaaatgtcaatgagaaaaacgatgaaggagtaaccctgttacacatggcgtgtgcgagtggctacaaggaggtggtgtctcttatcctggaacatggtggagacctcaacatagtagatgatcagtactggactcccctccacttggcagccaaatatggccagacaaatctggtgaaacttctcctgatgcatcaggcaaacccacacctcgtgaactgtaatgaggagaaggcgtcagatattgctgcctctgagtttattgaggaaatgctgctgaaagccgaaattgcctgggaagaaaaaatgaaagagcctttatctgcttctaccttagctcaagaagagccctatgaagagatcattcacgatcttcccgtactgtcgagtaagctcagtcccctggtgttaccaattgccaagcaagacagtttgttggaaaaagacattatgttcaaagatgcaacaaaaggtctgtgtaagcagcagtctcaggacagcatccctgaaaaccccatgatgagcggttccaccaaacccgagcaggtcaagctaatgcctcctgccccaaacgatgacctggcaacgctcagcgagctcaatgatggcagcctgctctatgagattcagaagcgctttgggaacaatcagatctatacattcattggagacattcttttgcttgttaacccatacaaggagcttccaatttattcttccatggtgtcccagctgtatttcagctcctcagggaagctgtgttcctcgctgcctcctcacctcttctcctgtgtggagagagcctttcaccagctcttccgggaacagcggcctcagtgtttcatcctcagtggagaaaggggatcaggaaagtctgaagccagcaaacaaatcataagacacctcacctgcagggctggcgccagcagggccacactggattccagattcaaacatgtcgtgtgcatcttagaagcctttggacatgccaagaccacacttaatgatttgtccagttgcttcatcaagtattttgaactgcagttctgtgagaggaaacaacagctaaccggagccagaatttatacatatttgctagagaaatccagacttgtttcacaacctcttggccagagcaattttctcattttctacttgttgatggatgggttatctgctgaagaaaaatatggacttcatcttaataatttatgtgcacaccggtatttgaaccagaccatacaggatgatgcatccacaggggagcgttctctgaacagggagaaattggctgttttgaaacgagccctgaatgtagttggcttcagcagcttggaggtggagaatctgttcgtaattctagcagcaatattgcaccttggagacattcggtttactgccctgaatgaggggaactccgccttcgtttctgacctccagctcctggaacaagtggctggaatgttacaagtatcaacagatgaattggcatctgccttaacaactgatattcaatattttaaaggggatatgataatacgacgacataccatacagattgctgagtttttccgagacctcttggccaagtccctgtacagtcgtttgtttagctttttggtgaataccatgaattcttgcctccacagtcaagatgaacagaaaagcatgcagacattggatattggaatattggacatttttggttttgaagagtttcaaaagaatgaatttgaacaactttgtgtcaacatgaccaatgagaagatgcaccactatatcaatgaagtgctttttctccacgagcaagtggaatgtgtacaagagggagttaccatggaaacagcatattctcctggtaaccagaatggagttttggacttttttttccagaagccatctggatttctcaccttattggatgaagaaagtcaaatgatttggtcagtggaatcaaattttccaaaaaaactacaaagtctcctagaatcctcaaacacaaatgcggtgtactcccccatgaaggatgggaatgggaatgttgccctcaaagaccacggtacagccttcaccatcatgcactacgcaggaagggtaatgtatgatgttgttggggcgattgaaaaaaataaagactccctttcacagaatcttctatttgtaatgaaaagaggaaggtgcttctgagcaaaaggacagaatttacaatgtacccttttgtatttatacaggaggtgtcagatttttttttttgtaaagggctagagaataaatattttagaccttgtgcaccataagatccttgttgcagttactcacctctgctgttataatgtgaaaaacagctgtagacaatacaaatggatgtgactgtattctgataaaattttatttacaaaaacaggcagtgggccatgtttggctcaggagccatgattgctcactcactctatcataaaagcaaaatatttgtggttgccatcatgttttatgaatctgtgaaatactttgatgcttgtacatatttattaaaagcaagtgtaattcataaataataatttttatttgcaggtactttgcttatagtatctaattcaattttcgtagcatcaaaaagctcccagttgaggaagatggtgaggtctgttgtagaatgtacacaagcagagctgagtctctgagaccactaaccaggtacagtcagggagcttggagacagctcatagagacacacagcaaatacactcattagtgcctaagattagaagtaaagtctacttcactcaaaaggaggcag

SEQ ID NO: 9734 - protein, 940 aa, Homo sapiens
MEIDQCLLESLPLGQRQRLVKRMRCEQIKAYYEREKAFQKQEGFLKRLKHAKNPKVHFNLTDMLQDAIIHHNDKEVLRLLKEGADPHTLVSSGGSLLHLCARYDNAFIAEILIDRGVNVNHQDEDFWTPMHIACACDNPDIVLLLVLAGANVLLQDVNGNIPLDYAVEGTESSSILLTYLDENGVDLTSLRQMKLQRPMSMLTDVKHFLSSGGNVNEKNDEGVTLLHMACASGYKEVVSLILEHGGDLNIVDDQYWTPLHLAAKYGQTNLVKLLLMHQANPHLVNCNEEKASDIAASEFIEEMLLKAEIAWEEKMKEPLSASTLAQEEPYEEIIHDLPVLSSKLSPLVLPIAKQDSLLEKDIMFKDATKGLCKQQSQDSIPENPMMSGSTKPEQVKLMPPAPNDDLATLSELNDGSLLYEIQKRFGNNQIYTFIGDILLLVNPYKELPIYSSMVSQLYFSSSGKLCSSLPPHLFSCVERAFHQLFREQRPQCFILSGERGSGKSEASKQIIRHLTCRAGASRATLDSRFKHVVCILEAFGHAKTTLNDLSSCFIKYFELQFCERKQQLTGARIYTYLLEKSRLVSQPLGQSNFLIFYLLMDGLSAEEKYGLHLNNLCAHRYLNQTIQDDASTGERSLNREKLAVLKRALNVVGFSSLEVENLFVILAAILHLGDIRFTALNEGNSAFVSDLQLLEQVAGMLQVSTDELASALTTDIQYFKGDMIIRRHTIQIAEFFRDLLAKSLYSRLFSFLVNTMNSCLHSQDEQKSMQTLDIGILDIFGFEEFQKNEFEQLCVNMTNEKMHHYINEVLFLHEQVECVQEGVTMETAYSPGNQNGVLDFFFQKPSGFLTLLDEESQMIWSVESNFPKKLQSLLESSNTNAVYSPMKDGNGNVALKDHGTAFTIMHYAGRVMYDVVGAIEKNKDSLSQNLLFVMKRGRCF

SEQ ID NO: 9735 - DNA, 436 bp, Homo sapiens
gcaattctgaatcatcagctcatgtcatttctaaagccaagtccccatcctttgactcatcaattatcatatatttttactcatagatattctccctatcactttttaaagatgcaatttatgtctactttccagtaatcgtcatatttttatcaaagcttttagctaccatttgtttttgccacctatgcacttttggtggttttacagcaagaaacttccaaataatttctggtgtcatggactgcgtggtttcccattgttgctctaatctgcccttctcacttcaaacctctacttcctaaaatgagtcaaggatggactctgatgttgttgaaggtgagaagcagggcaaagagaaacagaaaaaaaggggagctgactgagacgtgaacgagctggggaagtccaggttgaacatgcacttatgagagac

SEQ ID NO: 9736 - protein, 38 aa, Homo sapiens
MSFLKPSPHPLTHQLSYIFTHRYSPYHFLKMQFMSTFQ

SEQ ID NO: 9737 - DNA, 733 bp, Homo sapiens
aaaagtgtttctaaaatactggcatgctgaccaactcaatgatttgtgcctacagttgcagagaaaaattataacctgccaaaaagttatcagaggatttttagcacgccagcacctgcttcagagaataagcatcagacaacaagaggtgacttctatcaatagctttctgcagaacacagaggacatggggctgaaaacctacgatgccctggtcattcagaatgcttcagacattgcccgggaaaatgaccggctccgtagtgaaatgaacgctccctaccataaagagaagttagaggtcaggaacatgcaagaggaaggaagcaaaagaaccgatgacaagagtggacccaggcatttccaccccagctccatgtcagtctgcgcggccgtggatggcctgggccagtgcctcgttggcccgtccatctggtctccttcgctgcactcggtgttcagcatggatgacagcagcagcctcccgtctccacggaaacagcccccgcccaagccaaagagggaccccaacacccggctgagtgcttcctatgaggctgtgagcgcctgcctctccgcggccagggaagcggccaacgaaggtcagccctggggagggacccagcctcgtgttccgggctcgcgcatgctctgacttcgccttggggcgcccatggcagtactgtcgccctaatgtattcttaatagaaataaatccaattgttggcttgcc

SEQ ID NO: 9738 - protein, 155 aa, Homo sapiens
MGLKTYDALVIQNASDIARENDRLRSEMNAPYHKEKLEVRNMQEEGSKRTDDKSGPRHFHPSSMSVCAAVDGLGQCLVGPSIWSPSLHSVFSMDDSSSLPSPRKQPPPKPKRDPNTRLSASYEAVSACLSAAREAANEGQPWGGTQPRVPGSRML

SEQ ID NO: 9739 - DNA, 546 bp, Homo sapiens
cttcatccatgtgctagttcagcctgtgagatgctggtgagcccacctccaggcactcacggactccccacccattgagtgtggcctggatttagtgactcaatcaaacgtgacagagtgctggggtgtcattttcaagactgggttatgtgaagactgcagcctccatctggggtgctctctcttggattgcttgctcagggatgtggggagagctgctgtgctgggaggctgcccatgtgagttgacttggatgtgaaccttctgtggcctgccaatagccacgtgtttgtgtggacactgctgtcatttctcttgggaagatactgaggagtcagattgctggatcccgtgaagaatgtgcacctgggattggctcttgcttcctaaggaacctcaaaaaagctgcaacctattggagacttttgattcagcatcaaggatatgcgtgagactttggttcttttctgttgggacacagttgattctgactgtcttaaagttaggcttttctaaagatttagactaataaattatttgaatggg

SEQ ID NO: 9740 - protein, 56 aa, Homo sapiens
MCTWDWLLLPKEPQKSCNLLETFDSASRICVRLWFFSVGTQLILTVLKLGFSKDLD

SEQ ID NO: 9741 - DNA, 1633 bp, Homo sapiens
cagcttcccttgtccagggagcaactcagacacagtctcgcttcatttttattctggggttgtacaatctaagggccggcccgcgtgctcgcttgccattggctggggactccagggcaagggatataagccagagcctagaccagtgagccaactgtgcgaaccagacccggcagccttgctcagttcagcatagcggagcggatccgatcggatcggagcggatcggagcacaccggagcaggctcatcgagaaggcgtctgcgagaccatggagaacggatacacctatgaagattataagaacactgcagaatggcttctgtctcacactaagcaccgacctcaagttgcaataatctgtggttctggattaggaggtctgactgataaattaactcaggcccagatctttgactacggtgaaatccccaactttccccgaagtacagtgccaggtcatgctggccgactggtgtttgggttcctgaatggcagggcctgtgtgatgatgcagggcaggttccacatgtatgaagggtacccactctggaaggtgacattcccagtgagggttttccaccttctgggtgtggacaccctggtagtcaccaatgcagcaggagggctgaaccccaagtttgaggttggagatatcatgctgatccgtgaccatatcaacctacctggtttcagtggtcagaaccctctcagagggcccaatgatgaaaggtttggagatcgtttccctgccatgtctgatgcctacgaccggactatgaggcagagggctctcagtacctggaaacaaatgggggagcaacgtgagctacaggaaggcacctatgtgatggtggcaggccccagctttgagactgtggcagaatgtcgtgtgctgcagaagctgggagcagacgctgttggcatgagtacagtaccagaagttatcgttgcacggcactgtggacttcgagtctttggcttctcactcatcactaacaaggtcatcatggattatgaaagcctggagaaggccaaccatgaagaagtcttagcagctggcaaacaagctgcacagaaattggaacagtttgtctccattcttatggccagcattccactccctgacaaagccagttgacctgccttggagtcgtctggcatctcccacacaagacccaagtagctgctaccttctttggccccttgctggagtcatgtgcctctgtccttaggttgtagcagaaaggaaaagattcctgtccttcacctttcccactttcttctaccagacccttctggtgccagatcctcttctcaaagctgggattacaggtgtgagcatagtgagaccttggcgctacaaaataaagctgttctcattcctgttctttcttacacaagagctggagcccgtgccctaccacacatctgtggagatgcccaggatttgactcgggccttagaactttgcatagcagctgctactagctctttgagataatacattccgaggggctcagttctgccttatctaaatcaccagagaccaaacaaggactaatccaatacctcttggattttatttaatgtcataatgttgtcagaataaagagaaagatgaaataatttc

SEQ ID NO: 9742 - protein, 289 aa, Homo sapiens; identical to SEQ ID NO: 1421

SEQ ID NO: 9743 - DNA, 2545 bp, Homo sapiens
cagcttcccttgtccagggagcaactcagacacagtctcgcttcatttttattctggggttgtacaatctaagggccggcccgcgtgctcgcttgccattggctggggactccagggcaagggatataagccagagcctagaccagtgagccaactgtgcgaaccagacccggcagccttgctcagttcagcatagcggagcggatccgatcggatcggagcggatcggagcacaccggagcaggctcatcgagaaggcgtctgcgagaccatggagaacggatacacctatgaagattataagaacactgcagaatggcttctgtctcacactaagcaccgacctcaagttgcaataatctgtggttctggattaggaggtctgactgataaattaactcaggcccagatctttgactacggtgaaatccccaactttccccgaagtacagtgccaggtcatgctggccgactggtgtttgggttcctgaatggcagggcctgtgtgatgatgcagggcaggttccacatgtatgaagggtacccactctggaaggtgacattcccagtgagggttttccaccttctgggtgtggacaccctggtagtcaccaatgcagcaggagggctgaaccccaagtttgaggttggagatatcatgctgatccgtgaccatatcaacctacctggtttcagtggtcagaaccctctcagagggcccaatgatgaaaggtttggagatcgtttccctgccatgtctgatgcctacgaccggactatgaggcagagggctctcagtacctggaaacaaatgggggagcaacgtgagctacaggaaggcacctatgtgatggtggcaggccccagctttgagactgtggcagaatgtcgtgtgctgcagaagctgggagcagacgctgttggcatgagtacagtaccagaagttatcgttgcacggcactgtggacttcgagtctttggcttctcactcatcactaacaaggtcatcatggattatgaaagcctggagaaggccaaccatgaagaagtcttagcagctggcaaacaagctgcacagaaattggaacagtttgtctccattcttatggccagcattccactccctgacaaagccagttgacctgccttggagtcgtctggcatctcccacacaagacccaagtagctgctaccttctttggccccttgctggagtcatgtgcctctgtccttaggttgtagcagaaaggaaaagattcctgtccttcacctttcccactttcttctaccagacccttctggtgccagatcctcttctcaaagctgggattacaggtgtgagcatagtgagaccttggcgctacaaaataaagctgttctcattcctgttctttcttacacaagagctggagcccgtgccctaccacacatctgtggagatgcccaggatttgactcgggccttagaactttgcatagcagctgctactagctctttgagataatacattccgaggggctcagttctgccttatctaaatcaccagagaccaaacaaggactaatccaatacctcttggattttatttaatgtcataatgttgtcagaataaagagaaagatgaaataatttcatttttttgtgtaacttggtatggggctggggcacagaccaagattgacatgaaaggatgtgagatcgcatgtcttgtgtgactatctgcttctcagacaagcagttaggaactgagatgagatagtatgtgagggcagcaaaggatgaagaagggcaaaatgatgaaaggtgaggtggaaagaggttatgagatggtaaagaaaagttaacttctggcacttgattgccacttctgtcaggctggtcctgcctctctcccttgccttctgattgtttcatttcctgtttatttgatcatatctgaattagttcactggttagcctcttccttagttcccacttccttaccaaagccctaattatatttcctcttgtttgccttttctctcctactcttctctaacatctgcagccacactctccattcactccatgctgacaaggcagtggcaaacacttttctctgctgccagccactccactgttgactggattgctgccagccccaggcaaacctgtgaagttgtttcatactctgcttctctttgagtgcctccttctctccttcctcttcctttctgggctccagtctttctcttcacttgtgcttgtcagaacctccctgtgatactgcctccaggcatttcccccatgttggctcaccgcactattatctttgcttatcaacttgcattcagctggctggcatgtttcaaaaccacactgccctcccaggcctgtgtgccttttgagaaagaccagtgctggatgagcctctagtaatgacaacattttagttgttagtggtataatacggaagagatattttgcacaggctgctttggagaactttcaaattatcctttgtttggtaactgacctacttaactgcccaatacaaagaaaaagc

SEQ ID NO: 9744 - protein, 289 aa, Homo sapiens; identical to SEQ ID NO: 1421

SEQ ID NO: 9745 - DNA, 1133 bp, Homo sapiens
aactgtgcgaaccagacccggcagccttgctcagttcagcatagcggagcggatccgatcggatcggagcggatcggagcacaccggagcaggctcatcgagaaggcgtctgcgagaccatggagaacggatacacctatgaagattataagaacactgcagaatggcttctgtctcacactaagcaccgacctcaagttgcaataatctgtggttctggattaggaggtctgactgataaattaactcaggcccagatctttgactacggtgaaatccccaactttccccgaagtacaggtactggcaagggaaagtggggaatgggactgagggatgttcttggaattctgtggaacacaaccaaggaggccaatgtttctactccttgacctagcatttcactgaagacaaatgttgtaagagaggagaaaagcccaccatgagtcagagtgactttaggagatgcctctagcagacatcccataagagacaggacatgtgtgtgtcagtggactgaggctaagactcagaagagggccaggtgacaggggccaagtaaagggcaagggttgtttatttggtttacgtaatttctcaaataactaacttctgttggtttatttattaatttttaagatttctatcttcttttccctggagagttaagaatttttttttaagacctgtcagcaggaaaagacctttaatagctatttttttaaactctttaacacaagactggaagagcagagggagaaggtgagggaaatattaacagagggtgtgtgaagggcatacttctctaagggagatagtagtgacgctggctccactggccactcctacccccagtgagaagggcactgcattaaatgataagtgggttagtttttttaagcttatcaacatgtttattttttatactccacttgggtttcctttgtcaactttattactgtttttgttttgtttttttgcataagctcctctatctttgagaatttctcagctcttcctcttggttctagtccctctcccattccctaagggataggttggccgtctattagaagtgactgccagataaaagaaatggtaataatggctgttatgtctgtggggagttatct

SEQ ID NO: 9746 - protein, 90 aa, Homo sapiens [sequence omitted]

SEQ ID NO: 9747 - DNA, 838 bp, Homo sapiens
aactgtgcgaaccagacccggcagccttgctcagttcagcatagcggagcggatccgatcggatcggagcggatcggagcacaccggagcaggctcatcgagaaggcgtctgcgagaccatggagaacggatacacctatgaagattataagaacactgcagaatggcttctgtctcacactaagcaccgacctcaagttgcaataatctgtggttctggattaggaggtctgactgataaattaactcaggccccagctttgagactgtggcagaatgtcgtgtgctgcagaagctgggagcagacgctgttggcatgagtacagtaccagaagttatcgttgcacggcactgtggacttcgagtctttggcttctcactcatcactaacaaggtcatcatggattatgaaagcctggatcatgtgcctctgtccttaggttgtagcagaaaggaaaagattcctgtccttcacctttcccactttcttctaccagacccttctggtgccagatcctcttctcaaagctgggattacaggtgtgagcatagtgagaccttggcgctacaaaataaagctgttctcattcctgttctttcttacacaagagctggagcccgtgccctaccacacatctgtggagatgcccaggatttgactcgggccttagaactttgcatagcagctgctactagctctttgagataatacattccgaggggctcagttctgccttatctaaatcaccagagaccaaacaaggactaatccaatacctcttggattttatttaatgtcataatgttgtcagaataaagagaaagatgaaataatttc

SEQ ID NO: 9748 - protein, 130 aa, Homo sapiens [sequence omitted]

SEQ ID NO: 9749 - DNA, 1750 bp, Homo sapiens
aactgtgcgaaccagacccggcagccttgctcagttcagcatagcggagcggatccgatcggatcggagcggatcggagcacaccggagcaggctcatcgagaaggcgtctgcgagaccatggagaacggatacacctatgaagattataagaacactgcagaatggcttctgtctcacactaagcaccgacctcaagttgcaataatctgtggttctggattaggaggtctgactgataaattaactcaggccccagctttgagactgtggcagaatgtcgtgtgctgcagaagctgggagcagacgctgttggcatgagtacagtaccagaagttatcgttgcacggcactgtggacttcgagtctttggcttctcactcatcactaacaaggtcatcatggattatgaaagcctggatcatgtgcctctgtccttaggttgtagcagaaaggaaaagattcctgtccttcacctttcccactttcttctaccagacccttctggtgccagatcctcttctcaaagctgggattacaggtgtgagcatagtgagaccttggcgctacaaaataaagctgttctcattcctgttctttcttacacaagagctggagcccgtgccctaccacacatctgtggagatgcccaggatttgactcgggccttagaactttgcatagcagctgctactagctctttgagataatacattccgaggggctcagttctgccttatctaaatcaccagagaccaaacaaggactaatccaatacctcttggattttatttaatgtcataatgttgtcagaataaagagaaagatgaaataatttcatttttttgtgtaacttggtatggggctggggcacagaccaagattgacatgaaaggatgtgagatcgcatgtcttgtgtgactatctgcttctcagacaagcagttaggaactgagatgagatagtatgtgagggcagcaaaggatgaagaagggcaaaatgatgaaaggtgaggtggaaagaggttatgagatggtaaagaaaagttaacttctggcacttgattgccacttctgtcaggctggtcctgcctctctcccttgccttctgattgtttcatttcctgtttatttgatcatatctgaattagttcactggttagcctcttccttagttcccacttccttaccaaagccctaattatatttcctcttgtttgccttttctctcctactcttctctaacatctgcagccacactctccattcactccatgctgacaaggcagtggcaaacacttttctctgctgccagccactccactgttgactggattgctgccagccccaggcaaacctgtgaagttgtttcatactctgcttctctttgagtgcctccttctctccttcctcttcctttctgggctccagtctttctcttcacttgtgcttgtcagaacctccctgtgatactgcctccaggcatttcccccatgttggctcaccgcactattatctttgcttatcaacttgcattcagctggctggcatgtttcaaaaccacactgccctcccaggcctgtgtgccttttgagaaagaccagtgctggatgagcctctagtaatgacaacattttagttgttagtggtataatacggaagagatattttgcacaggctgctttggagaactttcaaattatcctttgtttggtaactgacctacttaactgcccaatacaaagaaaaagc

SEQ ID NO: 9750 - protein, 130 aa, Homo sapiens [sequence omitted]

SEQ ID NO: 9751 - DNA, 1670 bp, Homo sapiens
gaaccagacccggcagccttgctcagttcagcatagcggagcggatccgatcggatcggagcggatcggagcacaccggagcaggctcatcgagaaggcgtctgcgagaccatggagaacggatacacctatgaagattataagaacactgcagaatggcttctgtctcacactaagcaccgacctcaagttgcaataatctgtggttctggattaggaggtctgactgataaattaactcaggcccagatctttgactacggtgaaatccccaactttccccgaagtacagtgccaggtcatgctggccgactggtgtttgggttcctgaatggcagggcctgtgtgatgatgcagggcaggttccacatgtatgaagggtacccactctggaaggtaagtcagagggataggtccggttggatctggaagaggcaggagagaactatctagcctctttcactacctagctatctgggctaggtggatttttggtcctctccttccttttctttcacgatgtatgtcatgcatttcagtgtagctgaattaatgaaattttgtaaatttttttcggattgtttgcttcgaaggtgacattcccagtgagggttttccaccttctgggtgtggacaccctggtagtcaccaatgcagcaggagggctgaaccccaagtttgaggttggagatatcatgctgatccgtgaccatatcaacctacctggtttcagtggtcagaaccctctcagagggcccaatgatgaaaggtttggagatcgtttccctgccatgtctgatgcctacgaccggactatgaggcagagggctctcagtacctggaaacaaatgggggagcaacgtgagctacaggaaggcacctatgtgatggtggcaggccccagctttgagactgtggcagaatgtcgtgtgctgcagaagctgggagcagacgctgttggcatgagtacagtaccagaagttatcgttgcacggcactgtggacttcgagtctttggcttctcactcatcactaacaaggtcatcatggattatgaaagcctggagaaggccaaccatgaagaagtcttagcagctggcaaacaagctgcacagaaattggaacagtttgtctccattcttatggccagcattccactccctgacaaagccagttgacctgccttggagtcgtctggcatctcccacacaagacccaagtagctgctaccttctttggccccttgctggagtcatgtgcctctgtccttaggttgtagcagaaaggaaaagattcctgtccttcacctttcccactttcttctaccagacccttctggtgccagatcctcttctcaaagctgggattacaggtgtgagcatagtgagaccttggcgctacaaaataaagctgttctcattcctgttctttcttacacaagagctggagcccgtgccctaccacacatctgtggagatgcccaggatttgactcgggccttagaactttgcatagcagctgctactagctctttgagataatacattccgaggggctcagttctgccttatctaaatcaccagagaccaaacaaggactaatccaatacctcttggattttatttaatgtcataatgttgtcagaataaagagaaagatgaaataatttc

SEQ ID NO: 9752 - protein, 160 aa, Homo sapiens [sequence omitted]

SEQ ID NO: 9753 - DNA, 2582 bp, Homo sapiens
gaaccagacccggcagccttgctcagttcagcatagcggagcggatccgatcggatcggagcggatcggagcacaccggagcaggctcatcgagaaggcgtctgcgagaccatggagaacggatacacctatgaagattataagaacactgcagaatggcttctgtctcacactaagcaccgacctcaagttgcaataatctgtggttctggattaggaggtctgactgataaattaactcaggcccagatctttgactacggtgaaatccccaactttccccgaagtacagtgccaggtcatgctggccgactggtgtttgggttcctgaatggcagggcctgtgtgatgatgcagggcaggttccacatgtatgaagggtacccactctggaaggtaagtcagagggataggtccggttggatctggaagaggcaggagagaactatctagcctctttcactacctagctatctgggctaggtggatttttggtcctctccttccttttctttcacgatgtatgtcatgcatttcagtgtagctgaattaatgaaattttgtaaatttttttcggattgtttgcttcgaaggtgacattcccagtgagggttttccaccttctgggtgtggacaccctggtagtcaccaatgcagcaggagggctgaaccccaagtttgaggttggagatatcatgctgatccgtgaccatatcaacctacctggtttcagtggtcagaaccctctcagagggcccaatgatgaaaggtttggagatcgtttccctgccatgtctgatgcctacgaccggactatgaggcagagggctctcagtacctggaaacaaatgggggagcaacgtgagctacaggaaggcacctatgtgatggtggcaggccccagctttgagactgtggcagaatgtcgtgtgctgcagaagctgggagcagacgctgttggcatgagtacagtaccagaagttatcgttgcacggcactgtggacttcgagtctttggcttctcactcatcactaacaaggtcatcatggattatgaaagcctggagaaggccaaccatgaagaagtcttagcagctggcaaacaagctgcacagaaattggaacagtttgtctccattcttatggccagcattccactccctgacaaagccagttgacctgccttggagtcgtctggcatctcccacacaagacccaagtagctgctaccttctttggccccttgctggagtcatgtgcctctgtccttaggttgtagcagaaaggaaaagattcctgtccttcacctttcccactttcttctaccagacccttctggtgccagatcctcttctcaaagctgggattacaggtgtgagcatagtgagaccttggcgctacaaaataaagctgttctcattcctgttctttcttacacaagagctggagcccgtgccctaccacacatctgtggagatgcccaggatttgactcgggccttagaactttgcatagcagctgctactagctctttgagataatacattccgaggggctcagttctgccttatctaaatcaccagagaccaaacaaggactaatccaatacctcttggattttatttaatgtcataatgttgtcagaataaagagaaagatgaaataatttcatttttttgtgtaacttggtatggggctggggcacagaccaagattgacatgaaaggatgtgagatcgcatgtcttgtgtgactatctgcttctcagacaagcagttaggaactgagatgagatagtatgtgagggcagcaaaggatgaagaagggcaaaatgatgaaaggtgaggtggaaagaggttatgagatggtaaagaaaagttaacttctggcacttgattgccacttctgtcaggctggtcctgcctctctcccttgccttctgattgtttcatttcctgtttatttgatcatatctgaattagttcactggttagcctcttccttagttcccacttccttaccaaagccctaattatatttcctcttgtttgccttttctctcctactcttctctaacatctgcagccacactctccattcactccatgctgacaaggcagtggcaaacacttttctctgctgccagccactccactgttgactggattgctgccagccccaggcaaacctgtgaagttgtttcatactctgcttctctttgagtgcctccttctctccttcctcttcctttctgggctccagtctttctcttcacttgtgcttgtcagaacctccctgtgatactgcctccaggcatttcccccatgttggctcaccgcactattatctttgcttatcaacttgcattcagctggctggcatgtttcaaaaccacactgccctcccaggcctgtgtgccttttgagaaagaccagtgctggatgagcctctagtaatgacaacattttagttgttagtggtataatacggaagagatattttgcacaggctgctttggagaactttcaaattatcctttgtttggtaactgacctacttaactgcccaatacaaagaaaaagc

SEQ ID NO: 9754 - protein, 160 aa, Homo sapiens [sequence omitted]

SEQ ID NO: 9755 - DNA, 1070 bp, Homo sapiens
accagacccggcagccttgctcagttcagcatagcggagcggatccgatcggatcggagcggatcggagcacaccggagcaggctcatcgagaaggcgtctgcgagaccatggagaacggatacacctatgaagattataagaacactgcagaatggcttctgtctcacactaagcaccgacctcaagttgcaataatctgtggttctggattaggaggtctgactgataaattaactcaggcccagatctttgactacggtgaaatccccaactttccccgaagtacagtgccaggtcatgctggccgactggtgtttgggttcctgaatggcagggcctgtgtgatgatgcagggcaggttccacatgtatgaagggtacccactctggaaggtaagtcagagggataggtccggttggatctggaagaggcaggagagaactatctagcctctttcactacctagctatctgggctaggtggatttttggtcctctccttccttttctttcacgatgtatgtcatgcatttcagtgtagctgaattaatgaaattttgtaaatttttttcggattgtttgcttcgaaggtgacattcccagtgagggttttccaccttctgggtgtggacaccctggtagtcaccaatgcagcaggagggctgaaccccaagtttgaggttggagatatcatgctgatccgtgaccatatcaacctacctggtttcagtggtcagaaccctctcagagggcccaatgatgaaaggtatgtatgttactccgttttttttaggtgggtaggatttaaagacttctctaggagctgtgggagaatttttaaaattccgtttatgtgagataattcaacctgtgtcctaggtttggagatcgtttccctgccatgtctgatgcctacgaccggactatgaggcagagggctctcagtacctggaaacaaatgggggagcaacgtgagctacaggaaggcacctatgtgatggtggcaggccccagctttgagactgtggcagaatgtcgtgtgctgcagaagctgggagcagacgctgtt

SEQ ID NO: 9756 - protein, 113 aa, Homo sapiens [sequence omitted]

SEQ ID NO: 9757 - DNA, 2579 bp, Homo sapiens
cttgcatgcgttcaaattctttcccccttgttcagtagcctcttctttaagaagccagagtaagtatactatgagcttgcttgctggactgaggaggcaggtaattaagttagggcaatagataagaatacatgttttgagaactttgaaaaatttgaagaggtctataattactgcattcactgtactcactttattttgaaacagagtctcgctctgtcacccaggctcgagtgtagtgttgtgatctcggctcactgcaacctccacctcccaagttcaagagattctcccacctcagcctcccgagtagctgggattacaggcatgtgccaccacacctggctaatttttgtatttttagtagagatgaggtttcaccatgttggccagggtggtcttgaactcctggcctgttgatccgcctgtcttgggctcccgaagtgctgggactacaggtgtgagacaccgcacctggcctatttttaattttaatttttatagatttacaggggtacaatgcagttttgttatatggatatactgcgtggtggtgacgtctgtgctttagtgtaaccatcacctgagcagtgaacattgtacttattaggtaatttctcatccctcatccccatcccactttctcacctttccgagtccccagtgtctattatttcactctgtaggtccatatgtacacatttggttcccacttataagtgagaacatgtagtatttaatcttccatttctgagtatctactttttttgctcactttttactctctggcagtatggcttgtattatcttgaaatttctttaaaaagcccttccttctttgtgtgttcatgctgaacatgctgaacgcaccccatatctctaatcttgggttgtatttgtataattattagtaatgcctggctctctcaccagacttaaactttctgaaagcagagataataatgagtcttttacttaattacaacctaacattttgagcagagcgagtaactcacagtaggtgcttaatggatatgtgttgcatgaaaatataatcccattcatttctctttctgttttgtatacagtgccaggtcatgctggccgactggtgtttgggttcctgaatggcagggcctgtgtgatgatgcagggcaggttccacatgtatgaagggtacccactctggaaggtaagtcagagggataggtccggttggatctggaagaggcaggagagaactatctagcctctttcactacctagctatctgggctaggtggatttttggtcctctccttccttttctttcacgatgtatgtcatgcatttcagtgtagctgaattaatgaaattttgtaaatttttttcggattgtttgcttcgaaggtgacattcccagtgagggttttccaccttctgggtgtggacaccctggtagtcaccaatgcagcaggagggctgaaccccaagtttgaggttggagatatcatgctgatccgtgaccatatcaacctacctggtttcagtggtcagaaccctctcagagggcccaatgatgaaaggtatgtatgttactccgttttttttaggtgggtaggatttaaagacttctctaggagctgtgggagaatttttaaaattccgtttatgtgagataattcaacctgtgtcctaggtttggagatcgtttccctgccatgtctgatgcctacgaccggactatgaggcagagggctctcagtacctggaaacaaatgggggagcaacgtgagctacaggaaggcacctatgtgatggtggcaggccccagctttgagactgtggcagaatgtcgtgtgctgcagaagctgggagcagacgctgttggcatgagtacagtaccagaagttatcgttgcacggcactgtggacttcgagtctttggcttctcactcatcactaacaaggtcatcatggattatgaaagcctggagaaggccaaccatgaagaagtcttagcagctggcaaacaagctgcacagaaattggaacagtttgtctccattcttatggccagcattccactccctgacaaagccagttgacctgccttggagtcgtctggcatctcccacacaagacccaagtagctgctaccttctttggccccttgctggagtcatgtgcctctgtccttaggttgtagcagaaaggaaaagattcctgtccttcacctttcccactttcttctaccagacccttctggtgccagatcctcttctcaaagctgggattacaggtgtgagcatagtgagaccttggcgctacaaaataaagctgttctcattcctgttctttcttacacaagagctggagcccgtgccctaccacacatctgtggagatgcccaggatttgactcgggccttagaactttgcatagcagctgctactagctctttgagataatacattccgaggggctcagttctgccttatctaaatcaccagagaccaaacaaggactaatccaatacctcttggattttatttaatgtcataatgttgtcagaataaagagaaagatgaaataatttc

SEQ ID NO: 9758 - protein, 128 aa, Homo sapiens [sequence omitted]

SEQ ID NO: 9759 - DNA, 3491 bp, Homo sapiens
cttgcatgcgttcaaattctttcccccttgttcagtagcctcttctttaagaagccagagtaagtatactatgagcttgcttgctggactgaggaggcaggtaattaagttagggcaatagataagaatacatgttttgagaactttgaaaaatttgaagaggtctataattactgcattcactgtactcactttattttgaaacagagtctcgctctgtcacccaggctcgagtgtagtgttgtgatctcggctcactgcaacctccacctcccaagttcaagagattctcccacctcagcctcccgagtagctgggattacaggcatgtgccaccacacctggctaatttttgtatttttagtagagatgaggtttcaccatgttggccagggtggtcttgaactcctggcctgttgatccgcctgtcttgggctcccgaagtgctgggactacaggtgtgagacaccgcacctggcctatttttaattttaatttttatagatttacaggggtacaatgcagttttgttatatggatatactgcgtggtggtgacgtctgtgctttagtgtaaccatcacctgagcagtgaacattgtacttattaggtaatttctcatccctcatccccatcccactttctcacctttccgagtccccagtgtctattatttcactctgtaggtccatatgtacacatttggttcccacttataagtgagaacatgtagtatttaatcttccatttctgagtatctactttttttgctcactttttactctctggcagtatggcttgtattatcttgaaatttctttaaaaagcccttccttctttgtgtgttcatgctgaacatgctgaacgcaccccatatctctaatcttgggttgtatttgtataattattagtaatgcctggctctctcaccagacttaaactttctgaaagcagagataataatgagtcttttacttaattacaacctaacattttgagcagagcgagtaactcacagtaggtgcttaatggatatgtgttgcatgaaaatataatcccattcatttctctttctgttttgtatacagtgccaggtcatgctggccgactggtgtttgggttcctgaatggcagggcctgtgtgatgatgcagggcaggttccacatgtatgaagggtacccactctggaaggtaagtcagagggataggtccggttggatctggaagaggcaggagagaactatctagcctctttcactacctagctatctgggctaggtggatttttggtcctctccttccttttctttcacgatgtatgtcatgcatttcagtgtagctgaattaatgaaattttgtaaatttttttcggattgtttgcttcgaaggtgacattcccagtgagggttttccaccttctgggtgtggacaccctggtagtcaccaatgcagcaggagggctgaaccccaagtttgaggttggagatatcatgctgatccgtgaccatatcaacctacctggtttcagtggtcagaaccctctcagagggcccaatgatgaaaggtatgtatgttactccgttttttttaggtgggtaggatttaaagacttctctaggagctgtgggagaatttttaaaattccgtttatgtgagataattcaacctgtgtcctaggtttggagatcgtttccctgccatgtctgatgcctacgaccggactatgaggcagagggctctcagtacctggaaacaaatgggggagcaacgtgagctacaggaaggcacctatgtgatggtggcaggccccagctttgagactgtggcagaatgtcgtgtgctgcagaagctgggagcagacgctgttggcatgagtacagtaccagaagttatcgttgcacggcactgtggacttcgagtctttggcttctcactcatcactaacaaggtcatcatggattatgaaagcctggagaaggccaaccatgaagaagtcttagcagctggcaaacaagctgcacagaaattggaacagtttgtctccattcttatggccagcattccactccctgacaaagccagttgacctgccttggagtcgtctggcatctcccacacaagacccaagtagctgctaccttctttggccccttgctggagtcatgtgcctctgtccttaggttgtagcagaaaggaaaagattcctgtccttcacctttcccactttcttctaccagacccttctggtgccagatcctcttctcaaagctgggattacaggtgtgagcatagtgagaccttggcgctacaaaataaagctgttctcattcctgttctttcttacacaagagctggagcccgtgccctaccacacatctgtggagatgcccaggatttgactcgggccttagaactttgcatagcagctgctactagctctttgagataatacattccgaggggctcagttctgccttatctaaatcaccagagaccaaacaaggactaatccaatacctcttggattttatttaatgtcataatgttgtcagaataaagagaaagatgaaataatttcatttttttgtgtaacttggtatggggctggggcacagaccaagattgacatgaaaggatgtgagatcgcatgtcttgtgtgactatctgcttctcagacaagcagttaggaactgagatgagatagtatgtgagggcagcaaaggatgaagaagggcaaaatgatgaaaggtgaggtggaaagaggttatgagatggtaaagaaaagttaacttctggcacttgattgccacttctgtcaggctggtcctgcctctctcccttgccttctgattgtttcatttcctgtttatttgatcatatctgaattagttcactggttagcctcttccttagttcccacttccttaccaaagccctaattatatttcctcttgtttgccttttctctcctactcttctctaacatctgcagccacactctccattcactccatgctgacaaggcagtggcaaacacttttctctgctgccagccactccactgttgactggattgctgccagccccaggcaaacctgtgaagttgtttcatactctgcttctctttgagtgcctccttctctccttcctcttcctttctgggctccagtctttctcttcacttgtgcttgtcagaacctccctgtgatactgcctccaggcatttcccccatgttggctcaccgcactattatctttgcttatcaacttgcattcagctggctggcatgtttcaaaaccacactgccctcccaggcctgtgtgccttttgagaaagaccagtgctggatgagcctctagtaatgacaacattttagttgttagtggtataatacggaagagatattttgcacaggctgctttggagaactttcaaattatcctttgtttggtaactgacctacttaactgcccaatacaaagaaaaagc

SEQ ID NO: 9760 - protein, 128 aa, Homo sapiens [sequence omitted]

SEQ ID NO: 9761 - DNA, 962 bp, Homo sapiens
ttaaactttctgaaagcagagataataatgagtcttttacttaattacaacctaacattttgagcagagcgagtaactcacagtaggtgcttaatggatatgtgttgcatgaaaatataatcccattcatttctctttctgttttgtatacagtgccaggtcatgctggccgactggtgtttgggttcctgaatggcagggcctgtgtgatgatgcagggcaggttccacatgtatgaagggtacccactctggaaggtaagtcagagggataggtccggttggatctggaagaggcaggagagaactatctagcctctttcactacctagctatctgggctaggtggatttttggtcctctccttccttttctttcacgatgtatgtcatgcatttcagtgtagctgaattaatgaaattttgtaaatttttttcggattgtttgcttcgaaggtgacattcccagtgagggttttccaccttctgggtgtggacaccctggtagtcaccaatgcagcaggagggctgaaccccaagtttgaggttggagatatcatgctgatccgtgaccatatcaacctacctggtttcagtggtcagaaccctctcagagggcccaatgatgaaaggtatgtatgttactccgttttttttaggtgggtaggatttaaagacttctctaggagctgtgggagaatttttaaaattccgtttatgtgagataattcaacctgtgtcctaggtttggagatcgtttccctgccatgtctgatgcccaggatttgactcgggccttagaactttgcatagcagctgctactagctctttgagataatacattccgaggggctcagttctgccttatctaaatcaccagagaccaaacaaggactaatccaatacctcttggattttatttaatgtcataatgttgtcagaataaagagaaagatgaaataa

SEQ ID NO: 9762 - protein, 54 aa, Homo sapiens
MLIRDHINLPGFSGQNPLRGPNDERYVCYSVFFRWVGFKDFSRSCGRIFKIPFM

SEQ ID NO: 9763 - DNA, 1609 bp, Homo sapiens
acagagctttgaggagctggatcaaaattgtgctccacagagagaagataccggtgtcgggaagcaccagtgccctgaggaagggccatttccaaaagccctgtgctgacacagggttgctggttcctcttcaagagcccactctctggggtggggccatatctccagcagaggtgggctggaaaggacccccccaatcccgcccgccgtgagcttagctggagccatggcctctgcacccatctcgatgcttgcgatgctcttcacattgagtgggctgagagctcagtcagtggctcagccggaagatcaggtcaacgttgctgaagggaatcctctgactgtgaaatgcacctattcagtctctggaaacccttatcttttttggtatgttcaataccccaaccgaggcctccagttccttctgaaatacatcacaggggataacctggttaaaggcagctatggctttgaagctgaatttaacaagagccaaacctccttccacctgaagaaaccatctgcccttgtgagcgactccgctttgtacttctgtgctgtgatgcatactctggggctgggagttaccaactcactttcgggaaggggaccaaactctcggtcataccaaatatccagaaccctgaccctgccgtgtaccagctgagagactctaaatccagtgacaagtctgtctgcctattcaccgattttgattctcaaacaaatgtgtcacaaagtaaggattctgatgtgtatatcacagacaaaactgtgctagacatgaggtctatggacttcaagagcaacagtgctgtggcctggagcaacaaatctgactttgcatgtgcaaacgccttcaacaacagcattattccagaagacaccttcttccccagcccagaaagttcctgtgatgtcaagctggtcgagaaaagctttgaaacagatacgaacctaaactttcaaaacctgtcagtgattgggttccgaatcctcctcctgaaagtggccgggtttaatctgctcatgacgctgcggctgtggtccagctgagatctgcaagattgtaagacagcctgtgctccctcgctccttcctctgcattgcccctcttctccctctccaaacagagggaactctcctacccccaaggaggtgaaagctgctaccacctctgtgcccccccggcaatgcaccaactggatcctacccgaatttatgattaagattgctgaagagctgccaaacactgctgccaccccctctgttcccttattgctgcttgtcactgcctgacattcacggcagaggcaaggctgctgcagctccgctggctgtgcacattccctcctgctccccagagactgcctccgccatcccacagatgatggatcttcagtgggttctcttgggctctaggtcccggagaatgttgtgaggggtttatttttttttaatagtgttcataaagaaagacatagtattcttcttctcaagacgtggggggaaattatctcattatcgaggccctgctatgctgtgtgtctgggcgtgttgtatgtcctgctgccgatgccttcattaaaatgatttggaagagcagaga

SEQ ID NO: 9764 - protein, 146 aa, Homo sapiens
MASAPISMLAMLFTLSGLRAQSVAQPEDQVNVAEGNPLTVKCTYSVSGNPYLFWYVQYPNRGLQFLLKYITGDNLVKGSYGFEAEFNKSQTSFHLKKPSALVSDSALYFCAVMHTLGLGVTNSLSGRGPNSRSYQISRTLTLPCTS

SEQ ID NO: 9765 - DNA, 1592 bp, Homo sapiens
ggctgatgtagctcactgatgtctgtgtagacagggagctgtgacgagagcaagaggtcagaacacatccagactccttaagagaaagcctttctgttttggaaacttttcaaagccagggacttgtccagcccaacctccccattgctcctagctcctgaggctcaggacccctggcttctgtcctccctgctcagggtcctgcagcgttgcctctgctcagccatgctcctgctgctcgtcccagtgctcgaggtgatttttactctgggaggaaccagagcccagtcggtgacccagcttgacagccacgtctctgtctctgaaggaaccccggtgctgctgaggtgcaactactcatcttcttattcaccatctctcttctggtatgtgcaacaccccaacaaaggactccagcttctcctgaagtacacatcagcggccaccctggttaaaggcatcaacggttttgaggctgaatttaagaagagtgaaacctccttccacctgacgaaaccctcagcccatatgagcgacgcggctgagtacttcttgtaacaccaatgcaggcaaatcaacctttggggatgggactacgctcactgtgaagccaaatatccagaaccctgaccctgccgtgtaccagctgagagactctaaatccagtgacaagtctgtctgcctattcaccgattttgattctcaaacaaatgtgtcacaaagtaaggattctgatgtgtatatcacagacaaaactgtgctagacatgaggtctatggacttcaagagcaacagtgctgtggcctggagcaacaaatctgactttgcatgtgcaaacgccttcaacaacagcattattccagaagacaccttcttccccagcccagaaagttcctgtgatgtcaagctggtcgagaaaagctttgaaacagatacgaacctaaactttcaaaacctgtcagtgattgggttccgaatcctcctcctgaaagtggccgggtttaatctgctcatgacgctgcggctgtggtccagctgagatctgcaagattgtaagacagcctgtgctccctcgctccttcctctgcattgcccctcttctccctctccaaacagagggaactctcctacccccaaggaggtgaaagctgctaccacctctgtgcccccccggcaatgcaccaactggatcctacccgaatttatgattaagattgctgaagagctgccaaacactgctgccaccccctctgttcccttattgctgcttgtcactgcctgacattcacggcagaggcaaggctgctgcagctccgctggctgtgcacattccctcctgctccccagagactgcctccgccatcccacagatgatggatcttcagtgggttctcttgggctctaggtcccggagaatgttgtgaggggtttatttttttttaatagtgttcataaagaaagacatagtattcttcttctcaagacgtggggggaaattatctcattatcgaggccctgctatgctgtgtgtctgggcgtgttgtatgtcctgctgccgatgccttcattaaaatgatttggaagagcagaga

SEQ ID NO: 9766 - protein, 110 aa, Homo sapiens
MLLLLVPVLEVIFTLGGTRAQSVTQLDSHVSVSEGTPVLLRCNYSSSYSPSLFWYVQHPNKGLQLLLKYTSAATLVKGINGFEAEFKKSETSFHLTKPSAHMSDAAEYFL

SEQ ID NO: 9767 - DNA, 1502 bp, Homo sapiens
gtgagaaacccctatggctgccagaggagagaagagacaacctgatgatagaagtaactcttataactggaggttgcaggtcaatgactgatcttaattgggaagaacaaggatgacatccattcgagctgtatttatattcctgtggctgcagctggacttggtgaatggagagaatgtggagcagcatccttcaaccctgagtgtccaggagggagacagcgctgttatcaagtgtacttattcagacagtgcctcaaactacttcccttggtataagcaagaacttggaaaaggacctcagcttattatagacattcgttcaaatgtgggcgaaaagaaagaccaacgaattgctgttacattgaacaagacagccaaacatttctccctgcacatcacagagacccaacctgaagactcggctgtctacttctgtgcagcaagtacacattatggctgtgtgaaaacctcctacgacaaggtgatatttgggccagggacaagcttatcagtcattccaaatatccagaaccctgaccctgccgtgtaccagctgagagactctaaatccagtgacaagtctgtctgcctattcaccgattttgattctcaaacaaatgtgtcacaaagtaaggattctgatgtgtatatcacagacaaaactgtgctagacatgaggtctatggacttcaagagcaacagtgctgtggcctggagcaacaaatctgactttgcatgtgcaaacgccttcaacaacagcattattccagaagacaccttcttccccagcccagaaagttcctgtgatgtcaagctggtcgagaaaagctttgaaacagatacgaacctaaactttcaaaacctgtcagtgattgggttccgaatcctcctcctgaaagtggccgggtttaatctgctcatgacgctgcggctgtggtccagctgagatctgcaagattgtaagacagcctgtgctccctcgctccttcctctgcattgcccctcttctccctctccaaacagagggaactctcctacccccaaggaggtgaaagctgctaccacctctgtgcccccccggcaatgcaccaactggatcctacccgaatttatgattaagattgctgaagagctgccaaacactgctgccaccccctctgttcccttattgctgcttgtcactgcctgacattcacggcagaggcaaggctgctgcagctccgctggctgtgcacattccctcctgctccccagagactgcctccgccatcccacagatgatggatcttcagtgggttctcttgggctctaggtcccggagaatgttgtgaggggtttatttttttttaatagtgttcataaagaaagacatagtattcttcttctcaagacgtggggggaaattatctcattatcgaggccctgctatgctgtgtgtctgggcgtgttgtatgtcctgctgccgatgccttcattaaaatgatttggaagagcagaga

SEQ ID NO: 9768 - protein, 278 aa, Homo sapiens
MTSIRAVFIFLWLQLDLVNGENVEQHPSTLSVQEGDSAVIKCTYSDSASNYFPWYKQELGKGPQLIIDIRSNVGEKKDQRIAVTLNKTAKHFSLHITETQPEDSAVYFCAASTHYGCVKTSYDKVIFGPGTSLSVIPNIQNPDPAVYQLRDSKSSDKSVCLFTDFDSQTNVSQSKDSDVYITDKTVLDMRSMDFKSNSAVAWSNKSDFACANAFNNSIIPEDTFFPSPESSCDVKLVEKSFETDTNLNFQNLSVIGFRILLLKVAGFNLLMTLRLWSS

SEQ ID NO: 9769 - DNA, 1644 bp, Homo sapiens
atccactgagcctcctccctgcagctggctgatgtagctcactggtgtctgtgtagatagggagctgtgatgagaacaagaggtcagaacacatccaggctccttaagagaaagcctttctttaaccatttttgaaacccttcaaaggcagagacttgtccagcctaacctgcctgctgctcctagctcctgaggctcagggcccttggcttctgtccgctctgctcagggccctccagcgtggccactgctcagccatgctcctgctgctcgtcccagtgctcgaggtgatttttaccctgggaggaaccagagcccagtcggtgacccagcttggcagccacgtctctgtctctgaaggagccctggttctgctgaggtgcaactactcatcgtctgttccaccatatctcttctggtatgtgcaataccccaaccaaggactccagcttctcctgaagtacacatcagcggccaccctggttaaaggcatcaacggttttgaggctgaatttaagaagagtgaaacctccttccacctgacgaaaccctcagcccatatgagcgacgcggctgagtacttctgtgctgtgagtgacacatgggggtacagcagtgcttccaagataatctttggatcagggaccagactcagcatccggccaaatatccagaaccctgaccctgccgtgtaccagctgagagactctaaatccagtgacaagtctgtctgcctattcaccgattttgattctcaaacaaatgtgtcacaaagtaaggattctgatgtgtatatcacagacaaaactgtgctagacatgaggtctatggacttcaagagcaacagtgctgtggcctggagcaacaaatctgactttgcatgtgcaaacgccttcaacaacagcattattccagaagacaccttcttccccagcccagaaagttcctgtgatgtcaagctggtcgagaaaagctttgaaacagatacgaacctaaactttcaaaacctgtcagtgattgggttccgaatcctcctcctgaaagtggccgggtttaatctgctcatgacgctgcggctgtggtccagctgagatctgcaagattgtaagacagcctgtgctccctcgctccttcctctgcattgcccctcttctccctctccaaacagagggaactctcctacccccaaggaggtgaaagctgctaccacctctgtgcccccccggcaatgcaccaactggatcctacccgaatttatgattaagattgctgaagagctgccaaacactgctgccaccccctctgttcccttattgctgcttgtcactgcctgacattcacggcagaggcaaggctgctgcagctccgctggctgtgcacattccctcctgctccccagagactgcctccgccatcccacagatgatggatcttcagtgggttctcttgggctctaggtcccggagaatgttgtgaggggtttatttttttttaatagtgttcataaagaaagacatagtattcttcttctcaagacgtggggggaaattatctcattatcgaggccctgctatgctgtgtgtctgggcgtgttgtatgtcctgctgccgatgccttcattaaaatgatttggaagagcagaga

SEQ ID NO: 9770 - protein, 277 aa, Homo sapiens
MLLLLVPVLEVIFTLGGTRAQSVTQLGSHVSVSEGALVLLRCNYSSSVPPYLFWYVQYPNQGLQLLLKYTSAATLVKGINGFEAEFKKSETSFHLTKPSAHMSDAAEYFCAVSDTWGYSSASKIIFGSGTRLSIRPNIQNPDPAVYQLRDSKSSDKSVCLFTDFDSQTNVSQSKDSDVYITDKTVLDMRSMDFKSNSAVAWSNKSDFACANAFNNSIIPEDTFFPSPESSCDVKLVEKSFETDTNLNFQNLSVIGFRILLLKVAGFNLLMTLRLWSS

SEQ ID NO: 9771 - DNA, 1611 bp, Homo sapiens
gcagctggctgatgtagctcactggtgtctgtgtagatagggagctgtgatgagaacaagaggtcagaacacatccaggctccttaagagaaagcctttctttaaccatttttgaaacccttcaaaggcagagacttgtccagcctaacctgcctgctgctcctagctcctgaggctcagggcccttggcttctgtccgctctgctcagggccctccagcgtggccactgctcagccatgctcctgctgctcgtcccagtgctcgaggtgatttttaccctgggaggaaccagagcccagtcggtgacccagcttggcagccacgtctctgtctctgaaggagccctggttctgctgaggtgcaactactcatcgtctgttccaccatatctcttctggtatgtgcaataccccaaccaaggactccagcttctcctgaagtacacatcagcggccaccctggttaaaggcatcaacggttttgaggctgaatttaagaagagtgaaacctccttccacctgacgaaaccctcagcccatatgagcgacgcggctgagtacttctgtgctgtgataataatgcaggcaacatgctcacctttggagggggaacaaggttaatggtcaaaccccatatccagaaccctgaccctgccgtgtaccagctgagagactctaaatccagtgacaagtctgtctgcctattcaccgattttgattctcaaacaaatgtgtcacaaagtaaggattctgatgtgtatatcacagacaaaactgtgctagacatgaggtctatggacttcaagagcaacagtgctgtggcctggagcaacaaatctgactttgcatgtgcaaacgccttcaacaacagcattattccagaagacaccttcttccccagcccagaaagttcctgtgatgtcaagctggtcgagaaaagctttgaaacagatacgaacctaaactttcaaaacctgtcagtgattgggttccgaatcctcctcctgaaagtggccgggtttaatctgctcatgacgctgcggctgtggtccagctgagatctgcaagattgtaagacagcctgtgctccctcgctccttcctctgcattgcccctcttctccctctccaaacagagggaactctcctacccccaaggaggtgaaagctgctaccacctctgtgcccccccggcaatgcaccaactggatcctacccgaatttatgattaagattgctgaagagctgccaaacactgctgccaccccctctgttcccttattgctgcttgtcactgcctgacattcacggcagaggcaaggctgctgcagctccgctggctgtgcacattccctcctgctccccagagactgcctccgccatcccacagatgatggatcttcagtgggttctcttgggctctaggtcccggagaatgttgtgaggggtttatttttttttaatagtgttcataaagaaagacatagtattcttcttctcaagacgtggggggaaattatctcattatcgaggccctgctatgctgtgtgtctgggcgtgttgtatgtcctgctgccgatgccttcattaaaatgatttggaagagcagaga

SEQ ID NO: 9772 - protein, 155 aa, Homo sapiens [sequence omitted]

SEQ ID NO: 9773 - DNA, 584 bp, Homo sapiens
agaggaaagaaaggaatacccgatgatggaagtagctcttatggctggagattgcaggtttatgactgatcctatttgggaagaacaatgatggcaggcattcgagctttatttatgtacttgtggctgcagctggactgggtgagcagaggagagagtgtggggctgcatcttcctaccctgagtgtccaggagggtgacaactctattatcaactgtgcttattcaaacagcgcctcagactacttcatttggtacaagcaagaatctggaaaaggtcctcaattcattatagacattcgttcaaatatggacaaaaggcaaggccaaagagtcaccgttttattgaataagacagtgaaacatctctctctgcaaattgcagctactcaacctggagactcagctgtctacttttgtgcagagaatacacattgctttccaggcatctgtaaccatcacccaaacctgagatgggaggtgaagcagcatccctttcctttgcaataaattttagttatagcacttgtcattttgtttgttcataagtggaaactaacatatagatattaaaaccatgtaat

SEQ ID NO: 9774 - protein, 140 aa, Homo sapiens [sequence omitted]

SEQ ID NO: 9775 - DNA, 1468 bp, Homo sapiens
ggaaagaaaggaatacccgatgatggaagtagctcttatggctggagattgcaggtttatgactgatcctatttgggaagaacaatgatggcaggcattcgagctttatttatgtacttgtggctgcagctggactgggtgagcagaggagagagtgtggggctgcatcttcctaccctgagtgtccaggagggtgacaactctattatcaactgtgcttattcaaacagcgcctcagactacttcatttggtacaagcaagaatctggaaaaggtcctcaattcattatagacattcgttcaaatatggacaaaaggcaaggccaaagagtcaccgttttattgaataagacagtgaaacatctctctctgcaaattgcagctactcaacctggagactcagctgtctacttttgtgcagatgtgatactcacgggaggaggaaacaaactcacctttgggacaggcactcagctaaaagtggaactcaatatccagaaccctgaccctgccgtgtaccagctgagagactctaaatccagtgacaagtctgtctgcctattcaccgattttgattctcaaacaaatgtgtcacaaagtaaggattctgatgtgtatatcacagacaaaactgtgctagacatgaggtctatggacttcaagagcaacagtgctgtggcctggagcaacaaatctgactttgcatgtgcaaacgccttcaacaacagcattattccagaagacaccttcttccccagcccagaaagttcctgtgatgtcaagctggtcgagaaaagctttgaaacagatacgaacctaaactttcaaaacctgtcagtgattgggttccgaatcctcctcctgaaagtggccgggtttaatctgctcatgacgctgcggctgtggtccagctgagatctgcaagattgtaagacagcctgtgctccctcgctccttcctctgcattgcccctcttctccctctccaaacagagggaactctcctacccccaaggaggtgaaagctgctaccacctctgtgcccccccggcaatgcaccaactggatcctacccgaatttatgattaagattgctgaagagctgccaaacactgctgccaccccctctgttcccttattgctgcttgtcactgcctgacattcacggcagaggcaaggctgctgcagctccgctggctgtgcacattccctcctgctccccagagactgcctccgccatcccacagatgatggatcttcagtgggttctcttgggctctaggtcccggagaatgttgtgaggggtttatttttttttaatagtgttcataaagaaagacatagtattcttcttctcaagacgtggggggaaattatctcattatcgaggccctgctatgctgtgtgtctgggcgtgttgtatgtcctgctgccgatgccttcattaaaatgatttggaagagcagaga

SEQ ID NO: 9776 - protein, 276 aa, Homo sapiens [sequence omitted]

SEQ ID NO: 9777 - DNA, 1519 bp, Homo sapiens
catcgtggcgggcgcctgtagtcccagctactcgggaggctgaggcgggagaacggcctgaacccgggaggcggagcttgcagtgagccgagatcccgccactgcactccagcgagactccgtctcaaaacaaaacaaaacaaaacaaaacaaaaacaaacaaacaaacaaaaaattctgtgcttctgaagtaaaattacatacaacctcatggtagctgaggatgttaaatggctaggcacttcctaagctatgtgtctagggcagtgctcaagacaaccccctgccccataacaaagaattatccagctcacaatgtcaagtgcttagaatgagaaatcttggtggagagaaaatttcttaacatctgtaatccttggtttcctcctccgtaataccagcctaactgagtgatatggtttggctctgtgtccctaccgaaatctcatgtccacttgtaatccccatgtgttggaggaggggcatggtgggaggtgattgaatcacggtagtggatttcccctctgctgttctcgtgatagtgcgtgagttctcacgagatctggttgtttgaaagtgtgtagcacctcccccttcgctcgctcgctctctcctgctccaccatgataagatgtgcttgcttccccttcactttccgacttgatcgaccttcaagtacatgctccattgaactctctgaattcagctggctaaaaaagaagaaagagaagatggagaaggcacaaccattctaaactgccttgacatggaggtgacaccagttttattgtaggaataagtgacatgattgtatctaattgcaagggcctgggaagcacaactaaccatgcaccaaagaagacaagaacacaggcagcttgggtcatgtgctacagctttcctgtgatcaccttgcctctgaaatatctgaaaatggctttctcttcattcatttctacatcttcattcattctcccaggtcttgcaatggttgtgcacataggtagaagagacttgccttgtctcagatgagattttggacgtttgaattaacactggaatgagttaagactttcggggactgtcaggaaggcatgattgtattttgcaatgtgagaagaatatgtaatttgagagggactagggacagaatgatatagtttggatctgtatccccacccaaatcatatgttgaattgtaatccccaatattggaggtagggcctggtggaaggtgttttgatcatgggagtggatgcctcatggcttggtgttgtctttacaatagggagttagttctcatgcgatctggttgtttaaaagtgtgtggcatctgcccctccacctctctccttcttcctcctgctttcaccatgtgatgtgccttctccctcttcaccttctgcagtgattgtaagctttatgagacatccccagaagttgagcagatgccagcaccatactgcctgtaaagcctacagaactgtgacccaattaaacctcttttctttataaatta

SEQ ID NO: 9778 - protein, 75 aa, Homo sapiens
MIVSNCKGLGSTTNHAPKKTRTQAAWVMCYSFPVITLPLKYLKMAFSSFISTSSFILPGLAMVVHIGRRDLPCLR

SEQ ID NO: 9779 - DNA, 10859 bp, Homo sapiens
agtctttcccataatgagctgcatcatctgaactgatgtcacagcatcatgcagcaggtcaaacaaggcatctcctagtattgcatcctacagatgtgctgtaaacatcaaaagaagacggtgggatcaggagatgctgttttggaaagaagtgaggtttagacttctccatgttaaccatgagcgtgacactttcccccctgaggtcacaggacctggatcccatggctactgatgcttcacccatggccatcaacatgacacccactgtggagcagggtgagggagaagaggcaatgaaggacatggactctgaccagcagtatgaaaagccacccccactacacacaggggctgactggaagattgtcctccacttacctgaaattgagacctggctccggatgacctcagagagggtccgagacctaacctattcagtccagcaggattcggacagcaagcatgtggatgtacatctagttcaactaaaggacatttgtgaagatatttctgatcatgttgagcaaatccatgccctccttgaaacagagttctccctaaagctgctgtcttactctgtcaacgtgatagtggacatccacgcagtgcagctcctctggcaccagcttcgagtctcagtgctggttctgcgggagcgcattctgcaaggtctgcaggacgccaatggcaactacactaggcagacggacattctgcaagctttctctgaagagacaaaagagggccggcttgattctctaacagaagtggatgactcaggacaattaaccatcaaatgttctcaaaattacttgtctctggattgtggcattactgcattcgaactgtctgactacagtccaagtgaggatttgctcagtgggctaggtgacatgacctctagccaagtcaaaaccaaaccctttgactcttggagctacagtgagatggaaaaggagtttcctgagcttatccgaagtgttggtttacttacggtagctgctgactctatctctaccaatggcagtgaagcagttactgaggaggtatctcaagtatctctctcagtagacgacaaaggtggatgtgaggaagacaatgcttctgcagtcgaagagcaaccaggcttaacactgggggtgtcatcatcttcaggagaagctctgacaaatgctgctcaaccctcctctgagactgtgcagcaagaatccagttcctcctcccatcatgatgcaaagaatcagcagcctgttccttgtgaaaatgcaacccccaaacgaaccatcagagattgctttaattataacgaggactctcccacgcagcctacattgccaaaaagaggactttttcttaaagaggaaacttttaagaatgatctgaaaggcaatggtggaaagaggcaaatggttgatctaaagcctgagatgagcagaagcaccccttcgctagtagatcctcctgacagatccaaactttgcctggtattgcagtcttcttaccccaacagcccttctgctgccagccagtcttatgagtgtttacacaaggtggggaatgggaaccttgaaaacacagtcaaatttcacattaaagaaatttcttccagcctgggaaggcttaacgactgctataaagagaaatctcgacttaaaaagccacacaagacctcagaagaggtgcctccatgccgaacacctaaacgggggactggttcaggcaaacaagctaaaaatacaaagagctcagcagtgccaaatggagagctttcttatacttccaaggccatagaggggccacaaacaaattctgcttccacatcctcacttgagccttgtaatcagagaagttggaatgccaaattgcaattgcagtcagaaacatccagttcaccagcttttactcagagcagtgaatcctctgttggctcagacaacatcatgtctccggtgccacttctttcaaaacacaaaagcaaaaaaggtcaagcctcctctccaagtcacgtcactaggaatggtgaggttgtggaggcctggtatggctctgatgaatacctagcactgccctctcaccttaagcagacagaagtattggctttgaagttggaaaacctaacaaagcttctgcctcagaaacccagaggagaaaccatccagaatattgatgactgggaactgtctgaaatgaattcagattctgaaatctatccaacctatcatgtcaaaaagaagcatacaaggctaggcagggtgtctccaagctcatctagtgacatagcctcttcactaggggagagcattgaatctgggcccctgagtgacattctttctgatgaggagtccagtatgcctctcgctggcatgaaaaagtatgctgatgagaagtcagaaagagcttcatcctctgagaaaaatgagagccattctgccactaaatcagctttaattcagaaactgatgcaagatattcagcaccaagacaactatgaagccatatgggaaaaaatagaggggtttgtaaacaaactggatgaattcattcaatggttaaatgaagccatggaaactacagaaaattggactccccctaaagcagagatggatgaccttaaactgtatctggagacacacttgagttttaagttgaatgtagacagtcattgtgctctcaaggaagctgtggaggaggaaggacaccaacttcttgagcttattgcatctcacaaagcaggactgaaggacatgctgcggatgattgcaagtcaatggaaggagctgcagaggcaaatcaaacggcagcacagctggattctcagggctctggataccatcaaagccgagatactggctactgatgtgtctgtggaggatgaggaagggactggaagccccaaggctgaggttcaactatgctacctggaagcacaaagagatgctgttgagcagatgtccctcaagctgtacagcgagcagtataccagcagcagcaagcgaaaggaagagtttgctgatatgtcaaaagttcattcagtgggaagcaatgggcttctggactttgattcagaatatcaggagctctgggattggctgattgacatggagtcccttgtgatggacagccacgacctgatgatgtcagaggagcagcagcagcatctttacaagcgatacagtgtggaaatgtccatcagacacctgaaaaagacggagctgcttagtaaggttgaagctttgaagaaaggtggcgttttactaccaaatgatctccttgaaaaagtggattcaattaatgaaaaatgggaactgcttgggaaaaccctaggagagaagatccaggacacaatggcagggcacagtgggtcgagtccacgtgacctgctctctcctgaaagtggaagcctggtaaggcagctggaggtcaggatcaaagaactgaaaggatggctaagagatacagagcttttcatcttcaattcctgtctgagacaagaaaaggaaggaacaatgaatactgagaaacaactgcaatactttaagtccctctgtcgtgaaatcaagcaacgacgtcgaggagttgcctccattctgcgactatgccagcatcttttggatgaccgggagacttgcaatctgaatgcagaccaccagcccatgcagctgatcattgtaaatcttgaaagaaggtgggaagccattgtcatgcaagccgtccagtggcaaacacgtctacaaaagaagatgggaaaggaatctgagactttgaatgtgattgatcctggcttgatggacctaaatgggatgagtgaggatgccctggaatgggatgaaatggacataagtaacaagttaattagtttgaatgaggaatcaaatgaccttgatcaagaactccaacctgttatcccttccttgaagcttggagagacaagtaatgaggaccctggttatgacgaggaggctgataaccatgggggatctcagtatgcctcaaatattactgccccctctagtccacacatttaccaggtgtacagcctccacaatgttgaactctatgaggacaaccacatgccatttctgaaaaacaatccaaaggtcactggcatgacacagcctaatgttttaactaagagtctcagtaaagactcttcattttcatctaccaaatctttgccagatcttctaggtggttccaatttggtaaagccctgcgcatgtcatggaggagacatgagccagaattcaggcagtgagagtggaattgtcagtgaaggagacacagaaaccactaccaactctgaaatgtgcttgctcaatgcagtggatgggtccccaagtaaccttgaaactgaacatctggacccacaaatgggagatgcagttaacgtgttaaagcaaaaatttacagatgagggggaaagcattaagcttccaaatagctctcagtcgtccatttcaccagtgggttgtgtaaatggaaaagttggagatttaaacagtattaccaaacatacccctgactgtttgggagaagaattacaaggaaaacatgatgtgtttacattttatgattactcatacctccaaggctcaaaactcaaattaccaatgataatgaaacagtcacaaagcgaaaaagcgcatgtggaggatcccctgcttcgtggtttttattttgataaaaaatcatgcaaatctaaacatcagactacagagttacaaccagatgtacctccccatgaaaggattttggcaagtgcatctcatgaaatggatcgcatttcatataaaagtggcaatatagaaaagacattcactggcatgcagaatgccaaacagctctcccttttatctcatagttcatctattgagtccctttctccagggggtgatttatttggattgggcatctttaaaaatggcagtgacagcctccagcgaagcacttctttagaaagttggttgacttcctataaaagcaatgaagatctctttagctgtcacagctctggggatataagcgtgagcagtggctcagttggtgaactaagtaaaagaacattagatctcctgaatcgtttggagaatatccagagcccctcagagcaaaagataaaacgaagtgtttctgatatcactcttcaaagcagttcccaaaagatgtcctttactggccagatgtcattggacatagcatcttctatcaatgaagactcagcggcatctctaacagaacttagcagcagtgacgagctctctctttgctcagaggatattgtgttacacaagaacaagatcccggaatcgaatgcatcgttcaggaagcgtctgactcgttcagtggctgatgaaagcgatgtcaatgtcagcatgattgttaatgtctcttgcacctctgcttgcactgatgatgaagatgacagcgacctgctctccagctctacccttaccttgactgaagaagagctgtgcatcaaagatgaggatgacgactccagtattgcaacagatgatgaaatttatgaagactgcaccttgatgtcagggctagactacataaagaatgaattacagacctggattaggccaaaattgtctttgacaagagataagaaaaggtgcaatgtcagtgatgagatgaagggcagtaaagatataagtagcagtgagatgaccaatccctctgatactctgaatattgagacccttctaaatggctctgtaaaacgtgtctctgaaaataatggaaatggtaagaattcatctcatacccatgagttagggacaaagcgtgaaaataagaaaactattttcaaagttaataaagatccatatgtggctgacatggaaaatggcaatattgaaggtattccagaaaggcaaaagggaaaaccgaatgtgacttcaaaggtatcagaaaatcttggttcacatgggaaagagatttcagagagtgagcattgtaagtgtaaagcacttatggatagtttagatgattcaaatactgctggcaaggaatttgtttcccaagatgttagacatcttccaaagaaatgtccaaatcaccaccattttgaaaatcaaagcactgcctctactcccactgagaagtctttctcagaactggctttagaaaccaggtttaacaacagacaagactctgatgcactgaaatcatctgatgatgcaccgagtatggctggaaaatctgctggttgttgcctagcacttgaacaaaacggaacagaggaaaatgcttctatcagcaacatttcctgttgcaactgtgagccagatgttttccatcaaaaagatgccgaagattgttcagtacacaactttgttaaggaaatcattgacatggcttcgacagccctaaaaagtaaatctcaacctgaaaacgaggtggctgctcctacttcattaactcaaatcaaggagaaagtgttggagcattctcaccggcccatccagctgagaaaaggggacttttattcgtacttatctctctcatctcatgacagtgattgtggggaggtcaccaattacatagaagagaaaagcagcactccattgccactagacaccactgactcgggcttagatgacaaggaagatattgaatgcttttttgaggcctgtgttgagggtgactctgatggagaggagccttgtttctctagtgctcctccaaatgaatctgcagttcccagcgaagctgcaatgccactacaagcaacagcatgttcttctgagttcagtgatagttctctttcagctgatgatgcagatacagtggctctttcaagtccttcctctcaggaaagagctgaggttggaaaggaagtgaatggtttgccccaaacttccagtggctgtgcagaaaacttagagtttactccttcaaagcttgacagtgaaaaggaaagttccggaaaaccaggtgaatctggaatgccagaagaacataatgctgcttcagccaaatctaaagttcaagacctctccttgaaggcaaatcagccaacagacaaggccgcattgcatcccagccccaaaactttaacctgtgaagaaaatcttctaaaccttcatgaaaaacgacatagaaatatgcataggtagaatgtaccccctccccaagcatgaaaatcatctcactgaaagatacgcctggctgcaactcaggggtggcctcatcctcccgccctgggctggcctctggttccatcacgtttgtcactgccgtttattacattgacttctcccaagatgaatcttccttccaaatgtgttttctccacacaagccttgtgatctgaatgtgtgcgctggttctctttaggtgatcgtctttgaagttcagcaaagctgcttgttctcccatggattcctgtcccaagctacctctaccaaccctctctctccagctagacttttctctttgcctcctcccttcccttccactctttaaagttctgcagttcaccaactggtagtccattaaattctcctgtctagaatgacccccccaccagtacttgaccaatttcatgtatcaatctggatttttttttaacggtataatgactgtgtttattgaaagagttttacctaaaaagccaacatttgaattggttgcagcatagagaagaaacactggtccttctttcaaaattaagcaactattaaaagcgccattttatttatttcatttaaaaaataatctatgcagcatttcaagaaacaaccatatggtgttgtatattataaactggtgacattctactattgaattatgtacaacattttcattttttatgcttcttgaggtggtaatgagaaaaaagttttttaaaaaagtgtgccttgctgtatttcttataccatttattaaaaagctgctttcacggtaaaattatgttggtttgaaaggaggaaatagcaaggttaagatgtgtgaataatttctgtatatatgtataaccaagtacaaacattgatgtataatgacagtataaaatgctttcatgtttgtgatgtctagtgatgtggaaaatataagccttaaatccattagattgcatggtaattaaaattggcataataaacacagattattgggggaaaaggaaaattagtgatctcttctactatgttctttaccaaattgttgcatctggttctgaaaaagtatagcatgtagcagcttccaaacatattcatattgcttaagaggcttaacattacctaaactagagactagacgtaaagccttcagttttcaaaatctttctggtcactataaagatcttggaacagcaaatgattaaatgtcagttcccctaaaccaataaacatttatactagattttttatttccacttatcattaatgatttaatgttggatttcaggtaccttgtatgtcttaatttattttaaatatttattttgaatgagtttgatagaaagctagtagaaaagtacagaaaatttgactattatttatagatttcaggtatatttatatgtgtaaaagaaattgacaaagaaatatttcatctggcctttactgactcctgttaaatgcagttttaaatttatatcgtaacacctacttaagtgcctgacacagtaggtattcaataaaaatttactgaattaaaggattaaattaggtgacatggtgacatctatccctttattttgacactaaaacatggacacaactagaaagaggtacaatgcaatataaagtcacaatagataatatatatcaaatttctaaaaggtaaagaatgttgtgggttcatgcagtcacaggaatgacaatcattcaacagatagttcagaaacactttttatctgcaaggcactattctagatccagaagatgcaatgttgaacaaacagacaaagccctgccctcagaaggctgtcctgcattaggaacaagtgaacacgcaaatgacatgaagtatttgttgcagagctgaggaacagagcaaatgtagtgatagaagcgcaatgagagaagcagcagtgggtacaaggaggaagaaaaagggcttgcagagagtggaaagttagtggaatattcatgaaacttcattgcaggggtaatagaagaaaaagtaaattgggaggacttaatggaaggtcttttaaaaagttaacttggagcttctgtatgtaaaatgctaggtaataaggacactttgtacaggctgttttgcacctgattttatttatcattagtgccacgccaagatcatttagacgatgcttatctgtaattctaccactttaataactatttgtatttttatgccccttctgatcttttccatatgtatttctaaatggataaattattctaggcttcttaataggtagtaatttgttcaaaagcggttttagccagacatctagttgcagtgttcaagaggattatgggggaaagagattagagataattgtctagttagggggcagctggagaaaataagctaagtttgcaataacagagtacacaagtatagtggcccaggatgtagtgaaagaacaaatcctagagtctttgaaatttctaagggcattctagacctctgttgggatatggtattattttacatactgacacaacctaaattttctttgggtagtaactaatgtcaagtctacatcgactggtaaaacattcaaagaacaaactgacaatgatgttctacctacttgttacatgctcatggaagaccgtgcagtattgaaagtatttgttaattatctgcttagtattaacactaaatttgtagaatgactttcaggtttgttgaacaatgccttttcaggttggaagaagaaaaatagcctcaatctcccaccccatgtaggcactacctccccaattacccttagaaaatgatcacaccaactctgcctacacacttccagtgatagtggctcattgtctgttaaggcaaactgttccactgttgggcatatctctttgttagaaagttctttcttaggttgctaaaatctgcctagtaccccgctaccctgttctgtcttatggagcagcccagattatctttactccctctttctcatggcaaccctgaagataatcaaggccagttactcatcatctcccaaccactgtttcctcaactgcccttcatatgtcatggttttcagatccattccaacctgactgaatgttaacagacagaattcttcacattaaggaactgtcttcatcatcatacatgtagaaaagaatctgaacatttaagtgcgaagttttctctagaaatatattcaagatatgtttattctattattgtaaatttcaaacaataaataaataagaatccatgacttccttcagtggcccagtccagtgcctaagtcatctggaatcttctccttacatcgaatacaaacctaacctgtttccaagtagggcactccctccgcttatttattcatttattcagccattcagcaaacatttattaaatggctacctatgtgaggcactatatttggcattaggtatataaaggcaactaacacatggtatctgtctccaaaggtttacagcttttcttctgaaagtgccttttgtgtccttgaatagagtgattatgacttttgtctcaattaaatgatgacctcatttagtttctgatgaagtttctctacatttaagaaaatctagtgagcaaaacggtatacaaaaaatcatctggatctgactaccagaaaaagtaaagtggttttaattacagaaagaaaaatatttgttagatttctggtcactgaataaatatgcatcttatacaac

SEQ ID NO: 9780 - protein, 2319 aa, Homo sapiens; identical to SEQ ID NO: 1423

SEQ ID NO: 9781 - DNA, 2412 bp, Homo sapiens
acatatgtggctttcatcccagcacattgggcaggacaccactgttttcttcgtttggttaatagttacacttccttgacacctcatacagctgggtcatggatctgctgctgttctcaatgtgagcatcactgtctttttttctttttctttttctttttttgggacaggatctctgtcacccaggctggagtgcggtggcacgatctcagctcactgcagcctccacctcctgggttcaagcgattctcctgcctcagcctctcaagtagctgggattacaggcatgcaccaccgtgcctggctaatttttgtatttttggtagaaacggggtttcactatgttggccaggctggtctcaaactcctgatctcaggtgatccacccgcctcggcctcccaaagtgctgggattacaggtgtgagccacggtgcccagcccactgtcttttttcatcaatgctaagagaatttaattctttccacatgaagcgattctacttcctcaacacgtgtttcgttttgtgacacaacaacttggaggaggtgaaattcattaacaaggaataaatatcttctctttatggagccacttccttaacccctcaaatcttcctagaccacttccatccaacgtagaataagtgaaccatatgaaattgctgtttttgtgggtcaaaggcaattgaatggtagtctcacatggttcaacatctgtatacaagcaagttctctgatgaaaaagctgagtgactgcgagtaccattcttagaattctttaggagagaagaaagatttcaaggacatttgtgaagatatttctgatcatgttgagcaaatccatgccctccttgaaacagagttctccctaaagctgctgtcttactctgtcaacgtgatagtggacatccacgcagtgcagctcctctggcaccagcttcgagtctcagtgctggttctgcgggagcgcattctgcaaggtctgcaggacgccaatggcaactacactaggcagacggacattctgcaagctttctctgaagagacaaaagagggccggcttgattctctaacagaagtggatgactcaggacaattaaccatcaaatgttctcaaaattacttgtctctggattgtggcattactgcattcgaactgtctgactacagtccaagtgaggatttgctcagtgggctaggtgacatgacctctagccaagtcaaaaccaaaccctttgactcttggagctacagtgagatggaaaaggagtttcctgagcttatccgaagtgttggtttacttacggtagctgctgactctatctctaccaatggcagtgaagcagttactgaggaggtatctcaagtatctctctcagtagacgacaaaggtggatgtgaggaagacaatgcttctgcagtcgaagagcaaccaggcttaacactgggggtgtcatcatcttcaggagaagctctgacaaatgctgctcaaccctcctctgagactgtgcagcaagaatccagttcctcctcccatcatgatgcaaagaatcagcagcctgttccttgtgaaaatgcaacccccaaacgaaccatcagagattgctttaattataacgaggactctcccacgcagcctacattgccaaaaagaggactttttcttaaagaggaaacttttaagaatgatctgaaaggcaatggtggaaagaggcaaatggttgatctaaagcctgagatgagcagaagcaccccttcgctagtagatcctcctgacagatccaaactttgcctggtattgcagtcttcttaccccaacagcccttctgctgccagccagtcttatgagtgtttacacaaggtggggaatgggaaccttgaaaacacagtcaaatttcacattaaagaaatttcttccagcctgggaaggcttaacgactgctataaagagaaatctcgacttaaaaagccacacaagacctcagaagaggtgcctccatgccgaacacctaaacgggggactggttcaggcaaacaagctaaaaatacaaagagctcagcagtgccaaatggagagctttcttatacttccaaggccatagaggggccacaaacaaattctgcttccacatcctcacttgagccttgtaatcagagaagttggaatgccaaattgcaattgcagtcagaaacatccagttcaccagcttttactcagagcagtgaatcctctgttggctcagacaacatcatgtctccggtgccacttctttcaaaacacaaaagcaaaaaaggtcaagcctcctctccaagtcacgtcactaggaatggtgaggttgtggaggcctggtatggctctgatgaatacctagcactgccctctcaccttaagcagacagaagtattggcttt

SEQ ID NO: 9782 - protein, 401 aa, Homo sapiens
MTSSQVKTKPFDSWSYSEMEKEFPELIRSVGLLTVAADSISTNGSEAVTEEVSQVSLSVDDKGGCEEDNASAVEEQPGLTLGVSSSSGEALTNAAQPSSETVQQESSSSSHHDAKNQQPVPCENATPKRTIRDCFNYNEDSPTQPTLPKRGLFLKEETFKNDLKGNGGKRQMVDLKPEMSRSTPSLVDPPDRSKLCLVLQSSYPNSPSAASQSYECLHKVGNGNLENTVKFHIKEISSSLGRLNDCYKEKSRLKKPHKTSEEVPPCRTPKRGTGSGKQAKNTKSSAVPNGELSYTSKAIEGPQTNSASTSSLEPCNQRSWNAKLQLQSETSSSPAFTQSSESSVGSDNIMSPVPLLSKHKSKKGQASSPSHVTRNGEVVEAWYGSDEYLALPSHLKQTEVL

SEQ ID NO: 9783 - DNA, 1714 bp, Homo sapiens
accatgagtagggtgttgatgatgaagttggaagatttgtgaatttatcctgtgttacttctgggattcagaatgctcagtgctggcatggaggaactcacatcgacatttgtgaagatatttctgatcatgttgagcaaatccatgccctccttgaaacagagttctccctaaagctgctgtcttactctgtcaacgtgatagtggacatccacgcagtgcagctcctctggcaccagcttcgagtctcagtgctggttctgcgggagcgcattctgcaaggtctgcaggacgccaatggcaactacactaggcagacggacattctgcaagctttctctgaagagacaaaagagggccggcttgattctctaacagaagtggatgactcaggacaattaaccatcaaatgttctcaaaattacttgtctctggattgtggcattactgcattcgaactgtctgactacagtccaagtgaggatttgctcagtgggctaggtgacatgacctctagccaagtcaaaaccaaaccctttgactcttggagctacagtgagatggaaaaggagtttcctgagcttatccgaagtgttggtttacttacggtagctgctgactctatctctaccaatggcagtgaagcagttactgaggaggtatctcaagtatctctctcagtagacgacaaaggtggatgtgaggaagacaatgcttctgcagtcgaagagcaaccaggcttaacactgggggtgtcatcatcttcaggagaagctctgacaaatgctgctcaaccctcctctgagactgtgcagcaagaatccagttcctcctcccatcatgatgcaaagaatcagcagcctgttccttgtgaaaatgcaacccccaaacgaaccatcagagattgctttaattataacgaggactctcccacgcagcctacattgccaaaaagaggactttttcttaaagaggaaacttttaagaatgatctgaaaggcaatggtggaaagaggcaaatggttgatctaaagcctgagatgagcagaagcaccccttcgctagtagatcctcctgacagatccaaactttgcctggtattgcagtcttcttaccccaacagcccttctgctgccagccagtcttatgagtgtttacacaaggtggggaatgggaaccttgaaaacacagtcaaatttcacattaaagaaatttcttccagcctgggaaggcttaacgactgctataaagagaaatctcgacttaaaaagccacacaagacctcagaagaggtgcctccatgccgaacacctaaacgggggactggttcaggcaaacaagctaaaaatacaaagagctcagcagtgccaaatggagagctttcttatacttccaaggccatagaggggccacaaacaaattctgcttccacatcctcacttgagccttgtaatcagagaagttggaatgccaaattgcaattgcagtcagaaacatccagttcaccagcttttactcagagcagtgaatcctctgttggctcagacaacatcatgtctccggtgccacttctttcaaaacacaaaagcaaaaaaggtcaagcctcctctccaagtcacgtcactaggaatggtgaggttgtggaggcctggtatggctctgatgaatacctagcactgccctctcaccttaagcagacagaagtattggcttt

SEQ ID NO: 9784 - protein, 33 aa, Homo sapiens
MLSAGMEELTSTFVKIFLIMLSKSMPSLKQSSP

SEQ ID NO: 9785 - DNA, 1943 bp, Homo sapiens
agtctgggagctgagtgactgaggatttgaaaccttgctatagttacagttcataacaagtgtctaggcagttagaccttaagtgttcaggtatggaaagaaagtcatatgttatgttttagattctgtttgtaaagctggttaactagagacagctgatgaaaaaccaaatcgacttgagttacaagatctgggctttctctgctctgctttcaacctgttggttggtggtggagtagctgacagaagcgaatggcttggctgagggacatgaagtgacagcagcctgtttaggaccacaccacattttggacctcttgctgtgcagttcaggacatttgtgaagatatttctgatcatgttgagcaaatccatgccctccttgaaacagagttctccctaaagctgctgtcttactctgtcaacgtgatagtggacatccacgcagtgcagctcctctggcaccagcttcgagtctcagtgctggttctgcgggagcgcattctgcaaggtctgcaggacgccaatggcaactacactaggcagacggacattctgcaagctttctctgaagagacaaaagagggccggcttgattctctaacagaagtggatgactcaggacaattaaccatcaaatgttctcaaaattacttgtctctggattgtggcattactgcattcgaactgtctgactacagtccaagtgaggatttgctcagtgggctaggtgacatgacctctagccaagtcaaaaccaaaccctttgactcttggagctacagtgagatggaaaaggagtttcctgagcttatccgaagtgttggtttacttacggtagctgctgactctatctctaccaatggcagtgaagcagttactgaggaggtatctcaagtatctctctcagtagacgacaaaggtggatgtgaggaagacaatgcttctgcagtcgaagagcaaccaggcttaacactgggggtgtcatcatcttcaggagaagctctgacaaatgctgctcaaccctcctctgagactgtgcagcaagaatccagttcctcctcccatcatgatgcaaagaatcagcagcctgttccttgtgaaaatgcaacccccaaacgaaccatcagagattgctttaattataacgaggactctcccacgcagcctacattgccaaaaagaggactttttcttaaagaggaaacttttaagaatgatctgaaaggcaatggtggaaagaggcaaatggttgatctaaagcctgagatgagcagaagcaccccttcgctagtagatcctcctgacagatccaaactttgcctggtattgcagtcttcttaccccaacagcccttctgctgccagccagtcttatgagtgtttacacaaggtggggaatgggaaccttgaaaacacagtcaaatttcacattaaagaaatttcttccagcctgggaaggcttaacgactgctataaagagaaatctcgacttaaaaagccacacaagacctcagaagaggtgcctccatgccgaacacctaaacgggggactggttcaggcaaacaagctaaaaatacaaagagctcagcagtgccaaatggagagctttcttatacttccaaggccatagaggggccacaaacaaattctgcttccacatcctcacttgagccttgtaatcagagaagttggaatgccaaattgcaattgcagtcagaaacatccagttcaccagcttttactcagagcagtgaatcctctgttggctcagacaacatcatgtctccggtgccacttctttcaaaacacaaaagcaaaaaaggtcaagcctcctctccaagtcacgtcactaggaatggtgaggttgtggaggcctggtatggctctgatgaatacctagcactgccctctcaccttaagcagacagaagtattggcttt

SEQ ID NO: 9786 - protein, 401 aa, Homo sapiens; identical to SEQ ID NO: 9782

SEQ ID NO: 9787 - DNA, 817 bp, Homo sapiens
tgtatgatttgcaaattattttctcccattctgtagcctatttactctgttggtggtgtcctttgatgcatcaagtttttaagtttgatgtagtttcatttatctatctttgcttttgttgcctgtggttttggtgccataaccgagaattcactgccaagcccaacatcatgaagtttttcctcagtgttttcttccaggaggtttatcattttgggtcttatgtttaggtctttgagttctctctctctcttttttttttaaatttcaatgtagttcccacccatattttaagggtctcactcttggctttcttttaggataagacacagctacaaggctaagaccaagtcatcttctggaatttgtcttggaaaaaaaaaatacttttgagagccctttttttgttcttgttggtttgtttttgttttttgagacagggtctcactctgtcatccaggctggaatgtggtggcgtgatgatagctcacgtcaagtctccacctcctggagcttagttgatcttcccacctcagcctacccagtagctgggactacaggaggctgaggcatgagaatttcttgaacccggaaggcagaggttgcagaggttgagctgagattgcgtcactgcactccagcctgggcgactgagggagactgtctcaaaaaacacaaagaaatatatctatgtacttaactttgttcctgtagtttctattagtaataattcgaagtcaataaatatagaatgacttcatccttttggatggctgcatagtattctacttacaaatatgccataatttacataacc

SEQ ID NO: 9788 - protein, 33 aa, Homo sapiens [sequence omitted]

SEQ ID NO: 9789 - DNA, 5842 bp, Homo sapiens
acgccccccacccgggaggggggagagaggcaaaaagtaagagaggaaaaaaaatagcaggaagatggcgcccaccaagcccagctttcagcaggatccttccaggcgagaacgtttacaagcattgagaaaggagaaatcccgagatgctgctcgctcccgccggggaaaagaaaactttgagttctatgaattggccaagttgttgcctcttcctgcagccattaccagccagctcgacaaggcatccatcattcgacttacaattagctatctgaaaatgagggactttgctaaccagggggaccctccgtggaacttgcgaatggaaggccctccacctaacacatcagtaaaagttataggtgcacagcgaaggagaagccccagtgcactagccattgaagtatttgaagcacatttgggaagccacattttgcagtccctggatggctttgtatttgcactaaatcaggaaggaaaatttttgtacatttccgaaacagtctccatctacctaggcctctcacaagtggagctgacaggcagcagtgtctttgactatgtccaccccggagatcacgtggagatggctgagcagctgggcatgaagctcccccctgggcggggtctcctgtcacagggcactgctgaggacggagccagctcagcatcttcctcctctcagtcggagacccccgagccagtggagtcaaccagccccagtctgctaaccactgacaacactcttgagcgttcctttttcatccgaatgaaatctactctgaccaaacgcggtgtgcacatcaaatcatcaggatataaggtgattcacataacaggccggctacgcctgagagtgtcgctgtcccacgggaggaccgtccccagccaaatcatgggtctcgtggttgttgcgcatgccttgcctccccctacgatcaatgaagtcagaattgactgccatatgttcgtcactcgagtaaatatggacctcaatatcatttactgtgaaaataggattagtgattatatggatctgacccctgtagatatcgtagggaagagatgctaccacttcatccatgctgaagacgtggagggcatcaggcacagtcacttggacttgctgaataagggtcagtgtgtgacaaagtactatcgctggatgcagaagaacggaggatatatttggatacagtccagtgccaccatagctattaatgccaagaatgcaaatgaaaagaatatcatctgggtgaattaccttcttagcaatcctgagtacaaggacacacccatggacatcgcacagctcccccatctgccggagaaaacttccgaatcctcggagacatccgactctgagtcagactctaaagacacctcaggtattacagaggacaacgagaactccaagtccgacgagaaggggaaccagtccgagaacagcgaagacccggagcccgaccggaagaagtcgggcaacgcgtgtgacaacgacatgaactgcaacgacgacggccacagctccagtaacccggacagccgcgacagcgacgacagcttcgagcactcggactttgagaaccccaaggcgggcgaggacggcttcggtgctctgggcgcgatgcagatcaaggtggagcgctacgtggagagcgagtcggacctgcggctgcagaactgcgagtcactcacgtccgacagcgccaaggactcggacagcgcaggcgaggcgggcgcgcaggcctccagcaagcaccagaagcgcaagaaaaggcggaaacggcaaaagggcggcagcgccagccgccggcgcctgtccagcgcgtcgagcccaggcggcctggacgcgggcctggtggagcccccgcggctgctgtcctcccccaacagtgcctcggtgctcaagatcaagacggagatctcagaacccatcaatttcgacaatgacagcagcatctggaactacccgcccaaccgggagatctccaggaacgagtccccctacagcatgaccaagccccccagctctgagcacttcccgtccccgcagggcggcggcggtgggggtggcggtggcggggggctgcacgtggccattcccgactcggtcctcaccccgcccggcgccgacggcgcggccgcccgcaagactcagttcggcgcctcggccaccgcggccctggcccccgtcgcctccgacccgctgtcacccccgctctcggcgtccccgcgggacaagcaccccgggaacggcggcgggggcgggggcgggggcggcggcgcggggggcggcggccccagcgcgtccaactccttgctgtacactggggacctggaggcgctgcagaggttgcaggcgggcaacgtcgtgctcccgctggtgcacagggtgaccgggaccctggccgccaccagcacggccgcgcagagggtctacaccacgggcaccatccgctacgcgcccgccgaggtgaccctggccatgcagagcaacctgctgcccaacgcgcacgctgttaacttcgtggacgttaacagccccggctttggcctcgaccccaagacgcccatggagatgctctaccaccacgtgcaccggctcaacatgtcaggaccgttcggcggcgcagtgagcgcagctagcctgacgcagatgcccgccggcaacgtgttcaccacggccgagggactcttctccacgctgcccttccccgtctacagcaacggcatccacgcggcacagactctggagcgcaaggaggactgaggcgccgcccgtcctgggcccggccaggccccgcttggaggaggcatcgtcggcattttcgtttagacctttaattctagcactttgaattcgagcaggtcagcgtcttctctcgccacgacggtccccattccaccccctctttctttcacctgacttattctttcgtgtaaagatatgtttattttttgccttcagagggtcagacgaccagttgcctgccgttttgtcttcttctaaggtgtgtgttgggttgttttgctttcctttgcatctttattaagatgtctttcatgtgtatatgcctctgccatagaatactcagtcttgtggtcaagagagttctcaagtgacaaccattggggtttcttcataaagatcttgatatgatcaagatggaaagagacaagcataaacaatgtgccctgtttgactaagtcaaatgaaatagggtggtttttgtttctgttcctaattcctttaaaaaatagggggaatagtattttagaattttatgcagaatttaattctctttttacggttaagattttaagattttcttacttgcacataaaaataatttgggttcttaaacttaatttctggcctgtgactagaatgtttaaaaaaaaaaaagtcggactaaatgttaattactgaaacattaacttaatttctaaaaccatggtgctatcatttattaatctgtaatgtcttcatacaaaatgcagctcctgggctgggttttgggggaaaaaaaaaaaatgtgttctgtcctggtctggagtccgttgctgcagtctccttggttagttaagacaaagccctcattaacgtttgctgcaggacttaaaattttttacctcccaactaacaaacatagcctcacattaaatttaatgggtcagtaaagccccttttaaaggggctgctggaaaactcaatcaaactgatttgaggagcagtttaggtacatactgccttttgtttagctttttgttttccttactcagtctaactgaggctaattttgcaacttcaataacacttcggagtaaaagaaggaaaatatttaacatgtttttggtttttttcatttcttgcttaaaacaaaaaggaaggttgtatttggggggactggtttgatttgatggaatttctttccctttggttcttatttctgggttgaaaccaataagttttaaaactaaagaatgggttaataagcttcagacagataactgcaactgaaaactgcacattaagtaaaaaaaaaaaaaaagaaaaaaaaaagaaaaagaaaaagaaaaaaaatcctattttgtctttgttgccagaaatcagtgtggtgtcaaacactccaaatgactgtcaagtataaattcttcttccacttcatttttggcagctgtttgttaaggcatctaataacagatgtgagaactgtaatgtgtacaatgtgtatgtgtccttggctgtcagtcccattgcagtttcaatgtgtgtttctatatgcagtatatactaagctaatgtagttgttttgtcctttgtcttatctgtgctctatctctagtccggagtggtacagtcccattcctgcagtcctagtgaatcagtgattcttgggggttagtgggttttgtgtggtggccttcctctgtaatgtcaccctatgctgcttctactgtctgtgaatcttccgttttaccttttaaaattcctgctgttgctttgctggtgtatattctccctacctctcctctctttccctccctttcccatctccccctctccctcctcttcattccttccccatccccaaaatctctttcattctcagagataaaaagactcttaactagctcaaggttaatggagccatttttcccacaacggaattctgggtatgactctgtcttctggagtgcaacacaaagcactgaagaataatgctcagatatattaaataaattgatgccatatagcctcagttgttaacattcccagagtcccttgtgctctacctataagcagtgggtgcttttctttggtttcctttcaggttggctgatggagcaatatataaagcaattaccagtgagacagaaaattctttcaaaggtcaaccaacatttttaagaaacaaaatgggaggggataatggaatctagaattgtcatatatatttgtttacttgtgcaatgctaatatagtaactcggctgtcctttgaatatcactgtgttgagtagattcctctaggacctttgatttcatgagttgggcccaaaccgtggtggaataataacaaaaagaagttaaatgccacaaattttaatagtgagcttacttgaaggatttaagtaggtttaggaggtgaagaaggccgatggagaaatttacagattaattttggaagctctactctagctatcgaacaatcaaaggaatgcacctatcagctacaaagaacagctagacagctgttttttttcttttataaatgtttctgtgttgtgtcaaaatgatttctggtgatttaaactaacagataatcacagctgctgtctaaattcatagtgttgaaaattacaaaatgaaaaaaaaaaaaaaaacacttcattacctgtgaagactgtgtctgtgtttttaactatttcttgtacaaatatatgaaaacttttatgaggagactggtgccaagtagctgaataatggggaaagggatattctgttcgtaaaaatcttagcagtgttaccaactctacgatatatatataaaaaaataattaaaacgttacaaagcgacagctatggtacatttgttttgtgtgaagctaaccggacctaacttcctgagtgcctggcttattttgaaacattttttttcattgaccattgataatgctgcaaatcagaaatgtacatacttcatttacaacagggttctttttatacttttgtagattctcatacatgtcacatacatggttgtctttatgtaacttaattttttcatccgcaggtgccattttcataataaacttctcttggatttgttact

SEQ ID NO: 9790 - protein, 903 aa, Homo sapiens
MAPTKPSFQQDPSRRERLQALRKEKSRDAARSRRGKENFEFYELAKLLPLPAAITSQLDKASIIRLTISYLKMRDFANQGDPPWNLRMEGPPPNTSVKVIGAQRRRSPSALAIEVFEAHLGSHILQSLDGFVFALNQEGKFLYISETVSIYLGLSQVELTGSSVFDYVHPGDHVEMAEQLGMKLPPGRGLLSQGTAEDGASSASSSSQSETPEPVESTSPSLLTTDNTLERSFFIRMKSTLTKRGVHIKSSGYKVIHITGRLRLRVSLSHGRTVPSQIMGLVVVAHALPPPTINEVRIDCHMFVTRVNMDLNIIYCENRISDYMDLTPVDIVGKRCYHFIHAEDVEGIRHSHLDLLNKGQCVTKYYRWMQKNGGYIWIQSSATIAINAKNANEKNIIWVNYLLSNPEYKDTPMDIAQLPHLPEKTSESSETSDSESDSKDTSGITEDNENSKSDEKGNQSENSEDPEPDRKKSGNACDNDMNCNDDGHSSSNPDSRDSDDSFEHSDFENPKAGEDGFGALGAMQIKVERYVESESDLRLQNCESLTSDSAKDSDSAGEAGAQASSKHQKRKKRRKRQKGGSASRRRLSSASSPGGLDAGLVEPPRLLSSPNSASVLKIKTEISEPINFDNDSSIWNYPPNREISRNESPYSMTKPPSSEHFPSPQGGGGGGGGGGGLHVAIPDSVLTPPGADGAAARKTQFGASATAALAPVASDPLSPPLSASPRDKHPGNGGGGGGGGGGAGGGGPSASNSLLYTGDLEALQRLQAGNVVLPLVHRVTGTLAATSTAAQRVYTTGTIRYAPAEVTLAMQSNLLPNAHAVNFVDVNSPGFGLDPKTPMEMLYHHVHRLNMSGPFGGAVSAASLTQMPAGNVFTTAEGLFSTLPFPVYSNGIHAAQTLERKED

SEQ ID NO: 9791 - DNA, 5868 bp, Homo sapiens
atggcgcccaccaagcccagctttcagcaggatccttccaggcgagaacgaataactgcccagcatcctctgcccaaccaatcagaatgtaggaaaatctacagatatgacggaatctactgtgaatctacctaccagaatttacaagcattgagaaaggagaaatcccgagatgctgctcgctcccgccggggaaaagaaaactttgagttctatgaattggccaagttgttgcctcttcctgcagccattaccagccagctcgacaaggcatccatcattcgacttacaattagctatctgaaaatgagggactttgctaaccagggggaccctccgtggaacttgcgaatggaaggccctccacctaacacatcagtaaaagttataggtgcacagcgaaggagaagccccagtgcactagccattgaagtatttgaagcacatttgggaagccacattttgcagtccctggatggctttgtatttgcactaaatcaggaaggaaaatttttgtacatttccgaaacagtctccatctacctaggcctctcacaagtggagctgacaggcagcagtgtctttgactatgtccaccccggagatcacgtggagatggctgagcagctgggcatgaagctcccccctgggcggggtctcctgtcacagggcactgctgaggacggagccagctcagcatcttcctcctctcagtcggagacccccgagccagtggagtcaaccagccccagtctgctaaccactgacaacactcttgagcgttcctttttcatccgaatgaaatctactctgaccaaacgcggtgtgcacatcaaatcatcaggatataaggtgattcacataacaggccggctacgcctgagagtgtcgctgtcccacgggaggaccgtccccagccaaatcatgggtctcgtggttgttgcgcatgccttgcctccccctacgatcaatgaagtcagaattgactgccatatgttcgtcactcgagtaaatatggacctcaatatcatttactgtgaaaataggattagtgattatatggatctgacccctgtagatatcgtagggaagagatgctaccacttcatccatgctgaagacgtggagggcatcaggcacagtcacttggacttgctgaataagggtcagtgtgtgacaaagtactatcgctggatgcagaagaacggaggatatatttggatacagtccagtgccaccatagctattaatgccaagaatgcaaatgaaaagaatatcatctgggtgaattaccttcttagcaatcctgagtacaaggacacacccatggacatcgcacagctcccccatctgccggagaaaacttccgaatcctcggagacatccgactctgagtcagactctaaagacacctcaggtattacagaggacaacgagaactccaagtccgacgagaaggggaaccagtccgagaacagcgaagacccggagcccgaccggaagaagtcgggcaacgcgtgtgacaacgacatgaactgcaacgacgacggccacagctccagtaacccggacagccgcgacagcgacgacagcttcgagcactcggactttgagaaccccaaggcgggcgaggacggcttcggtgctctgggcgcgatgcagatcaaggtggagcgctacgtggagagcgagtcggacctgcggctgcagaactgcgagtcactcacgtccgacagcgccaaggactcggacagcgcaggcgaggcgggcgcgcaggcctccagcaagcaccagaagcgcaagaaaaggcggaaacggcaaaagggcggcagcgccagccgccggcgcctgtccagcgcgtcgagcccaggcggcctggacgcgggcctggtggagcccccgcggctgctgtcctcccccaacagtgcctcggtgctcaagatcaagacggagatctcagaacccatcaatttcgacaatgacagcagcatctggaactacccgcccaaccgggagatctccaggaacgagtccccctacagcatgaccaagccccccagctctgagcacttcccgtccccgcagggcggcggcggtgggggtggcggtggcggggggctgcacgtggccattcccgactcggtcctcaccccgcccggcgccgacggcgcggccgcccgcaagactcagttcggcgcctcggccaccgcggccctggcccccgtcgcctccgacccgctgtcacccccgctctcggcgtccccgcgggacaagcaccccgggaacggcggcgggggcgggggcgggggcggcggcgcggggggcggcggccccagcgcgtccaactccttgctgtacactggggacctggaggcgctgcagaggttgcaggcgggcaacgtcgtgctcccgctggtgcacagggtgaccgggaccctggccgccaccagcacggccgcgcagagggtctacaccacgggcaccatccgctacgcgcccgccgaggtgaccctggccatgcagagcaacctgctgcccaacgcgcacgctgttaacttcgtggacgttaacagccccggctttggcctcgaccccaagacgcccatggagatgctctaccaccacgtgcaccggctcaacatgtcaggaccgttcggcggcgcagtgagcgcagctagcctgacgcagatgcccgccggcaacgtgttcaccacggccgagggactcttctccacgctgcccttccccgtctacagcaacggcatccacgcggcacagactctggagcgcaaggaggactgaggcgccgcccgtcctgggcccggccaggccccgcttggaggaggcatcgtcggcattttcgtttagacctttaattctagcactttgaattcgagcaggtcagcgtcttctctcgccacgacggtccccattccaccccctctttctttcacctgacttattctttcgtgtaaagatatgtttattttttgccttcagagggtcagacgaccagttgcctgccgttttgtcttcttctaaggtgtgtgttgggttgttttgctttcctttgcatctttattaagatgtctttcatgtgtatatgcctctgccatagaatactcagtcttgtggtcaagagagttctcaagtgacaaccattggggtttcttcataaagatcttgatatgatcaagatggaaagagacaagcataaacaatgtgccctgtttgactaagtcaaatgaaatagggtggtttttgtttctgttcctaattcctttaaaaaatagggggaatagtattttagaattttatgcagaatttaattctctttttacggttaagattttaagattttcttacttgcacataaaaataatttgggttcttaaacttaatttctggcctgtgactagaatgtttaaaaaaaaaaaagtcggactaaatgttaattactgaaacattaacttaatttctaaaaccatggtgctatcatttattaatctgtaatgtcttcatacaaaatgcagctcctgggctgggttttgggggaaaaaaaaaaaatgtgttctgtcctggtctggagtccgttgctgcagtctccttggttagttaagacaaagccctcattaacgtttgctgcaggacttaaaattttttacctcccaactaacaaacatagcctcacattaaatttaatgggtcagtaaagccccttttaaaggggctgctggaaaactcaatcaaactgatttgaggagcagtttaggtacatactgccttttgtttagctttttgttttccttactcagtctaactgaggctaattttgcaacttcaataacacttcggagtaaaagaaggaaaatatttaacatgtttttggtttttttcatttcttgcttaaaacaaaaaggaaggttgtatttggggggactggtttgatttgatggaatttctttccctttggttcttatttctgggttgaaaccaataagttttaaaactaaagaatgggttaataagcttcagacagataactgcaactgaaaactgcacattaagtaaaaaaaaaaaaaaagaaaaaaaaaagaaaaagaaaaagaaaaaaaatcctattttgtctttgttgccagaaatcagtgtggtgtcaaacactccaaatgactgtcaagtataaattcttcttccacttcatttttggcagctgtttgttaaggcatctaataacagatgtgagaactgtaatgtgtacaatgtgtatgtgtccttggctgtcagtcccattgcagtttcaatgtgtgtttctatatgcagtatatactaagctaatgtagttgttttgtcctttgtcttatctgtgctctatctctagtccggagtggtacagtcccattcctgcagtcctagtgaatcagtgattcttgggggttagtgggttttgtgtggtggccttcctctgtaatgtcaccctatgctgcttctactgtctgtgaatcttccgttttaccttttaaaattcctgctgttgctttgctggtgtatattctccctacctctcctctctttccctccctttcccatctccccctctccctcctcttcattccttccccatccccaaaatctctttcattctcagagataaaaagactcttaactagctcaaggttaatggagccatttttcccacaacggaattctgggtatgactctgtcttctggagtgcaacacaaagcactgaagaataatgctcagatatattaaataaattgatgccatatagcctcagttgttaacattcccagagtcccttgtgctctacctataagcagtgggtgcttttctttggtttcctttcaggttggctgatggagcaatatataaagcaattaccagtgagacagaaaattctttcaaaggtcaaccaacatttttaagaaacaaaatgggaggggataatggaatctagaattgtcatatatatttgtttacttgtgcaatgctaatatagtaactcggctgtcctttgaatatcactgtgttgagtagattcctctaggacctttgatttcatgagttgggcccaaaccgtggtggaataataacaaaaagaagttaaatgccacaaattttaatagtgagcttacttgaaggatttaagtaggtttaggaggtgaagaaggccgatggagaaatttacagattaattttggaagctctactctagctatcgaacaatcaaaggaatgcacctatcagctacaaagaacagctagacagctgttttttttcttttataaatgtttctgtgttgtgtcaaaatgatttctggtgatttaaactaacagataatcacagctgctgtctaaattcatagtgttgaaaattacaaaatgaaaaaaaaaaaaaaaacacttcattacctgtgaagactgtgtctgtgtttttaactatttcttgtacaaatatatgaaaacttttatgaggagactggtgccaagtagctgaataatggggaaagggatattctgttcgtaaaaatcttagcagtgttaccaactctacgatatatatataaaaaaataattaaaacgttacaaagcgacagctatggtacatttgttttgtgtgaagctaaccggacctaacttcctgagtgcctggcttattttgaaacattttttttcattgaccattgataatgctgcaaatcagaaatgtacatacttcatttacaacagggttctttttatacttttgtagattctcatacatgtcacatacatggttgtctttatgtaacttaattttttcatccgcaggtgccattttcataataaacttctcttggatttgttact

SEQ ID NO: 9792 - protein, 933 aa, Homo sapiens
MAPTKPSFQQDPSRRERITAQHPLPNQSECRKIYRYDGIYCESTYQNLQALRKEKSRDAARSRRGKENFEFYELAKLLPLPAAITSQLDKASIIRLTISYLKMRDFANQGDPPWNLRMEGPPPNTSVKVIGAQRRRSPSALAIEVFEAHLGSHILQSLDGFVFALNQEGKFLYISETVSIYLGLSQVELTGSSVFDYVHPGDHVEMAEQLGMKLPPGRGLLSQGTAEDGASSASSSSQSETPEPVESTSPSLLTTDNTLERSFFIRMKSTLTKRGVHIKSSGYKVIHITGRLRLRVSLSHGRTVPSQIMGLVVVAHALPPPTINEVRIDCHMFVTRVNMDLNIIYCENRISDYMDLTPVDIVGKRCYHFIHAEDVEGIRHSHLDLLNKGQCVTKYYRWMQKNGGYIWIQSSATIAINAKNANEKNIIWVNYLLSNPEYKDTPMDIAQLPHLPEKTSESSETSDSESDSKDTSGITEDNENSKSDEKGNQSENSEDPEPDRKKSGNACDNDMNCNDDGHSSSNPDSRDSDDSFEHSDFENPKAGEDGFGALGAMQIKVERYVESESDLRLQNCESLTSDSAKDSDSAGEAGAQASSKHQKRKKRRKRQKGGSASRRRLSSASSPGGLDAGLVEPPRLLSSPNSASVLKIKTEISEPINFDNDSSIWNYPPNREISRNESPYSMTKPPSSEHFPSPQGGGGGGGGGGGLHVAIPDSVLTPPGADGAAARKTQFGASATAALAPVASDPLSPPLSASPRDKHPGNGGGGGGGGGGAGGGGPSASNSLLYTGDLEALQRLQAGNVVLPLVHRVTGTLAATSTAAQRVYTTGTIRYAPAEVTLAMQSNLLPNAHAVNFVDVNSPGFGLDPKTPMEMLYHHVHRLNMSGPFGGAVSAASLTQMPAGNVFTTAEGLFSTLPFPVYSNGIHAAQTLERKED

SEQ ID NO: 9793 - DNA, 5829 bp, Homo sapiens
atggcgcccaccaagcccagctttcagcaggatccttccaggcgagaacgtttacaagcattgagaaaggagaaatcccgagatgctgctcgctcccgccggggaaaagaaaactttgagttctatgaattggccaagttgttgcctcttcctgcagccattaccagccagctcgacaaggcatccatcattcgacttacaattagctatctgaaaatgagggactttgctaaccagggggaccctccgtggaacttgcgaatggaaggccctccacctaacacatcagtaaaagggatacaaatgtggaaatctgaactctgcatgagaaagacaccatgtgaagttataggtgcacagcgaaggagaagccccagtgcactagccattgaagtatttgaagcacatttgggaagccacattttgcagtccctggatggctttgtatttgcactaaatcaggaaggaaaatttttgtacatttccgaaacagtctccatctacctaggcctctcacaagtggagctgacaggcagcagtgtctttgactatgtccaccccggagatcacgtggagatggctgagcagctgggcatgaagctcccccctgggcggggtctcctgtcacagggcactgctgaggacggagccagctcagcatcttcctcctctcagtcggagacccccgagccagtggagtcaaccagccccagtctgctaaccactgacaacactcttgagcgttcctttttcatccgaatgaaatctactctgaccaaacgcggtgtgcacatcaaatcatcaggatataaggtgattcacataacaggccggctacgcctgagagtgtcgctgtcccacgggaggaccgtccccagccaaatcatgggtctcgtggttgttgcgcatgccttgcctccccctacgatcaatgaagtcagaattgactgccatatgttcgtcactcgagtaaatatggacctcaatatcatttactgtgaaaataggattagtgattatatggatctgacccctgtagatatcgtagggaagagatgctaccacttcatccatgctgaagacgtggagggcatcaggcacagtcacttggacttgctgaataagggtcagtgtgtgacaaagtactatcgctggatgcagaagaacggaggatatatttggatacagtccagtgccaccatagctattaatgccaagaatgcaaatgaaaagaatatcatctgggtgaattaccttcttagcaatcctgagtacaaggacacacccatggacatcgcacagctcccccatctgccggagaaaacttccgaatcctcggagacatccgactctgagtcagactctaaagacacctcaggtattacagaggacaacgagaactccaagtccgacgagaaggggaaccagtccgagaacagcgaagacccggagcccgaccggaagaagtcgggcaacgcgtgtgacaacgacatgaactgcaacgacgacggccacagctccagtaacccggacagccgcgacagcgacgacagcttcgagcactcggactttgagaaccccaaggcgggcgaggacggcttcggtgctctgggcgcgatgcagatcaaggtggagcgctacgtggagagcgagtcggacctgcggctgcagaactgcgagtcactcacgtccgacagcgccaaggactcggacagcgcaggcgaggcgggcgcgcaggcctccagcaagcaccagaagcgcaagaaaaggcggaaacggcaaaagggcggcagcgccagccgccggcgcctgtccagcgcgtcgagcccaggcggcctggacgcgggcctggtggagcccccgcggctgctgtcctcccccaacagtgcctcggtgctcaagatcaagacggagatctcagaacccatcaatttcgacaatgacagcagcatctggaactacccgcccaaccgggagatctccaggaacgagtccccctacagcatgaccaagccccccagctctgagcacttcccgtccccgcagggcggcggcggtgggggtggcggtggcggggggctgcacgtggccattcccgactcggtcctcaccccgcccggcgccgacggcgcggccgcccgcaagactcagttcggcgcctcggccaccgcggccctggcccccgtcgcctccgacccgctgtcacccccgctctcggcgtccccgcgggacaagcaccccgggaacggcggcgggggcgggggcgggggcggcggcgcggggggcggcggccccagcgcgtccaactccttgctgtacactggggacctggaggcgctgcagaggttgcaggcgggcaacgtcgtgctcccgctggtgcacagggtgaccgggaccctggccgccaccagcacggccgcgcagagggtctacaccacgggcaccatccgctacgcgcccgccgaggtgaccctggccatgcagagcaacctgctgcccaacgcgcacgctgttaacttcgtggacgttaacagccccggctttggcctcgaccccaagacgcccatggagatgctctaccaccacgtgcaccggctcaacatgtcaggaccgttcggcggcgcagtgagcgcagctagcctgacgcagatgcccgccggcaacgtgttcaccacggccgagggactcttctccacgctgcccttccccgtctacagcaacggcatccacgcggcacagactctggagcgcaaggaggactgaggcgccgcccgtcctgggcccggccaggccccgcttggaggaggcatcgtcggcattttcgtttagacctttaattctagcactttgaattcgagcaggtcagcgtcttctctcgccacgacggtccccattccaccccctctttctttcacctgacttattctttcgtgtaaagatatgtttattttttgccttcagagggtcagacgaccagttgcctgccgttttgtcttcttctaaggtgtgtgttgggttgttttgctttcctttgcatctttattaagatgtctttcatgtgtatatgcctctgccatagaatactcagtcttgtggtcaagagagttctcaagtgacaaccattggggtttcttcataaagatcttgatatgatcaagatggaaagagacaagcataaacaatgtgccctgtttgactaagtcaaatgaaatagggtggtttttgtttctgttcctaattcctttaaaaaatagggggaatagtattttagaattttatgcagaatttaattctctttttacggttaagattttaagattttcttacttgcacataaaaataatttgggttcttaaacttaatttctggcctgtgactagaatgtttaaaaaaaaaaaagtcggactaaatgttaattactgaaacattaacttaatttctaaaaccatggtgctatcatttattaatctgtaatgtcttcatacaaaatgcagctcctgggctgggttttgggggaaaaaaaaaaaatgtgttctgtcctggtctggagtccgttgctgcagtctccttggttagttaagacaaagccctcattaacgtttgctgcaggacttaaaattttttacctcccaactaacaaacatagcctcacattaaatttaatgggtcagtaaagccccttttaaaggggctgctggaaaactcaatcaaactgatttgaggagcagtttaggtacatactgccttttgtttagctttttgttttccttactcagtctaactgaggctaattttgcaacttcaataacacttcggagtaaaagaaggaaaatatttaacatgtttttggtttttttcatttcttgcttaaaacaaaaaggaaggttgtatttggggggactggtttgatttgatggaatttctttccctttggttcttatttctgggttgaaaccaataagttttaaaactaaagaatgggttaataagcttcagacagataactgcaactgaaaactgcacattaagtaaaaaaaaaaaaaaagaaaaaaaaaagaaaaagaaaaagaaaaaaaatcctattttgtctttgttgccagaaatcagtgtggtgtcaaacactccaaatgactgtcaagtataaattcttcttccacttcatttttggcagctgtttgttaaggcatctaataacagatgtgagaactgtaatgtgtacaatgtgtatgtgtccttggctgtcagtcccattgcagtttcaatgtgtgtttctatatgcagtatatactaagctaatgtagttgttttgtcctttgtcttatctgtgctctatctctagtccggagtggtacagtcccattcctgcagtcctagtgaatcagtgattcttgggggttagtgggttttgtgtggtggccttcctctgtaatgtcaccctatgctgcttctactgtctgtgaatcttccgttttaccttttaaaattcctgctgttgctttgctggtgtatattctccctacctctcctctctttccctccctttcccatctccccctctccctcctcttcattccttccccatccccaaaatctctttcattctcagagataaaaagactcttaactagctcaaggttaatggagccatttttcccacaacggaattctgggtatgactctgtcttctggagtgcaacacaaagcactgaagaataatgctcagatatattaaataaattgatgccatatagcctcagttgttaacattcccagagtcccttgtgctctacctataagcagtgggtgcttttctttggtttcctttcaggttggctgatggagcaatatataaagcaattaccagtgagacagaaaattctttcaaaggtcaaccaacatttttaagaaacaaaatgggaggggataatggaatctagaattgtcatatatatttgtttacttgtgcaatgctaatatagtaactcggctgtcctttgaatatcactgtgttgagtagattcctctaggacctttgatttcatgagttgggcccaaaccgtggtggaataataacaaaaagaagttaaatgccacaaattttaatagtgagcttacttgaaggatttaagtaggtttaggaggtgaagaaggccgatggagaaatttacagattaattttggaagctctactctagctatcgaacaatcaaaggaatgcacctatcagctacaaagaacagctagacagctgttttttttcttttataaatgtttctgtgttgtgtcaaaatgatttctggtgatttaaactaacagataatcacagctgctgtctaaattcatagtgttgaaaattacaaaatgaaaaaaaaaaaaaaaacacttcattacctgtgaagactgtgtctgtgtttttaactatttcttgtacaaatatatgaaaacttttatgaggagactggtgccaagtagctgaataatggggaaagggatattctgttcgtaaaaatcttagcagtgttaccaactctacgatatatatataaaaaaataattaaaacgttacaaagcgacagctatggtacatttgttttgtgtgaagctaaccggacctaacttcctgagtgcctggcttattttgaaacattttttttcattgaccattgataatgctgcaaatcagaaatgtacatacttcatttacaacagggttctttttatacttttgtagattctcatacatgtcacatacatggttgtctttatgtaacttaattttttcatccgcaggtgccattttcataataaacttctcttggatttgttact

SEQ ID NO: 9794 - protein, 920 aa, Homo sapiens; identical to SEQ ID NO: 1427

SEQ ID NO: 9795 - DNA, 2536 bp, Homo sapiens
gattttgtcacctgagactgctgttactctgaaaatgatagcattaacttgtctaattctgagaaagacatttgttagctaatgtagactattaatagagcaaacataaaactggttgggtattagcctagcaagtatctgaccagagcattatggcattacttagattacatagatattcagtaagatatttcaggtgtgatttctgcagtgaatacagtgtttacaccagaaaacaatgtcaggaatcctataatgtaatagggaatattattcaccatagtatattaaaagagaacggagccttgctgctgaaccaattttgatctcttcctttggtcttccttccttccttgtttctctctttcttattatttcataatgaaaaaaaagaatgctagactcaaatatttacagtgctttcagaattcaataaaatgcatacataaaaatgattttaatagtaccttgatactgaaaatattatctagctacttatcattgtggtctgatttttaaatttatttctcatcagacacaatacagagcaattcagagcaggtagaattctcctgtcagatgctcacacacaacttcagttgtgccagattctgccctcagcaatgtgagcaaacttcaaacagaaatgcacatgaatagttgaaggaaaatgctggatcccacctgttgcctcttctgggaagtaatatgtctataatgtttataaattttaataacccatacagcgctttatctttcaatattaaatttatattttcctaaagtttgacttctttgggcaatatattttattctctagtatcttagaaaatcaatctactaatgtatgtccattaataaataagtatgctcttatcaagcagttatcagcacatttataaaattacattgaaatcttcattttaaatatgatgttttcttcatctaactgaacgtgctgtgatctttattgagggctggaaacatatttgttgattctgacaaggtgaattgtattcgtgtttaccttctgctccccaagattataattgaaatgaatttttcaaaatagttccttttgatgaagatcccatactgatgaaagttaaatgaacagaagtattagtttgaaatagatacacgaatgtaagcccaacttataaattgattctagttgataatatcaagctacgcctgtaaaccttctgttaggtcttagaaacaataaatacacctcaatgcatggacaattgaaggaaaaaaaccttaacaagtaaaacacaatttttactcattggacttgagtttacaaaatgtaaggccagagttagagtttatggctttagtggacattttctggaactcattttactgtcactctctagttttgaaatagtttttggtagaattttggtgggaaaaaaggaaatacaaagaaagcagtatttgaatgatgacagagtcacatattctaaaccacacattctcactcctttgatttcagtttacaagcattgagaaaggagaaatcccgagatgctgctcgctcccgccggggaaaagaaaactttgagttctatgaattggccaagttgttgcctcttcctgcagccattaccagccagctcgacaaggcatccatcattcgacttacaattagctatctgaaaatgagggactttgctaaccagggggaccctccgtggaacttgcgaatggaaggccctccacctaacacatcagtaaaagttataggtgcacagcgaaggagaagccccagtgcactagccattgaagtatttgaagcacatttgggaagccacattttgcagtccctggatggctttgtatttgcactaaatcaggaaggaaaatttttgtacatttccgaaacagtctccatctacctaggcctctcacaagtggagctgacaggcagcagtgtctttgactatgtccaccccggagatcacgtggagatggctgagcagctgggcatgaagctcccccctgggcggggtctcctgtcacagggcactgctgaggacggagccagctcagcatcttcctcctctcagtcggagacccccgagccagtggtttgcttcccaccagcgagtgatcagtttcttctgtaggacccctgtcaggaagaacatgcctggatcctacttcagagagaactcagccagggcaaggggctcttgtggctttttgggtgggtgtgagttcatagaggggaaaatcaatactgtaccaggatttagacaatttagcaaaatgcatgaggcagtactttggatgatgaataactacagctgcatggctaacccattggttgtgtaaagtatgggttatcatgttttgtctaaattttcaggcaaaatctagcctgttttgtggcattaggatcatcattatagtagtatgatttttatgctattatacttacgctatgtcccgaatgtttttaaggccagcaaaatggaaacagtagagtacttgcctgaatgcaaataaacttcagtttcaactt

SEQ ID NO: 9796 - protein, 155 aa, Homo sapiens
MRDFANQGDPPWNLRMEGPPPNTSVKVIGAQRRRSPSALAIEVFEAHLGSHILQSLDGFVFALNQEGKFLYISETVSIYLGLSQVELTGSSVFDYVHPGDHVEMAEQLGMKLPPGRGLLSQGTAEDGASSASSSSQSETPEPVVCFPPASDQFLL

SEQ ID NO: 9797 - DNA, 501 bp, Homo sapiens
ccagccagatgctgtgaagtctccataaatctgtcagccgtcccagtgccgcgggcagtcacctgcggcgcccccttcccggcgctagagcggcccgcggagagacgcggagaagcaacgggaatctagcccggcagactgtacccgagggctgccgaagtcagacccaagcactacaggttgtgcggaacgcgaggacccctccctgtatccccaacctggaccgacccccggaagcctgctcctccgggtctacagggatgaaggtcagagtgtcaaattgcagattttggatcctcaataatgggccgctgtatttaacctcttcaacttcttttctccacttataagaaggaacaaaataaaatgttttgtggaagtttatattgaaatgaggtcaggtaaactaatgactgcttggtattttatgacaagttttataaccttggagttgccataactttcaaacgatcatcaataaagttttattgcaaaagggtc

SEQ ID NO: 9798 - protein, 71 aa, Homo sapiens
SGPRRDAEKQRESSPADCTRGLPKSDPSTTGCAEREDPSLYPQPGPTPGSLLLRVYRDEGQSVKLQILDPQ

SEQ ID NO: 9799 - DNA, 1250 bp, Homo sapiens
agggggaaccaaaaatatcgggctttgaaattctgtggattttcaaaggcggttcccaaccttgtcaaaaactacagtgggtgcgcgatctaatctggctcctataggtggcgctgtgacaaggtgcggtggccgggagaggcggctgggggactcgaagactgcgggaaattttctgcgactccgacgctaacccgctgctcccagcctccgcttcctgttttcgagggattagctaggactgtgcaacaccagtctccgctctcggagtcggcacgggggctggtgggtggcgggatgaactcggggaaggcgacaggctggaaacgcagctcctcgactttgcagcgcaccaaccccctatcgccccgtccgctgctcaggtgcgaggattcgccagacgccacaggactgggggcgactcgcaagggcatcatgccacctagaggaaacgcgcagtgagtgagccctgggtcactgaaaatgggagaacgttcgagtcggtcaagatgactccggcctgcgagttgattcagactcctcggaagccagaaattgggtctagagtgggttggtccctccgtcagcagttcgggcccagccgaagcttggggcctagagggcagacgtccggctctgatcagagtacagcgggctgggcctggcagcctgcaggcaacctggaccttgcaataaagctgcattcaacataactcagaccacagtgggagcccccgaagggcttcatgtgagtcccgaaaccagagtttagaggcgcggcctggttctcgtttatcttttccagacagcatttaggccaataaggtctttgaaaggaggcagccccaaagccctcaggccgacacctgagggcagggtctcaaacagctgtgcttgaagaaccggcaatcttgcttttcccacacgcagctgcacctctcctgagcgctgcagctgatggctgtatagtgaccacggactgcgtcctcctcacgaagctgcgcaacttctgctaatgctgcaaccctggcaagacgaaatccccctccctctggctagatcagcccagcctcccctcagggaccttcctgcccctccctacccctccctacccctaggccgctccccccttcctctgttgggatccgatccttgttcgctcttgcaatcccgcagcccggagttttgccccgtgcattaaaacatgttctctttcatttgcagatttaataaacaaacgtaaccatatc

SEQ ID NO: 9800 - protein, 67 aa, Homo sapiens
MTPACELIQTPRKPEIGSRVGWSLRQQFGPSRSLGPRGQTSGSDQSTAGWAWQPAGNLDLAIKLHST

SEQ ID NO: 9801 - DNA, 645 bp, Homo sapiens
ccctcccctgctctcgcaaggagaaagcgggcgacgagcgctcgcagcccgtggggctgatcccacctcccgcagggctccggtcgtgtcgctgtcggaccgcagaacgccgggacgcatttccgagctcgggcccgacccaacccgctgccattctagctacctagtggagccgcggagagactcttgaaccgtgaggctccttgatgagaaggtggagaggctgccgggctattctccgagcatcttccggccgagctctgctcctctccgtgcgcttgcggcttctccttgggctagcgcgtccgcagtccctccaagtccaggccgcagtcacccaggtggggagctagcctgaaagagacagcggaaggagtttcctggactgcgctgtcgctcaccgacccgcaccaatcaccatgcagcttgccctcggacccgccccttttagggcgtgtccccagtgagtgatagacggagccgccctgccctgctcagcccagcccacgttgctgcttagattgaaatgcagaactcaagcctctttcatcggggcacagacttccttttacttcttccttttgccctctcgcctcctcctcctgggaagaagcggaggcgccggcggtcggccgggatagcaac

SEQ ID NO: 9802 - protein, 48 aa, Homo sapiens
MRRWRGCRAILRASSGRALLLSVRLRLLLGLARPQSLQVQAAVTQVGS

SEQ ID NO: 9803 - DNA, 1847 bp, Homo sapiens
cccaggtggggagctagcctgaaagagacagcggaaggagtttcctggactgcgctgtcgctcaccgacccgcaccaatcaccatgcagcttgccctcggacccgccccttttagggcgtgtccccagtgagtgatagacggagccgccctgccctgctcagcccagcccacgttgctgcttagattgaaatgcagaactcaagcctctttcatcggggcacagacttccttttacttcttccttttgccctctcgcctcctcctcctgggaagaagcggaggcgccggcggtcggccgggatagcaacaggccgggccactgaggcggtgcggaaagtttctgtctgggagtgcggaactggggccgggttggtgtactgctcggagcaatggagccagccttcggggaggtgaaccagctgggaggagtgttcgtgaacgggaggccgctgcccaacgccatccggcttcgcatcgtggaactggcccaactgggcatccgaccgtgtgacatcagccgccagctacgggtctcgcacggctgcgtcagcaagatcctggcgcgatacaacgagacgggctcgatcttgccaggagccatcgggggcagcaagccccgggtcactacccccaccgtggtgaaacacatccggacctacaagcagagagaccccggcatcttcgcctgggagatccgggaccgcctgctggcggacggcgtgtgcgacaagtacaatgtgccctccgtgagctccatcagccgcattctgcgcaacaagatcggcaacttggcccagcagggtcattacgactcatacaagcagcaccagccgacgccgcagccagcgctgccctacaaccacatctactcgtaccccagccctatcacggcggcggccgccaaggtgcccacgccacccggggtgcctgccatccccggttcggtggccatgccgcgcacctggccctcctcgcactccgtcaccgacatcctgggcatccgctccatcaccgaccaagtgagcgacagctccccctaccacagccccaaggtggaggagtggagcagcctgggccgcaacaacttccccgccgccgccccgcacgcggtgaacgggttggagaagggagccctggagcaggaagccaagtacggtcaggcaccaaatggtctcccagctgtgggcagttttgtgtcagcatccagcatggctccttaccctaccccagcccaagtgtcgccttacatgacctacagtgctgctccttctggttatgttgctggacatgggtggcaacatgctgggggcacctcattgtctccccacaactgtgacattccggcatcgctggcgttcaagggaatgcaggcagccagagaaggtagtcattctgtcacggcttccgcgctctgatgggaaattccgtctccagcagcttcacccgggtctccctgtctcagcacctcctcccccaattcccaggtctcacatcccacccctcctgccctccaacccttctgccttgaaagctggctgtacggactcacatcctttgtgctaatgacacttacatatttcttgccataacttttctcttgcagaaaaactgacatgactttaggatttaaaaacaagagcaacaataagcattgaatgagacatttgtgttgcccacatactgtcttaacataacaaagaaacctacacccctcaaagggtttaaggaactttacaaactagtctttggtaaaaccacatgtgtatatttattctaaatcaacctgaacttttgaaatgtgcaattgttgagattttgcaaaatcaataaaggaaaatacttatag

SEQ ID NO: 9804 - protein, 341 aa, Homo sapiens; identical to SEQ ID NO: 1429

SEQ ID NO: 9805 - DNA, 2768 bp, Homo sapiens
cccaggtggggagctagcctgaaagagacagcggaaggagtttcctggactgcgctgtcgctcaccgacccgcaccaatcaccatgcagcttgccctcggacccgccccttttagggcgtgtccccagtgagtgatagacggagccgccctgccctgctcagcccagcccacgttgctgcttagattgaaatgcagaactcaagcctctttcatcggggcacagacttccttttacttcttccttttgccctctcgcctcctcctcctgggaagaagcggaggcgccggcggtcggccgggatagcaacaggccgggccactgaggcggtgcggaaagtttctgtctgggagtgcggaactggggccgggttggtgtactgctcggagcaatggagccagccttcggggaggtgaaccagctgggaggagtgttcgtgaacgggaggccgctgcccaacgccatccggcttcgcatcgtggaactggcccaactgggcatccgaccgtgtgacatcagccgccagctacgggtctcgcacggctgcgtcagcaagatcctggcgcgatacaacgagacgggctcgatcttgccaggagccatcgggggcagcaagccccgggtcactacccccaccgtggtgaaacacatccggacctacaagcagagagaccccggcatcttcgcctgggagatccgggaccgcctgctggcggacggcgtgtgcgacaagtacaatgtgccctccgtgagctccatcagccgcattctgcgcaacaagatcggcaacttggcccagcagggtcattacgactcatacaagcagcaccagccgacgccgcagccagcgctgccctacaaccacatctactcgtaccccagccctatcacggcggcggccgccaaggtgcccacgccacccggggtgcctgccatccccggttcggtggccatgccgcgcacctggccctcctcgcactccgtcaccgacatcctgggcatccgctccatcaccgaccaagtgagcgacagctccccctaccacagccccaaggtggaggagtggagcagcctgggccgcaacaacttccccgccgccgccccgcacgcggtgaacgggttggagaagggagccctggagcaggaagccaagtacggtcaggcaccaaatggtctcccagctgtgggcagttttgtgtcagcatccagcatggctccttaccctaccccagcccaagtgtcgccttacatgacctacagtgctgctccttctggttatgttgctggacatgggtggcaacatgctgggggcacctcattgtctccccacaactgtgacattccggcatcgctggcgttcaagggaatgcaggcagccagagaaggtagtcattctgtcacggcttccgcgctctgatgggaaattccgtctccagcagcttcacccgggtctccctgtctcagcacctcctcccccaattcccaggtctcacatcccacccctcctgccctccaacccttctgccttgaaagctggctgtacggactcacatcctttgtgctaatgacacttacatatttcttgccataacttttctcttgcagaaaaactgacatgactttaggatttaaaaacaagagcaacaataagcattgaatgagacatttgtgttgcccacatactgtcttaacataacaaagaaacctacacccctcaaagggtttaaggaactttacaaactagtctttggtaaaaccacatgtgtatatttattctaaatcaacctgaacttttgaaatgtgcaattgttgagattttgcaaaatcaataaaggaaaatacttatagaaaaaattatgctacaccctctaatcaaatatggtaaccaagtaagctttaattcatcattaggaaacaaatcaataagtgacttgtttgagtgatcctttgtttaagacatgacctattttgttgaaaaatatatgtagaacccaagcaatatctgaatctagctctccctggtgttttgacttggttccaaatacaataatgtttatattttctattagtttgtaaatacggactctggatggtgcatttgtgtcttcattccataagatattcccctcccctcagccccaccccctctctatttttttctttcttttttgcaaaggtgactttctggcaacgtctttgtctctgtttggtggtgggctgctcgggctcctggacctggacttgcccccaaattttgtgtatgcagtgaaggcttcaacatctcatgaaggacactttatttctacagcagaggacacgaaaaacagataaaacaagccagtctcccattttgtacctaatcaaacaacacacatgctaagcatataaagacaagagggtggaaaatatctgaacaagaaggctctaaaggaagtcacttagaaacttaagtttaatgtgaaatgttttgcaaagatgcttaaaatgaactttgtgttaagaaaaccactgtgaaactaaattgtcctattattgttggcttacctgtgtgttcagcaatctcagccccaaataatgttgtaatttaaagaaaatggaaaattctgctctaatgaatgtaacaatggcttgctgtgaagtttacattgttgtacagaagcatgtttcgcatgtaggtaaactggtggtggtactagaaatacaatgttatttaattttaacaaattccctttattcatttctgaaattacaggacacagtttaactcat

SEQ ID NO: 9806 - protein, 341 aa, Homo sapiens; identical to SEQ ID NO: 1429

SEQ ID NO: 9807 - DNA, 1068 bp, Homo sapiens
agtgcaggcacccttagtgagcgacagctccccctaccacagccccaaggtggaggagtggagcagcctgggccgcaacaacttccccgccgccgccccgcacgcggtgaacgggttggagaagggagccctggagcaggaagccaagtacggtcagatccaaaactttttcttgcttatgatatcgaggttgaaattctaggtgaagcacatctctatttgtggctaaatctactttattataaagccaaggtagaagatagtttgctatagagagcacccttgcacagttctttcaggggaaagaattctcatgcctttcatggaagatccacatgagaaaggagttgatggattgaagtcttatttatggaatctttaggcaccaaatggtctcccagctgtgggcagttttgtgtcagcatccagcatggctccttaccctaccccagcccaagtgtcgccttacatgacctacagtgctgctccttctggttatgttgctggacatgggtggcaacatgctgggggcacctcattgtctccccacaactgtgacattccggcatcgctggcgttcaagggaatgcaggcagccagagaaggtagtcattctgtcacggcttccgcgctctgatgggaaattccgtctccagcagcttcacccgggtctccctgtctcagcacctcctcccccaattcccaggtctcacatcccacccctcctgccctccaacccttctgccttgaaagctggctgtacggactcacatcctttgtgctaatgacacttacatatttcttgccataacttttctcttgcagaaaaactgacatgactttaggatttaaaaacaagagcaacaataagcattgaatgagacatttgtgttgcccacatactgtcttaacataacaaagaaacctacacccctcaaagggtttaaggaactttacaaactagtctttggtaaaaccacatgtgtatatttattctaaatcaacctgaacttttgaaatgtgcaattgttgagattttgcaaaatcaataaaggaaaatacttatag

SEQ ID NO: 9808 - protein, 62 aa, Homo sapiens
MESLGTKWSPSCGQFCVSIQHGSLPYPSPSVALHDLQCCSFWLCCWTWVATCWGHLIVSPQL

SEQ ID NO: 9809 - DNA, 670 bp, Homo sapiens
caacaacttccccgccgccgccccgcacgcggtgaacgggttggagaagggagccctggagcaggaagccaagtacggtcaggcaccaaatggtctcccagctgtgggcagttttgtggcaacatgctgggggcacctcattgtctccccacaactgtgacattccggcatcgctggcgttcaagggaatgcaggcagccagagaaggtagtcattctgtcacggcttccgcgctctgatgggaaattccgtctccagcagcttcacccgggtctccctgtctcagcacctcctcccccaattcccaggtctcacatcccacccctcctgccctccaacccttctgccttgaaagctggctgtacggactcacatcctttgtgctaatgacacttacatatttcttgccataacttttctcttgcagaaaaactgacatgactttaggatttaaaaacaagagcaacaataagcattgaatgagacatttgtgttgcccacatactgtcttaacataacaaagaaacctacacccctcaaagggtttaaggaactttacaaactagtctttggtaaaaccacatgtgtatatttattctaaatcaacctgaacttttgaaatgtgcaattgttgagattttgcaaaatcaataaaggaaaatacttatag

SEQ ID NO: 9810 - protein, 49 aa, Homo sapiens
MVSQLWAVLWQHAGGTSLSPHNCDIPASLAFKGMQAAREGSHSVTASAL

SEQ ID NO: 9811 - DNA, 5747 bp, Homo sapiens
acttcgcctcgcagctccccttcccatcaccgccccctgctcctccccggcgtctgcgattttcccaggcacccggtgtgagtgcggcgtgcgtgtgagtgtgtgtcagggtattgtgttgtgggagagtgtgtgagtgtgtgtgagtgtgtgtgtgcatgagtgtgtggagtgcggggctcctgcgctccgctcgccgccgccgccggggaaggacagacggacggcgcttcctccttcggcgagcggttcccgggcacctcggcttggcccgggcgcgagtggagcgcgcctggctggccgccggcctcctgaaggtcccgttgcgtaccccctgggctggatatgttcatgttcacgtgaagatggatttactgtacggtctcgtgtggctgctgacagtcctcctggaggggatctctggccaaggagtgtacgctcctcccacggttcgtattgtgcactcaggcttggcctgtaacattgaagaggagcgctactccgaaagggtctacactatccgggaaggagaaacccttgagttgacttgtctagtcacaggacatccacgtccacagatcaggtggaccaaaacagcaggaagtgcctctgacagattccaagactcaagtgtcttcaatgagactttgaggattacaaatattcagcgacaccaaggaggccggtattactgtaaagcagagaatggcttggggtctccagcgataaagtcaatcagagtggatgtatactatttggatgatccagtagtaactgttcatcaaagtataggtgaagctaaagaacaattttactatgagagaacagtgttcctccggtgtgttgccaattccaatcctcctgttcggtatagctggagacgtggccaggaggtcttgctgcaaggatctgataaaggagttgagatttatgaaccattctttacccagggtgaaacaaagatcttaaaactaaagaatcttcgacctcaggactatgctaattatagctgcattgcttcagtgaggaatgtatgtaatattcctgataagatggtgtcgtttagactgtccaataaaacagcatcaccgtcaattaaactcttggtggatgatcctatagttgtaaatcctggagaggccataacattagtatgtgttacaacaggaggagagcctgcaccttctctcacctgggtcaggtcctttgggactctgcctgaaaagactgttttgaatggaggaactttgaccatacctgccatcacctcagatgatgctggtacttacagctgcattgccaataataatgtgggaaaccctgcaaaaaagtccaccaacatcattgtgagagcattaaaaaaaggacgattttggatcacaccagatccttatcacaaagatgacaacatccagattggccgtgaggtgaaaatatcttgccaagtagaagctgttccttctgaggagctaacatttagttggtttaaaaatggtcgtccattaagaagttctgagcggatggtcattacacagactgatcctgatgtctctccgggaacaacaaacttggacatcattgatttaaaattcacggattttgggacgtacacatgtgtagcatctctgaagggaggaggaatatctgatatcagtatcgatgttaatatatccagcagcacagttccacccaatctgactgttccacaggaaaaatcaccattggtcaccagagaaggagacacaatagaactgcaatgtcaagtaactggcaaacctaaaccaatcatcctttggtctagagcggataaagaagttgcaatgcctgatggatcaatgcaaatggagagttatgatggaacactgaggattgtgaatgtatctagggaaatgtcaggaatgtacagatgtcagaccagccaatacaatggatttaacgtgaaaccaagggaagccttggtgcagctcatcgttcagtatccccctgcagtggaaccagcattcttggaaatccggcaaggacaggatcgaagtgtcactatgagttgcagagtactgagagcctatccaatacgggtgctgacctatgagtggcgcttgggcaataaattattacggacgggtcaatttgactctcaggaatacacagagtacgctgtgaagagtctttccaatgaaaactatggggtttataactgtagcatcataaatgaagctggagctgggagatgcagctttcttgttacaggaaaggcctatgctccagaattctattatgatacctacaatccagtatggcagaacagacaccgtgtttattcttacagtctacagtggacacagatgaatcctgatgcagtggatcggattgttgcataccggttgggcatcaggcaggctggacagcagcgctggtgggagcaggagattaaaataaatgggaatattcaaaagggagaattaattacatataacttgacagagctaattaaaccagaagcttatgaagtccgactgactcctctcaccaaatttggtgaaggagattcaacaattcgtgtgatcaaatatagtgctcctgtaaatcctcatttgagagaatttcattgtggatttgaagatggtaatatttgtttgttcactcaagatgatacagataattttgactggacaaagcaaagtacagcaacaagaaatacaaaatatactcctaatacaggacctaatgctgaccgtagtggctccaaagaaggtttttatatgtacattgagacatcacgacccagattggaaggcgaaaaggctcgacttctcagccctgttttcagcatagctcccaaaaacccttatggacccacaaacactgcatattgtttcagcttcttttatcacatgtatggacaacatataggtgtcttaaatgtttatctacgtttgaaagggcaaacaacaatagagaatccactgtggtcttcaagtgggaataaaggacaaagatggaatgaggctcatgttaatatatacccaattacttcatttcagctcatttttgaaggtatccgaggtcctggaatagaaggtgacattgctattgatgatgtatcaattgcagaaggagaatgtgcaaaacaagacctagcaactaagaattccgttgatggtgctgttgggattttggttcatatatggctttttcccattatcgtcctcatctctatcttaagtcctcgaaggtgaccttatcctggcagaggctataaaagattcaccaggcactggcatgaagaaagagtctttgtaaatggacattgaacaaacaaactaccaaagattcctccactgactactgactcaaaaataaaataataaaaacaaatttttttaagcactggggataaaaagacatcatggaagtataacttattccagactaaacataaaagataatcttgacctgagtagagaagagaccttcaggtgcttttgtggctaaaaagattacagcgtcatctggttgaactctggaaaaaaaaaaaaaaatgaaaaaaagaaaaaaaaaagagctatagaaatccttgtcaaagcacaaagtcatggctggttttgtttcaaatgaatagtttgcttgttaccatggaaacctaatggcctgccaacaaaaacctcactgtaaacagggtacgtgaagagctggcatttattttccttacgagaaggttttcgtagagaattaaataaatgtaggcccttttacctttggctgttacccttccttgaaaataacccgaactcagaattatttaaagcattcatgtttctccccaccttatccccatcccacctttattattattatttttctcccatggctaagctagataactgtatgctgtctctttttgcatgcactactatccaggatggtaaacctgggcttacatgttacacaggcttatcggagtttgcttgcggccacttgaacacccaaactacgtcatctgttccaatgaagaaaccaaaccaccatcttttataaattgccatggaaaccaagtgccttcaatgaaacaagcctgaataattttcaactcagaagcttgcactgctaagagtggtttgtgtaaaactattttataaacaaactacagagcctaaatgtgcaaattacaggcaagacaacaaagccgcttctgaagaagaaaggaccgaagctgctgcgtaagcccatgcagacaagatatttgttgtttaacctcctagacagccatggcctttcggcttattgtccattagaaaatcacttccattgagaccagacatggagcaacactttttttcttccaggttattaaatgggtcaaccagagcaaaaggttattaagaatacttagtgcagaaggtggtaaaacacaaaagtgatttttttactctaacctccatttgaaatgaaattggccctagctttagagggaacaagaaaatgtttgggattgcagtgcatactaactctacagtggaactgggcctgaaaaatctggctttattctaaactctgagggtaatatgcctctgccctttagtcagactctgtgcaaattgtgaaatattattttattattttaccaagattataaaaacacttttacaaaaaaacaaaaacctgtaaaaataattttgagctacctgacgacaaatcatatctttaaccagccagttttccaatgcattgtaaatttcacttaaacctgttggttatgaaaatttgaagatcattttccttaaattatctcagcttttaacttcatttaaaaagacttttgtctaagaagaatattattattatatgttctttcaacaccccaggattaaaaaaactgattatgcaagcaattggaatataagtattaaattatagcatttgcaaatattaatataaaagcacaacaaaatgtagtggaaaatgacaaagcttgttttttaaaacaattctgtagaaatgtttgtgcaaattcagtaattcaacttaaaatataattttacagctatgttcaataaagcctctttccaggtaaggtatgacaagcagtatgtgtgtttgttgagcaatgttcacttatcactaaaatgaaattagttatacaatttattggttaccatgggataaatcttcagtgctccacataccttaatgtctgcagaaagaaattttaataggaactccctgatgcactcccctatattgtaatacatgcagaaagcagttaaacctttgaaggtaaaatatgaaacatatatgaacctggaatttaatgtctattttcagtcagttcaaaaggggaccagtttgaatatttaggtagtgatggaattgatctgaaccaagtcctttaaattaaacataataaacaaatgagtttcataacttatttgaatgaattagacatcttaaaattttttcagagtttcacagtaacccatatactttatcagaccaaagagattcaagtacacaatatctggggcatttcttttacgttttacaaaatttctcttcaccttgacttccattttgtggcaactagccccttttctccactatctcttatcagtagatcaccctttttaattgattttcagcactctcattcctgataatagcaatgaaaatgttttagatctaaaaggagactcttaactcattgcctctccctcccttgatctttaagttgatttcagtgaggcttttgc

SEQ ID NO: 9812 - protein, 1025 aa, Homo sapiens
MSVWSAGLLRSARRRRRGRTDGRRFLLRRAVPGHLGLARARVERAWLAAGLLKVPLRTPWAGYVHVHVKMDLLYGLVWLLTVLLEGISGQGVYAPPTVRIVHSGLACNIEEERYSERVYTIREGETLELTCLVTGHPRPQIRWTKTAGSASDRFQDSSVFNETLRITNIQRHQGGRYYCKAENGLGSPAIKSIRVDVYYLDDPVVTVHQSIGEAKEQFYYERTVFLRCVANSNPPVRYSWRRGQEVLLQGSDKGVEIYEPFFTQGETKILKLKNLRPQDYANYSCIASVRNVCNIPDKMVSFRLSNKTASPSIKLLVDDPIVVNPGEAITLVCVTTGGEPAPSLTWVRSFGTLPEKTVLNGGTLTIPAITSDDAGTYSCIANNNVGNPAKKSTNIIVRALKKGRFWITPDPYHKDDNIQIGREVKISCQVEAVPSEELTFSWFKNGRPLRSSERMVITQTDPDVSPGTTNLDIIDLKFTDFGTYTCVASLKGGGISDISIDVNISSSTVPPNLTVPQEKSPLVTREGDTIELQCQVTGKPKPIILWSRADKEVAMPDGSMQMESYDGTLRIVNVSREMSGMYRCQTSQYNGFNVKPREALVQLIVQYPPAVEPAFLEIRQGQDRSVTMSCRVLRAYPIRVLTYEWRLGNKLLRTGQFDSQEYTEYAVKSLSNENYGVYNCSIINEAGAGRCSFLVTGKAYAPEFYYDTYNPVWQNRHRVYSYSLQWTQMNPDAVDRIVAYRLGIRQAGQQRWWEQEIKINGNIQKGELITYNLTELIKPEAYEVRLTPLTKFGEGDSTIRVIKYSAPVNPHLREFHCGFEDGNICLFTQDDTDNFDWTKQSTATRNTKYTPNTGPNADRSGSKEGFYMYIETSRPRLEGEKARLLSPVFSIAPKNPYGPTNTAYCFSFFYHMYGQHIGVLNVYLRLKGQTTIENPLWSSSGNKGQRWNEAHVNIYPITSFQLIFEGIRGPGIEGDIAIDDVSIAEGECAKQDLATKNSVDGAVGILVHIWLFPIIVLISILSPRR

SEQ ID NO: 9813 - DNA, 4787 bp, Homo sapiens
gataatcgttcctgaaaaaaacaaacaaacaaaaaaaatcaccattccttttaatagcttgagcctgtaccagaatgataagtggaaattagtcctcaaagtaacctcagctgtttcattattgtgtgcctcgagcatctggttattcaagctcctcccacggttcgtattgtgcactcaggcttggcctgtaacattgaagaggagcgctactccgaaagggtctacactatccgggaaggagaaacccttgagttgacttgtctagtcacaggacatccacgtccacagatcaggtggaccaaaacagcaggaagtgcctctgacagattccaagactcaagtgtcttcaatgagactttgaggattacaaatattcagcgacaccaaggaggccggtattactgtaaagcagagaatggcttggggtctccagcgataaagtcaatcagagtggatgtatactatttggatgatccagtagtaactgttcatcaaagtataggtgaagctaaagaacaattttactatgagagaacagtgttcctccggtgtgttgccaattccaatcctcctgttcggtatagctggagacgtggccaggaggtcttgctgcaaggatctgataaaggagttgagatttatgaaccattctttacccagggtgaaacaaagatcttaaaactaaagaatcttcgacctcaggactatgctaattatagctgcattgcttcagtgaggaatgtatgtaatattcctgataagatggtgtcgtttagactgtccaataaaacagcatcaccgtcaattaaactcttggtggatgatcctatagttgtaaatcctggagaggccataacattagtatgtgttacaacaggaggagagcctgcaccttctctcacctgggtcaggtcctttgggactctgcctgaaaagactgttttgaatggaggaactttgaccatacctgccatcacctcagatgatgctggtacttacagctgcattgccaataataatgtgggaaaccctgcaaaaaagtccaccaacatcattgtgagagcattaaaaaaaggacgattttggatcacaccagatccttatcacaaagatgacaacatccagattggccgtgaggtgaaaatatcttgccaagtagaagctgttccttctgaggagctaacatttagttggtttaaaaatggtcgtccattaagaagttctgagcggatggtcattacacagactgatcctgatgtctctccgggaacaacaaacttggacatcattgatttaaaattcacggattttgggacgtacacatgtgtagcatctctgaagggaggaggaatatctgatatcagtatcgatgttaatatatccagcagcacagttccacccaatctgactgttccacaggaaaaatcaccattggtcaccagagaaggagacacaatagaactgcaatgtcaagtaactggcaaacctaaaccaatcatcctttggtctagagcggataaagaagttgcaatgcctgatggatcaatgcaaatggagagttatgatggaacactgaggattgtgaatgtatctagggaaatgtcaggaatgtacagatgtcagaccagccaatacaatggatttaacgtgaaaccaagggaagccttggtgcagctcatcgttcagtatccccctgcagtggaaccagcattcttggaaatccggcaaggacaggatcgaagtgtcactatgagttgcagagtactgagagcctatccaatacgggtgctgacctatgagtggcgcttgggcaataaattattacggacgggtcaatttgactctcaggaatacacagagtacgctgtgaagagtctttccaatgaaaactatggggtttataactgtagcatcataaatgaagctggagctgggagatgcagctttcttgttacaggaaaggcctatgctccagaattctattatgatacctacaatccagtatggcagaacagacaccgtgtttattcttacagtctacagtggacacagatgaatcctgatgcagtggatcggattgttgcataccggttgggcatcaggcaggctggacagcagcgctggtgggagcaggagattaaaataaatgggaatattcaaaagggagaattaattacatataacttgacagagctaattaaaccagaagcttatgaagtccgactgactcctctcaccaaatttggtgaaggagattcaacaattcgtgtgatcaaatatagtgctcctgtaaatcctcatttgagagaatttcattgtggatttgaagatggtaatatttgtttgttcactcaagatgatacagataattttgactggacaaagcaaagtacagcaacaagaaatacaaaatatactcctaatacaggacctaatgctgaccgtagtggctccaaagaaggtttttatatgtacattgagacatcacgacccagattggaaggcgaaaaggctcgacttctcagccctgttttcagcatagctcccaaaaacccttatggacccacaaacactgcatattgtttcagcttcttttatcacatgtatggacaacatataggtgtcttaaatgtttatctacgtttgaaagggcaaacaacaatagagaatccactgtggtcttcaagtgggaataaaggacaaagatggaatgaggctcatgttaatatatacccaattacttcatttcagctcatttttgaaggtatccgaggtcctggaatagaaggtgacattgctattgatgatgtatcaattgcagaaggagaatgtgcaaaacaagacctagcaactaagaattccgttgatggtgctgttgggattttggttcatatatggctttttcccattatcgtcctcatctctatcttaagtcctcgaaggtgaccttatcctggcagaggctataaaagattcaccaggcactggcatgaagaaagagtctttgtaaatggacattgaacaaacaaactaccaaagattcctccactgactactgactcaaaaataaaataataaaaacaaatttttttaagcactggggataaaaagacatcatggaagtataacttattccagactaaacataaaagataatcttgacctgagtagagaagagaccttcaggtgcttttgtggctaaaaagattacagcgtcatctggttgaactctggaaaaaaaaaaaaaaatgaaaaaaagaaaaaaaaaagagctatagaaatccttgtcaaagcacaaagtcatggctggttttgtttcaaatgaatagtttgcttgttaccatggaaacctaatggcctgccaacaaaaacctcactgtaaacagggtacgtgaagagctggcatttattttccttacgagaaggttttcgtagagaattaaataaatgtaggcccttttacctttggctgttacccttccttgaaaataacccgaactcagaattatttaaagcattcatgtttctccccaccttatccccatcccacctttattattattatttttctcccatggctaagctagataactgtatgctgtctctttttgcatgcactactatccaggatggtaaacctgggcttacatgttacacaggcttatcggagtttgcttgcggccacttgaacacccaaactacgtcatctgttccaatgaagaaaccaaaccaccatcttttataaattgccatggaaaccaagtgccttcaatgaaacaagcctgaataattttcaactcagaagcttgcactgctaagagtggtttgtgtaaaactattttataaacaaactacagagcctaaatgtgcaaattacaggcaagacaacaaagccgcttctgaagaagaaaggaccgaagctgctgcgtaagcccatgcagacaagatatttgttgtttaacctcctagacagccatggcctttcggcttattgtccattagaaaatcacttccattgagaccagacatggagcaacactttttttcttccaggttattaaatgggtcaaccagagcaaaaggttattaagaatacttagtgcagaaggtggtaaaacacaaaagtgatttttttactctaacctccatttgaaatgaaattggccctagctttagagggaacaagaaaatgtttgggattgcagtgcatactaactctacagtggaactgggcctgaaaaatctggctttattctaaactctgagggtaatatgcctctgccctttagtcagactctgtgcaaattgtgaaatattattttattattttaccaagattataaaaacacttttacaaaaaaacaaaaacctgtaaaaataattttgagctacctgacgacaaatcatatctttaaccagccagttttccaatgcattgtaaatttcacttaaacctgttggttatgaaaatttgaagatcattttccttaaattatctcagcttttaacttcatttaaaaagacttttgtctaagaagaatattattattatatgttctttcaacaccccaggattaaaaaaactgattatgcaagcaattggaatataagtattaaattatagcatttgcaaatattaatataaaagcacaacaaaatgtagtggaaaatgacaaagcttgttttttaaaacaattctgtagaaatgtttgtgcaaattcagtaattcaacttaaaatataattttacagctatgttcaataaagcctctttccaggtaaggt

SEQ ID NO: 9814 - protein, 727 aa, Homo sapiens; identical to SEQ ID NO: 1431

SEQ ID NO: 9815 - DNA, 5074 bp, Homo sapiens
acttcgcctcgcagctccccttcccatcaccgccccctgctcctccccggcgtctgcgattttcccaggcacccggtgtgagtgcggcgtgcgtgtgagtgtgtgtcagggtattgtgttgtgggagagtgtgtgagtgtgtgtgagtgtgtgtgtgcatgagtgtgtggagtgcggggctcctgcgctccgctcgccgccgccgccggggaaggacagacggacggcgcttcctccttcggcgagcggttcccgggcacctcggcttggcccgggcgcgagtggagcgcgcctggctggccgccggcctcctgaaggtcccgttgcgtaccccctgggctggatatgttcatgttcacgtgaagatggatttactgtacggtctcgtgtggctgctgacagtcctcctggaggggatctctggccaaggagtgtacgctcctcccacggttcgtattgtgcactcaggcttggcctgtaacattgaagaggagcgctactccgaaagggtctacactatccgggaaggagaaacccttgagttgacttgtctagtcacaggacatccacgtccacagatcaggtggaccaaaacagcaggaagtgcctctgacagattccaagactcaagtgtcttcaatgagactttgaggattacaaatattcagcgacaccaaggaggccggtattactgtaaagcagagaatggcttggggtctccagcgataaagtcaatcagagtggatgtatactatttggatgatccagtagtaactgttcatcaaagtataggtgaagctaaagaacaattttactatgagagaacagtgttcctccggtgtgttgccaattccaatcctcctgttcggtatagctggagacgtggccaggaggtcttgctgcaaggatctgataaaggagttgagatttatgaaccattctttacccagggtgaaacaaagatcttaaaactaaagaatcttcgacctcaggactatgctaattatagctgcattgcttcagtgaggaatgtatgtaatattcctgataagatggtgtcgtttagactgtccaataaaacagcatcaccgtcaattaaactcttggtggatgatcctatagttgtaaatcctggagaggccataacattagtatgtgttacaacaggaggagagcctgcaccttctctcacctgggtcaggtcctttgggactctgcctgaaaagactgttttgaatggaggaactttgaccatacctgccatcacctcagatgatgctggtacttacagctgcattgccaataataatgtgggaaaccctgcaaaaaagtccaccaacatcattgtgagagcattaaaaaaaggacgattttggatcacaccagatccttatcacaaagatgacaacatccagattggccgtgaggtgaaaatatcttgccaagtagaagctgttccttctgaggagctaacatttagttggtttaaaaatggtcgtccattaagaagttctgagcggatggtcattacacagactgatcctgatgtctctccgggaacaacaaacttggacatcattgatttaaaattcacggattttgggacgtacacatgtgtagcatctctgaagggaggaggaatatctgatatcagtatcgatgttaatatatccagcagcacagttccacccaatctgactgttccacaggaaaaatcaccattggtcaccagagaaggagacacaatagaactgcaatgtcaagtaactggcaaacctaaaccaatcatcctttggtctagagcggataaagaagttgcaatgcctgatggatcaatgcaaatggagagttatgatggaacactgaggattgtgaatgtatctagggaaatgtcaggaatgtacagatgtcagaccagccaatacaatggatttaacgtgaaaccaagggaagccttggtgcagctcatcgttcagtatccccctgcagtggaaccagcattcttggaaatccggcaaggacaggatcgaagtgtcactatgagttgcagagtactgagagcctatccaatacgggtgctgacctatgagtggcgcttgggcaataaattattacggacgggtcaatttgactctcaggaatacacagagtacgctgtgaagagtctttccaatgaaaactatggggtttataactgtagcatcataaatgaagctggagctgggagatgcagctttcttgttacaggaaaggcctatgctccagaattctattatgatacctacaatccagtatggcagaacagacaccgtgtttattcttacagtctacagtggacacagatgaatcctgatgcagtggatcggattgttgcataccggttgggcatcaggcaggctggacagcagcgctggtgggagcaggagattaaaataaatgggaatattcaaaagggagaattaattacatataacttgacagagctaattaaaccagaagcttatgaagtccgactgactcctctcaccaaatttggtgaaggagattcaacaattcgtgtgatcaaatatagtgctcctgtaaatcctcatttgagagaatttcattgtggatttgaagatggtaatatttgtttgttcactcaagatgatacagataattttgactggacaaagcaaagtacagcaacaagaaatacaaaatatactcctaatacaggacctaatgctgaccgtagtggctccaaagaaggtttttatatgtacattgagacatcacgacccagattggaaggcgaaaaggctcgacttctcagccctgttttcagcatagctcccaaaaacccttatggacccacaaacactgcatattgtttcagcttcttttatcacatgtatggacaacatataggtgtcttaaatgtttatctacgtttgaaagggcaaacaacaatagagaatccactgtggtcttcaagtgggaataaaggacaaagatggaatgaggctcatgttaatatatacccaattacttcatttcagctcatttttgaaggtatccgaggtcctggaatagaaggtgacattgctattgatgatgtatcaattgcagaaggagaatgtgcaaaacaagacctagcaactaagaattccgttgatggtgctgttgggattttggttcatatatggctttttcccattatcgtcctcatctctatcttaagtcctcgaaggtgaccttatcctggcagaggctataaaagattcaccaggcactggcatgaagaaagagtctttgtaaatggacattgaacaaacaaactaccaaagattcctccactgactactgactcaaaaataaaataataaaaacaaatttttttaagcactggggataaaaagacatcatggaagtataacttattccagactaaacataaaagataatcttgacctgagtagagaagagaccttcaggtgcttttgtggctaaaaagattacagcgtcatctggttgaactctggaaaaaaaaaaaaaaatgaaaaaaagaaaaaaaaaagagctatagaaatccttgtcaaagcacaaagtcatggctggttttgtttcaaatgaatagtttgcttgttaccatggaaacctaatggcctgccaacaaaaacctcactgtaaacagggtacgtgaagagctggcatttattttccttacgagaaggttttcgtagagaattaaataaatgtaggcccttttacctttggctgttacccttccttgaaaataacccgaactcagaattatttaaagcattcatgtttctccccaccttatccccatcccacctttattattattatttttctcccatggctaagctagataactgtatgctgtctctttttgcatgcactactatccaggatggtaaacctgggcttacatgttacacaggcttatcggagtttgcttgcggccacttgaacacccaaactacgtcatctgttccaatgaagaaaccaaaccaccatcttttataaattgccatggaaaccaagtgccttcaatgaaacaagcctgaataattttcaactcagaagcttgcactgctaagagtggtttgtgtaaaactattttataaacaaactacagagcctaaatgtgcaaattacaggcaagacaacaaagccgcttctgaagaagaaaggaccgaagctgctgcgtaagcccatgcagacaagatatttgttgtttaacctcctagacagccatggcctttcggcttattgtccattagaaaatcacttccattgagaccagacatggagcaacactttttttcttccaggttattaaatgggtcaaccagagcaaaaggttattaagaatacttagtgcagaaggtggtaaaacacaaaagtgatttttttactctaacctccatttgaaatgaaattggccctagctttagagggaacaagaaaatgtttgggattgcagtgcatactaactctacagtggaactgggcctgaaaaatctggctttattctaaactctgagggtaatatgcctctgccctttagtcagactctgtgcaaattgtgaaatattattttattattttaccaagattataaaaacacttttacaaaaaaacaaaaacctgtaaaaataattttgagctacctgacgacaaatcatatctttaaccagccagttttccaatgcattgtaaatttcacttaaacctgttggttatgaaaatttgaagatcattttccttaaattatctcagcttttaacttcatttaaaaagacttttgtctaagaagaatattattattatatgttctttcaacaccccaggattaaaaaaactgattatgcaagcaattggaatataagtattaaattatagcatttgcaaatattaatataaaagcacaacaaaatgtagtggaaaatgacaaagcttgttttttaaaacaattctgtagaaatgtttgtgcaaattcagtaattcaacttaaaatataattttacagctatgttcaataaagcctctttccaggtaaggt

SEQ ID NO: 9816 - protein, 1025 aa, Homo sapiens; identical to SEQ ID NO: 9812

SEQ ID NO: 9817 - DNA, 742 bp, Homo sapiens
tcaggaatacacagagtacgctgtgaagagtctttccaatgaaaactatggggtttataactgtagcatcataaatgaagctggagctgggagatgcagctttcttgttacaggaaaggcctatgctccagaattctattatgatacctacaatccagtatggcagaacagacaccgtgtttattcttacagtctacagtggacacagatgaatcctgatgcagtggatcggattgttgcataccggttgggcatcaggcaggctggacagcagcgctggtgggagcaggagattaaaataaatgggaatattcaaaagggagaattaattacatataacttgacagagctaattaaaccagaagcttatgaagtccgactgactcctctcaccaaatttggtgaaggagattcaacaattcgtgtgatcaaatatagtgctcctgtaaatcctcatttgagagaatttcattgtggatttgaagatggtaatatttgtttgttcactcaagatgatacagataattttgactggacaaagcaaagtacagcaacaagaaatacaaaatatactcctaatacaggacctaatgctgaccgtagtggctccaaagaaggtatgggggtatgaccttttgtgttcatagcaatcagagacttttaaaaactgctataaatatgaaatactaatatttagccatatatttgaagattatggaataaaatattaaattttctgtac

SEQ ID NO: 9818 - protein, 140 aa, Homo sapiens
MNPDAVDRIVAYRLGIRQAGQQRWWEQEIKINGNIQKGELITYNLTELIKPEAYEVRLTPLTKFGEGDSTIRVIKYSAPVNPHLREFHCGFEDGNICLFTQDDTDNFDWTKQSTATRNTKYTPNTGPNADRSGSKEGMGV

SEQ ID NO: 9819 - DNA, 1853 bp, Homo sapiens
agtatgtgctctgggacaaaacagcatatttggcaacatctcggtgtccttatctgcagcttgaagaggcgccacagcaacatcctcagagtctgagcgaactgcgcccagcgcgggcacggagcctcccaccgccagcaacctgcggccccggagaaggcagcgagcgcagtgacagcgcctcaccgccaccagctcctggaccaccatggccaagaaccgcagggacagaaacagttggggtggattttcggaaaagacatatgaatggagctcagaagaggaggagccagtgaaaaaggcaggaccagtccaagtcctcattgtcaaagatgaccattcctttgagttagatgaaactgcattaaatcggatccttctctcggaggctgtcagagacaaggaggttgttgctgtatctgttgctggagcatttagaaaaggaaaatcattcctgatggacttcatgttgagatacatgtacaaccaggaatcagttgattgggttggagactacaatgaaccattgactggtttttcatggagaggtggatctgagcgagagaccacaggaattcagatatggagtgaaatcttccttatcaataaacctgatggtaaaaaggttgcagtgttattgatggatactcagggaacctttgatagtcagtcaactttgagagattcagccacagtatttgcccttagcacaatgatcagctcaatacaggtatataacttatcccaaaatgtccaggaggatgatcttcagcacctccagcttttcactgagtatggcagactggcaatggaggaaacattcctgaagccatttcagagtctgatatttcttgttcgagactggagtttcccatacgaattttcatatggagccgatggtggtgccaaattcttggaaaaacgcctcaaggtctcagggaaccagcatgaagaactacagaacgtcagaaaacacatccattcctgtttcaccaacatttcctgttttctgctacctcatcctggcttaaaagtagctaccaatccaaactttgatggaaaattgaaagaaatagatgatgaattcatcaaaaacttgaaaatactgattccttggctacttagtcccgagagcctagatattaaagagatcaatgggaataaaatcacctgccggggtctggtggagtacttcaaggcttatataaagatctatcaaggtgaagaattaccacatcccaaatccatgttacaggccacagcagaagctaacaatttagcagccgtggcaactgccaaggacacatacaacaaaaaaatggaagagatttgtggtggtgacaaaccatttctggccccaaatgacttgcagaccaaacacctgcaacttaaggaagaatctgtgaagctattccgaggggtgaagaagatgggtggggaagaatttagccggcgttacctgcagcagttggagagtgaaatagatgaactttacatccaatatatcaagcacaatgatagcaaaaatatcttccatgcagctcgtaccccagccacactgtttgtagtcatctttatcacatatgtgattgctggtgtgactggattcattggtttggacatcatagctagcctatgcaatatgataatgggactgacccttatcaccctgtgcacttgggcatatatccggtactctggagaataccgagagctgggagctgtaatagaccaggtggctgcagctctgtgggaccaggctttgtacaagctttacagtgcagcagcaacccacagacatctgtatcatcaagctttccctacaccaaagtcggaatctactgaacaatcag

SEQ ID NO: 9820 - protein, 547 aa, Homo sapiens
MAKNRRDRNSWGGFSEKTYEWSSEEEEPVKKAGPVQVLIVKDDHSFELDETALNRILLSEAVRDKEVVAVSVAGAFRKGKSFLMDFMLRYMYNQESVDWVGDYNEPLTGFSWRGGSERETTGIQIWSEIFLINKPDGKKVAVLLMDTQGTFDSQSTLRDSATVFALSTMISSIQVYNLSQNVQEDDLQHLQLFTEYGRLAMEETFLKPFQSLIFLVRDWSFPYEFSYGADGGAKFLEKRLKVSGNQHEELQNVRKHIHSCFTNISCFLLPHPGLKVATNPNFDGKLKEIDDEFIKNLKILIPWLLSPESLDIKEINGNKITCRGLVEYFKAYIKIYQGEELPHPKSMLQATAEANNLAAVATAKDTYNKKMEEICGGDKPFLAPNDLQTKHLQLKEESVKLFRGVKKMGGEEFSRRYLQQLESEIDELYIQYIKHNDSKNIFHAARTPATLFVVIFITYVIAGVTGFIGLDIIASLCNMIMGLTLITLCTWAYIRYSGEYRELGAVIDQVAAALWDQALYKLYSAAATHRHLYHQAFPTPKSESTEQ

SEQ ID NO: 9821 - DNA, 594 bp, Homo sapiens
agggagggtgtgacgctggtatctgtgtgaactcgggcttgtgatgctgagcttggttcatctgctttctcctcccttttcctccccactccttcccaccagcgccacagcaacatcctcagagtctgagcgaactgcgcccagcgcgggcacggagcctcccaccgccagcaacctgcggccccggagaaggcagcgagcgcagtgacagcgcctcaccgccaccagctcctggaccaccatggccaagaaccgcagggacagaaacagttggggtggattttcggaaaagacatatgaatggagctcagaagaggaggagccagtgaaaaaggcaggaccagtccaagtcctcattgtcaaagatgaccattcctttgagttagatgaaactgcattaaatcggatccttctctcggaggctgtcagagacaaggaggttgttgctgtatctgttgctggagcatttagaaaaggaaaatcattcctgatggacttcatgttgagatacatgtacaaccaggaatcagttgattgggttggagactacaatgaaccattgactggtttttcatggagaggtggatctgagcg

SEQ ID NO: 9822 - protein, 116 aa, Homo sapiens
MAKNRRDRNSWGGFSEKTYEWSSEEEEPVKKAGPVQVLIVKDDHSFELDETALNRILLSEAVRDKEVVAVSVAGAFRKGKSFLMDFMLRYMYNQESVDWVGDYNEPLTGFSWRGGS

SEQ ID NO: 9823 - DNA, 2235 bp, Homo sapiens
gggagggtgtgacgctggtatctgtgtgaactcgggcttgtgatgctgagcttggttcatctgctttctcctcccttttcctccccactccttcccaccagcgccacagcaacatcctcagagtctgagcgaactgcgcccagcgcgggcacggagcctcccaccgccagcaacctgcggccccggagaaggcagcgagcgcagtgacagcgcctcaccgccaccagctcctggaccaccatggccaagaaccgcagggacagaaacagttggggtggattttcggaaaagacatatgaatggagctcagaagaggaggagccagtgaaaaaggcaggaccagtccaagtcctcattgtcaaagatgaccattcctttgagttagatgaaactgcattaaatcggatccttctctcggaggctgtcagagacaaggaggttgttgctgtatctgttgctggagcatttagaaaaggaaaatcattcctgatggacttcatgttgagatacatgtacaaccaggaatcagttgattgggttggagactacaatgaaccattgactggtttttcatggagaggtggatctgagcgagagaccacaggaattcagatatggagtgaaatcttccttatcaataaacctgatggtaaaaaggttgcagtgttattgatggatactcagggaacctttgatagtcagtcaactttgagagattcagccacagtatttgcccttagcacaatgatcagctcaatacaggtatataacttatcccaaaatgtccaggaggatgatcttcagcacctccagcttttcactgagtatggcagactggcaatggaggaaacattcctgaagccatttcagagtctgatatttcttgttcgagactggagtttcccatacgaattttcatatggagccgatggtggtgccaaattcttggaaaaacgcctcaaggtctcagggaaccagcatgaagaactacagaacgtcagaaaacacatccattcctgtttcaccaacatttcctgttttctgctacctcatcctggcttaaaagtagctaccaatccaaactttgatggaaaattgaaagaaatagatgatgaattcatcaaaaacttgaaaatactgattccttggctacttagtcccgagagcctagatattaaagagatcaatgggaataaaatcacctgccggggtctggtggagtacttcaaggcttatataaagatctatcaaggtgaagaattaccacatcccaaatccatgttacaggccacagcagaagctaacaatttagcagccgtggcaactgccaaggacacatacaacaaaaaaatggaagagatttgtggtggtgacaaaccatttctggccccaaatgacttgcagaccaaacacctgcaacttaaggaagaatctgtgaagctattccgaggggtgaagaagatgggtggggaagaatttagccggcgttacctgcagcagttggagagtgaaatagatgaactttacatccaatatatcaagcacaatgatagcaaaaatatcttccatgcagctcgtaccccagccacactgtttgtagtcatctttatcacatatgtgattgctggtgtgactggattcattggtttggacatcatagctagcctatgcaatatgataatgggactgacccttatcaccctgtgcacttgggcatatatccggtactctggagaataccgagagctgggagctgtaatagaccaggtggctgcagctctgtgggaccaggctttgtacaagctttacagtgcagcagcaacccacagacatctgtatcatcaagctttccctacaccaaagtcggaatctactgaacaatcagaaaagaaaaaaatgtaatgcaaattttaagaaatacaggtgcatgaccaattgtcaattaaatattcagttttatgtctccatgcaaacattcaaagtgcttccatcagaacggagtaaaatactaaacacctctgaagactgcaaactggattagttcttttacttcagtgtttaataagcagatgtatgtatgcatggttatactattttgttaacatgtacaatttcctgatttttcttcaaaaatgctgttataaagtatttgtctatttatgataacagtacacgtgttctgcttgaatttactaaattctactactgggttataattaaatcatgtgatattcc

SEQ ID NO: 9824 - protein, 553 aa, Homo sapiens; identical to SEQ ID NO: 1435

SEQ ID NO: 9825 - DNA, 2250 bp, Homo sapiens
gggagggtgtgacgctggtatctgtgtgaactcgggcttgtgatgctgagcttggttcatctgctttctcctcccttttcctccccactccttcccaccagcgccacagcaacatcctcagagtctgagcgaactgcgcccagcgcgggcacggagcctcccaccgccagcaacctgcggccccggagaaggcagcgagcgcagtgacagcgcctcaccgccaccagctcctggaccaccatggccaagaaccgcagggacagaaacagttggggtggattttcggaaaagacatatgaatggagctcagaagaggaggagccagtgaaaaaggcaggaccagtccaagtcctcattgtcaaagatgaccattcctttgagttagatgaaactgcattaaatcggatccttctctcggaggctgtcagagacaaggaggttgttgctgtatctgttgctggagcatttagaaaaggaaaatcattcctgatggacttcatgttgagatacatgtacaaccaggaatcagttgattgggttggagactacaatgaaccattgactggtttttcatggagaggtggatctgagcgagagaccacaggaattcagatatggagtgaaatcttccttatcaataaacctgatggtaaaaaggttgcagtgttattgatggatactcagggaacctttgatagtcagtcaactttgagagattcagccacagtatttgcccttagcacaatgatcagctcaatacaggtatataacttatcccaaaatgtccaggaggatgatcttcagcacctccagcttttcactgagtatggcagactggcaatggaggaaacattcctgaagccatttcagagtctgatatttcttgttcgagactggagtttcccatacgaattttcatatggagccgatggtggtgccaaattcttggaaaaacgcctcaaggtctcagggaaccagcatgaagaactacagaacgtcagaaaacacatccattcctgtttcaccaacatttcctgttttctgctacctcatcctggcttaaaagtagctaccaatccaaactttgatggaaaattgaaagaaatagatgatgaattcatcaaaaacttgaaaatactgattccttggctacttagtcccgagagcctagatattaaagagatcaatgggaataaaatcacctgccggggtctggtggagtacttcaaggcttatataaagatctatcaaggtgaagaattaccacatcccaaatccatgttacaggccacagcagaagctaacaatttagcagccgtggcaactgccaaggacacatacaacaaaaaaatggaagagatttgtggtggtgacaaaccatttctggccccaaatgacttgcagaccaaacacctgcaacttaaggaagaatctgtgaagctattccgaggggtgaagaagatgggtggggaagaatttagccggcgttacctgcagcagttggagagtgaaatagatgaactttacatccaatatatcaagcacaatgatagcaaaaatatcttccatgcagctcgtaccccagccacactgtttgtagtcatctttatcacatatgtgattgctggtgtgactggattcattggtttggacatcatagctagcctatgcaatatgataatgggactgacccttatcaccctgtgcacttgggcatatatccggtactctggagaataccgagagctgggagctgtaatagaccaggtggctgcagctctgtgggaccagggaagtacaaatgaggctttgtacaagctttacagtgcagcagcaacccacagacatctgtatcatcaagctttccctacaccaaagtcggaatctactgaacaatcagaaaagaaaaaaatgtaatgcaaattttaagaaatacaggtgcatgaccaattgtcaattaaatattcagttttatgtctccatgcaaacattcaaagtgcttccatcagaacggagtaaaatactaaacacctctgaagactgcaaactggattagttcttttacttcagtgtttaataagcagatgtatgtatgcatggttatactattttgttaacatgtacaatttcctgatttttcttcaaaaatgctgttataaagtatttgtctatttatgataacagtacacgtgttctgcttgaatttactaaattctactactgggttataattaaatcatgtgatattcc

SEQ ID NO: 9826 - protein, 558 aa, Homo sapiens; identical to SEQ ID NO: 1433

SEQ ID NO: 9827 - DNA, 3246 bp, Homo sapiens
atttggaacctattatgtagatcacacaaataagaaggcccaatacaggcatccctgtgctcctagatatgaccacattctgaagtgggaactcttccagctggctgacctggatacataccagggaatgctaaagttgctcttcatgaaagaattggagcagattgttaaaatgtatgaagcatacagacaagcccttcttacagagttggaaaaccgaaagcagagacagcagtggtatgcccaacaacatggaaaaaatttttgagctgattttttaaaaatttaagttttgtaagagctttaaaatattttcacagataaaaaattgcaaacaagtactctggttaataaatgctgcttcctttgtggaaattataaaattctaactttacatgtattttgttattagaaattttcttttattgaatgagaaaaattagtctatcattttaagagccaatatggcaaacactttcaaatactgtatattaggaaactgttttggtattcttgatggaaaaaaacgcagcggaaatgtcattatgaacagatgttaaataggaaattattacttgttaacttcttacagcagtagtaccttctttaaaaaaaaaaaagaatctgcggtatttttttaaaaaaaaagtttaccgctgtagtgtgaaatattgtctggaaagggatggtttaaatattaccatgatgtagttgaaatataaaataggatttggaaccttattgtgataaatatttatatatgatgtatgtttgtctcccctctccaaagtaaggaacccagctgggcgtggtggctcactcctgtaatcccagcattttgggaggccgaggtgggtggaccgcttgagtccacgagtttaagaccagcctgggcaacatggtgaagccccatctctacaaaaaatacaaaaaaattagccgggtatgatggtgtgtgcctctagtcccagctacttgggaggctgaggtcagaggatggcttgagcccaagaggcagaggttgcagggtcaagatcgcaccacttgcactgcagcctgagagagagagagccagaccttgtctcaaaaaataaaaaataaaaaaataaaaacaaaataaggaatccttttaaagcatgttgagaaagtattttttggtatgaatgggtgacgggccttttaatctttcaggaatacatataagcaggaatacttagcctgtattgggaaggtgcgtgaaactcaaagttgctaacatcatcttccttattttcagccagtgctgttactgcatttagcatggctctgacgaggcagtggagagttcctgacagcatagcatactgccttctgacagactgggttaagctaccaaaaatgacaaccagggattcaaaaaaaatttttggtcattaaatcgaatgtatattattactttttaattttctaagtatttatcacaggactttaacaccatatatttccctcccagtttttctccccttttggtttaatagttaaaacatttttcataattagtgctgtacatttgattgcaaacaaattggtgatacttctaaactataactataaatctctagaattctgtgaatttcaacattatttgaagtagttcttcagttatatttacatgtgttgtaaatatgtaaatatacttttagcttaggaagtcttccagaatacaaactactcccagttagatatcagtgagtttgaataactgaagaaatgttgacaatgttaagtgtttgattttatataacaagcttattaaatatatttttgtggaaactaagcgcgtggtttttgagtccatgttttagacatagtgctgtatttcatttttctgttcaaaaggccatagacaaaggaatcaatataattgaaaggggtaatgaaaaggggtattgaaaaatgaaagtgtggctagtggaattttatcactgggaaaagataatttgctgaacttgtgatcagacttttctaagatgtcagtatatatatcttatgaactcccacactcctctatcttaattgttctttcctgtcacttcttactttatatcgctacttaattatggtgtagccatttctgtgacagtctttagaagtttctctgttttggacctcctagataagtattacttttttcattaacacactttccttcttcctctaagaagtctgttcagtgaaactccactagagattttagtcattaagaactagaagttacctaaaggaattagcatgttttgtaaaatagaaacttaagtttgtactgatgtcaacattaaataaaatgcatcttgagtctaaaaaaagagataaaccttcatcattctatatcagcacctctcattttcaaattcagtaagcatttgtttttaatcttaggaaccagagtaaactttaataatagttcacatattaaaagaataaacctatgaagaatacattctttgtgtaccaaatgaaaaaatatacaatgcagtgaaactcacatatacaaagtgattttttgtgcattttttatcaagaggtttatattctattaaaccatgtaaaagcaatatctggtttttgataaagcaactaaggaactctaaaatgtgcttaaaaataagattgtgatatatataagatgatacagattaaatccagcctgctgagttatgatgctgtgttttaacaaatggctaatgtgaaataatttaaaattttttctgtagaaattaaatgagcatatccaaacgtggaatatcacatgatttaattataacccagtagtagaatttagtaaattcaagcagaacacgtgtactgttatcataaatagacaaatactttataacagcatttttgaagaaaaatcaggaaattgtacatgttaacaaaatagtataaccatgcatacatacatctgcttattaaacactgaagtaaaagaactaatccagtttgcagtcttcagaggtgtttagtattttactccgttctgatggaagcactttgaatgtttgcatggagacataaaactgaatatttaattgacaattggtcatgcacctgtatttcttaaaatttgcattacatttttttcttttctgattgttcagtagattccgactttggtgtagggaaagcttgatgatacagatgtctgtgggttgctgctgcactgtaaagcttgtacaaagcctagaataaaagcatcaaaattat

SEQ ID NO: 9828 - protein, 46 aa, Homo sapiens
MLKLLFMKELEQIVKMYEAYRQALLTELENRKQRQQWYAQQHGKNF

SEQ ID NO: 9829 - DNA, 4292 bp, Homo sapiens
gcagaatacattttattctagctgagcttttacgcatagtccattaatgcaagttatataaattcatttgattgggaaaatattaatcttcctcaatttaaaatgcccaagtaccatcctaaaccaaaatttaaaattgtgttttcttaagttgactgacattttgattttggggtggtagacataaatgaacaaatttcgaaaacttttgttacttaatgatgaaagggtaattttatcctttgttttattgtagatcttatgccttcattcatccggcatggtccaacaattccaagacgaactgatatctgtcttccagattcaagccctaatgccttttcaacttctggagatgtagtttcaagaaaccagagtttccttagaactccaattcaaagaacacctcatgaaataatgagaagagaaagcaacagattatctgcaccttcttatcttgccagaagtctagcagatgtccctagagagtatggttcttctcagtcatttgtaacggaagttagttttgctgttgaaaatggagactctggttcccgatattattattcagacaatttttttgatggtcagagaaagcggccacttggagatcgtgcacatgaagactacagatattatgaatacaaccatgatctcttccaaagaatgccacagaatcaggggaggcatgcttcaggtattgggagagttgctgctacatctttaggaaatttgactaaccatggttctgaagatttaccccttcctcctggctggtctgtggactggacaatgagagggagaaaatattatatagatcataacacaaatacaactcactggagccatcctcttgagcgagaaggacttcctcctggatgggaacgagttgagtcatccgaatttggaacctattatgtagatcacacaaataagaaggcccaatacaggcatccctgtgctcctagtgtacctcggtatgatcaaccacctcctgtcacataccagccacagcaaactgaaagaaatcagtcccttctggtacctgcaaatccatatcatactgcagaaattcctgactggcttcaggtttacgcacgagcccctgtgaaatatgaccacattctgaagtgggaactcttccagctggctgacctggatacataccagggaatgctaaagttgctcttcatgaaagaattggagcagattgttaaaatgtatgaagcatacagacaagcccttcttacagagttggaaaaccgaaagcagagacagcagtggtatgcccaacaacatggaaaaaatttttgagctgattttttaaaaatttaagttttgtaagagctttaaaatattttcacagataaaaaattgcaaacaagtactctggttaataaatgctgcttcctttgtggaaattataaaattctaactttacatgtattttgttattagaaattttcttttattgaatgagaaaaattagtctatcattttaagagccaatatggcaaacactttcaaatactgtatattaggaaactgttttggtattcttgatggaaaaaaacgcagcggaaatgtcattatgaacagatgttaaataggaaattattacttgttaacttcttacagcagtagtaccttctttaaaaaaaaaaaagaatctgcggtatttttttaaaaaaaaagtttaccgctgtagtgtgaaatattgtctggaaagggatggtttaaatattaccatgatgtagttgaaatataaaataggatttggaaccttattgtgataaatatttatatatgatgtatgtttgtctcccctctccaaagtaaggaacccagctgggcgtggtggctcactcctgtaatcccagcattttgggaggccgaggtgggtggaccgcttgagtccacgagtttaagaccagcctgggcaacatggtgaagccccatctctacaaaaaatacaaaaaaattagccgggtatgatggtgtgtgcctctagtcccagctacttgggaggctgaggtcagaggatggcttgagcccaagaggcagaggttgcagggtcaagatcgcaccacttgcactgcagcctgagagagagagagccagaccttgtctcaaaaaataaaaaataaaaaaataaaaacaaaataaggaatccttttaaagcatgttgagaaagtattttttggtatgaatgggtgacgggccttttaatctttcaggaatacatataagcaggaatacttagcctgtattgggaaggtgcgtgaaactcaaagttgctaacatcatcttccttattttcagccagtgctgttactgcatttagcatggctctgacgaggcagtggagagttcctgacagcatagcatactgccttctgacagactgggttaagctaccaaaaatgacaaccagggattcaaaaaaaatttttggtcattaaatcgaatgtatattattactttttaattttctaagtatttatcacaggactttaacaccatatatttccctcccagtttttctccccttttggtttaatagttaaaacatttttcataattagtgctgtacatttgattgcaaacaaattggtgatacttctaaactataactataaatctctagaattctgtgaatttcaacattatttgaagtagttcttcagttatatttacatgtgttgtaaatatgtaaatatacttttagcttaggaagtcttccagaatacaaactactcccagttagatatcagtgagtttgaataactgaagaaatgttgacaatgttaagtgtttgattttatataacaagcttattaaatatatttttgtggaaactaagcgcgtggtttttgagtccatgttttagacatagtgctgtatttcatttttctgttcaaaaggccatagacaaaggaatcaatataattgaaaggggtaatgaaaaggggtattgaaaaatgaaagtgtggctagtggaattttatcactgggaaaagataatttgctgaacttgtgatcagacttttctaagatgtcagtatatatatcttatgaactcccacactcctctatcttaattgttctttcctgtcacttcttactttatatcgctacttaattatggtgtagccatttctgtgacagtctttagaagtttctctgttttggacctcctagataagtattacttttttcattaacacactttccttcttcctctaagaagtctgttcagtgaaactccactagagattttagtcattaagaactagaagttacctaaaggaattagcatgttttgtaaaatagaaacttaagtttgtactgatgtcaacattaaataaaatgcatcttgagtctaaaaaaagagataaaccttcatcattctatatcagcacctctcattttcaaattcagtaagcatttgtttttaatcttaggaaccagagtaaactttaataatagttcacatattaaaagaataaacctatgaagaatacattctttgtgtaccaaatgaaaaaatatacaatgcagtgaaactcacatatacaaagtgattttttgtgcattttttatcaagaggtttatattctattaaaccatgtaaaagcaatatctggtttttgataaagcaactaaggaactctaaaatgtgcttaaaaataagattgtgatatatataagatgatacagattaaatccagcctgctgagttatgatgctgtgttttaacaaatggctaatgtgaaataatttaaaattttttctgtagaaattaaatgagcatatccaaacgtggaatatcacatgatttaattataacccagtagtagaatttagtaaattcaagcagaacacgtgtactgttatcataaatagacaaatactttataacagcatttttgaagaaaaatcaggaaattgtacatgttaacaaaatagtataaccatgcatacatacatctgcttattaaacactgaagtaaaagaactaatccagtttgcagtcttcagaggtgtttagtattttactccgttctgatggaagcactttgaatgtttgcatggagacataaaactgaatatttaattgacaattggtcatgcacctgtatttcttaaaatttgcattacatttttttcttttctgattgttcagtagattccgactttggtgtagggaaagcttgatgatacagatgtctgtgggttgctgctgcactgtaaagcttgtacaaagcctagaataaaagcatcaaaattat

SEQ ID NO: 9830 - protein, 350 aa, Homo sapiens
MPSFIRHGPTIPRRTDICLPDSSPNAFSTSGDVVSRNQSFLRTPIQRTPHEIMRRESNRLSAPSYLARSLADVPREYGSSQSFVTEVSFAVENGDSGSRYYYSDNFFDGQRKRPLGDRAHEDYRYYEYNHDLFQRMPQNQGRHASGIGRVAATSLGNLTNHGSEDLPLPPGWSVDWTMRGRKYYIDHNTNTTHWSHPLEREGLPPGWERVESSEFGTYYVDHTNKKAQYRHPCAPSVPRYDQPPPVTYQPQQTERNQSLLVPANPYHTAEIPDWLQVYARAPVKYDHILKWELFQLADLDTYQGMLKLLFMKELEQIVKMYEAYRQALLTELENRKQRQQWYAQQHGKNF

SEQ ID NO: 9831 - DNA, 4512 bp, Homo sapiens
tcagtcggcaggacctgcttctcgctgaggatgagtgaggacagccgcagctcggcggggacggcccggtagcctagagcgccggcacccgagtcccgccgccggagccgcgcctggagccgcggtgggggaggggcagcggcggcccgcgctgcgtcgagcttcccagaattcccagcggccgcggggaaagtttacgggatgtaggcggcggcggcggtagtggtagcggttattcggcggcccgcggcggaccatggccctggccctggcccggcgtcgctgggctttcctcacggcgtccccgagcagcgtcgcagagcgggccgacttccgggaaggaactgaccagcgactgagcggcggccggcgcgcttagcgccctgaacatgcggcagtccctgcgggcgaccccgggctccggacagaggtgcaggggaagtacgtgaagaaggagacgtcgcctctgcttcggaatcttatgccttcattcatccggcatggtccaacaattccaagacgaactgatatctgtcttccagattcaagccctaatgccttttcaacttctggagatgtagtttcaagaaaccagagtttccttagaactccaattcaaagaacacctcatgaaataatgagaagagaaagcaacagattatctgcaccttcttatcttgccagaagtctagcagatgtccctagagagtatggttcttctcagtcatttgtaacggaagttagttttgctgttgaaaatggagactctggttcccgatattattattcagacaatttttttgatggtcagagaaagcggccacttggagatcgtgcacatgaagactacagatattatgaatacaaccatgatctcttccaaagaatgccacagaatcaggggaggcatgcttcaggtattgggagagttgctgctacatctttaggaaatttgactaaccatggttctgaagatttaccccttcctcctggctggtctgtggactggacaatgagagggagaaaatattatatagatcataacacaaatacaactcactggagccatcctcttgagcgagaaggacttcctcctggatgggaacgagttgagtcatccgaatttggaacctattatgtagatcacacaaataagaaggcccaatacaggcatccctgtgctcctagtgtacctcggtatgatcaaccacctcctgtcacataccagccacagcaaactgaaagaaatcagtcccttctggtacctgcaaatccatatcatactgcagaaattcctgactggcttcaggtttacgcacgagcccctgtgaaatatgaccacattctgaagtgggaactcttccagctggctgacctggatacataccagggaatgctaaagttgctcttcatgaaagaattggagcagattgttaaaatgtatgaagcatacagacaagcccttcttacagagttggaaaaccgaaagcagagacagcagtggtatgcccaacaacatggaaaaaatttttgagctgattttttaaaaatttaagttttgtaagagctttaaaatattttcacagataaaaaattgcaaacaagtactctggttaataaatgctgcttcctttgtggaaattataaaattctaactttacatgtattttgttattagaaattttcttttattgaatgagaaaaattagtctatcattttaagagccaatatggcaaacactttcaaatactgtatattaggaaactgttttggtattcttgatggaaaaaaacgcagcggaaatgtcattatgaacagatgttaaataggaaattattacttgttaacttcttacagcagtagtaccttctttaaaaaaaaaaaagaatctgcggtatttttttaaaaaaaaagtttaccgctgtagtgtgaaatattgtctggaaagggatggtttaaatattaccatgatgtagttgaaatataaaataggatttggaaccttattgtgataaatatttatatatgatgtatgtttgtctcccctctccaaagtaaggaacccagctgggcgtggtggctcactcctgtaatcccagcattttgggaggccgaggtgggtggaccgcttgagtccacgagtttaagaccagcctgggcaacatggtgaagccccatctctacaaaaaatacaaaaaaattagccgggtatgatggtgtgtgcctctagtcccagctacttgggaggctgaggtcagaggatggcttgagcccaagaggcagaggttgcagggtcaagatcgcaccacttgcactgcagcctgagagagagagagccagaccttgtctcaaaaaataaaaaataaaaaaataaaaacaaaataaggaatccttttaaagcatgttgagaaagtattttttggtatgaatgggtgacgggccttttaatctttcaggaatacatataagcaggaatacttagcctgtattgggaaggtgcgtgaaactcaaagttgctaacatcatcttccttattttcagccagtgctgttactgcatttagcatggctctgacgaggcagtggagagttcctgacagcatagcatactgccttctgacagactgggttaagctaccaaaaatgacaaccagggattcaaaaaaaatttttggtcattaaatcgaatgtatattattactttttaattttctaagtatttatcacaggactttaacaccatatatttccctcccagtttttctccccttttggtttaatagttaaaacatttttcataattagtgctgtacatttgattgcaaacaaattggtgatacttctaaactataactataaatctctagaattctgtgaatttcaacattatttgaagtagttcttcagttatatttacatgtgttgtaaatatgtaaatatacttttagcttaggaagtcttccagaatacaaactactcccagttagatatcagtgagtttgaataactgaagaaatgttgacaatgttaagtgtttgattttatataacaagcttattaaatatatttttgtggaaactaagcgcgtggtttttgagtccatgttttagacatagtgctgtatttcatttttctgttcaaaaggccatagacaaaggaatcaatataattgaaaggggtaatgaaaaggggtattgaaaaatgaaagtgtggctagtggaattttatcactgggaaaagataatttgctgaacttgtgatcagacttttctaagatgtcagtatatatatcttatgaactcccacactcctctatcttaattgttctttcctgtcacttcttactttatatcgctacttaattatggtgtagccatttctgtgacagtctttagaagtttctctgttttggacctcctagataagtattacttttttcattaacacactttccttcttcctctaagaagtctgttcagtgaaactccactagagattttagtcattaagaactagaagttacctaaaggaattagcatgttttgtaaaatagaaacttaagtttgtactgatgtcaacattaaataaaatgcatcttgagtctaaaaaaagagataaaccttcatcattctatatcagcacctctcattttcaaattcagtaagcatttgtttttaatcttaggaaccagagtaaactttaataatagttcacatattaaaagaataaacctatgaagaatacattctttgtgtaccaaatgaaaaaatatacaatgcagtgaaactcacatatacaaagtgattttttgtgcattttttatcaagaggtttatattctattaaaccatgtaaaagcaatatctggtttttgataaagcaactaaggaactctaaaatgtgcttaaaaataagattgtgatatatataagatgatacagattaaatccagcctgctgagttatgatgctgtgttttaacaaatggctaatgtgaaataatttaaaattttttctgtagaaattaaatgagcatatccaaacgtggaatatcacatgatttaattataacccagtagtagaatttagtaaattcaagcagaacacgtgtactgttatcataaatagacaaatactttataacagcatttttgaagaaaaatcaggaaattgtacatgttaacaaaatagtataaccatgcatacatacatctgcttattaaacactgaagtaaaagaactaatccagtttgcagtcttcagaggtgtttagtattttactccgttctgatggaagcactttgaatgtttgcatggagacataaaactgaatatttaattgacaattggtcatgcacctgtatttcttaaaatttgcattacatttttttcttttctgattgttcagtagattccgactttggtgtagggaaagcttgatgatacagatgtctgtgggttgctgctgcactgtaaagcttgtacaaagcctagaataaaagcatcaaaattat

SEQ ID NO: 9832 - protein, 350 aa, Homo sapiens; identical to SEQ ID NO: 9830

SEQ ID NO: 9833 - DNA, 4541 bp, Homo sapiens
tcagtcggcaggacctgcttctcgctgaggatgagtgaggacagccgcagctcggcggggacggcccggtagcctagagcgccggcacccgagtcccgccgccggagccgcgcctggagccgcggtgggggaggggcagcggcggcccgcgctgcgtcgagcttcccagaattcccagcggccgcggggaaagtttacgggatgtaggcggcggcggcggtagtggtagcggttattcggcggcccgcggcggaccatggccctggccctggcccggcgtcgctgggctttcctcacggcgtccccgagcagcgtcgcagagcgggccgacttccgggaaggaactgaccagcgactgagcggcggccggcgcgcttagcgccctgaacatgcggcagtccctgcgggcgaccccgggctccggacacggcgcccggcgcggagccctagggaggcagttcagcgcggcctcgggcctcgtcgagaaggatgctgtcccgaaagaaaaccaaaaacgaagtgtccaagccggccgaggtgcaggggaagtacgtgaagaaggagacgtcgcctctgcttcggaatgcgtcgagatgtgcgtcatgtttgcaaacattgcgggtgtctctcgactgtgctgcaagttgtgcgaactctggggcagaattccttagtcctgctgccggatgcagacttgagaagatcttatgccttcattcatccggcatggtccaacaattccaagacgaactgatatctgtcttccagattcaagccctaatgccttttcaactttctggttcccgatattattattcagacaatttttttgatggtcagagaaagcggccacttggagatcgtgcacatgaagactacagatattatgaatacaaccatgatctcttccaaagaatgccacagaatcaggggaggcatgcttcaggtattgggagagttgctgctacatctttaggaaatttgactaaccatggttctgaagatttaccccttcctcctggctggtctgtggactggacaatgagagggagaaaatattatatagatcataacacaaatacaactcactggagccatcctcttgagcgagaaggacttcctcctggatgggaacgagttgagtcatccgaatttggaacctattatgtagatcacacaaataagaaggcccaatacaggcatccctgtgctcctagtgtacctcggtatgatcaaccacctcctgtcacataccagccacagcaaactgaaagaaatcagtcccttctggtacctgcaaatccatatcatactgcagaaattcctgactggcttcaggtttacgcacgagcccctgtgaaatatgaccacattctgaagtgggaactcttccagctggctgacctggatacataccagggaatgctaaagttgctcttcatgaaagaattggagcagattgttaaaatgtatgaagcatacagacaagcccttcttacagagttggaaaaccgaaagcagagacagcagtggtatgcccaacaacatggaaaaaatttttgagctgattttttaaaaatttaagttttgtaagagctttaaaatattttcacagataaaaaattgcaaacaagtactctggttaataaatgctgcttcctttgtggaaattataaaattctaactttacatgtattttgttattagaaattttcttttattgaatgagaaaaattagtctatcattttaagagccaatatggcaaacactttcaaatactgtatattaggaaactgttttggtattcttgatggaaaaaaacgcagcggaaatgtcattatgaacagatgttaaataggaaattattacttgttaacttcttacagcagtagtaccttctttaaaaaaaaaaaagaatctgcggtatttttttaaaaaaaaagtttaccgctgtagtgtgaaatattgtctggaaagggatggtttaaatattaccatgatgtagttgaaatataaaataggatttggaaccttattgtgataaatatttatatatgatgtatgtttgtctcccctctccaaagtaaggaacccagctgggcgtggtggctcactcctgtaatcccagcattttgggaggccgaggtgggtggaccgcttgagtccacgagtttaagaccagcctgggcaacatggtgaagccccatctctacaaaaaatacaaaaaaattagccgggtatgatggtgtgtgcctctagtcccagctacttgggaggctgaggtcagaggatggcttgagcccaagaggcagaggttgcagggtcaagatcgcaccacttgcactgcagcctgagagagagagagccagaccttgtctcaaaaaataaaaaataaaaaaataaaaacaaaataaggaatccttttaaagcatgttgagaaagtattttttggtatgaatgggtgacgggccttttaatctttcaggaatacatataagcaggaatacttagcctgtattgggaaggtgcgtgaaactcaaagttgctaacatcatcttccttattttcagccagtgctgttactgcatttagcatggctctgacgaggcagtggagagttcctgacagcatagcatactgccttctgacagactgggttaagctaccaaaaatgacaaccagggattcaaaaaaaatttttggtcattaaatcgaatgtatattattactttttaattttctaagtatttatcacaggactttaacaccatatatttccctcccagtttttctccccttttggtttaatagttaaaacatttttcataattagtgctgtacatttgattgcaaacaaattggtgatacttctaaactataactataaatctctagaattctgtgaatttcaacattatttgaagtagttcttcagttatatttacatgtgttgtaaatatgtaaatatacttttagcttaggaagtcttccagaatacaaactactcccagttagatatcagtgagtttgaataactgaagaaatgttgacaatgttaagtgtttgattttatataacaagcttattaaatatatttttgtggaaactaagcgcgtggtttttgagtccatgttttagacatagtgctgtatttcatttttctgttcaaaaggccatagacaaaggaatcaatataattgaaaggggtaatgaaaaggggtattgaaaaatgaaagtgtggctagtggaattttatcactgggaaaagataatttgctgaacttgtgatcagacttttctaagatgtcagtatatatatcttatgaactcccacactcctctatcttaattgttctttcctgtcacttcttactttatatcgctacttaattatggtgtagccatttctgtgacagtctttagaagtttctctgttttggacctcctagataagtattacttttttcattaacacactttccttcttcctctaagaagtctgttcagtgaaactccactagagattttagtcattaagaactagaagttacctaaaggaattagcatgttttgtaaaatagaaacttaagtttgtactgatgtcaacattaaataaaatgcatcttgagtctaaaaaaagagataaaccttcatcattctatatcagcacctctcattttcaaattcagtaagcatttgtttttaatcttaggaaccagagtaaactttaataatagttcacatattaaaagaataaacctatgaagaatacattctttgtgtaccaaatgaaaaaatatacaatgcagtgaaactcacatatacaaagtgattttttgtgcattttttatcaagaggtttatattctattaaaccatgtaaaagcaatatctggtttttgataaagcaactaaggaactctaaaatgtgcttaaaaataagattgtgatatatataagatgatacagattaaatccagcctgctgagttatgatgctgtgttttaacaaatggctaatgtgaaataatttaaaattttttctgtagaaattaaatgagcatatccaaacgtggaatatcacatgatttaattataacccagtagtagaatttagtaaattcaagcagaacacgtgtactgttatcataaatagacaaatactttataacagcatttttgaagaaaaatcaggaaattgtacatgttaacaaaatagtataaccatgcatacatacatctgcttattaaacactgaagtaaaagaactaatccagtttgcagtcttcagaggtgtttagtattttactccgttctgatggaagcactttgaatgtttgcatggagacataaaactgaatatttaattgacaattggtcatgcacctgtatttcttaaaatttgcattacatttttttcttttctgattgttcagtagattccgactttggtgtagggaaagcttgatgatacagatgtctgtgggttgctgctgcactgtaaagcttgtacaaagcctagaataaaagcatcaaaattat

SEQ ID NO: 9834 - protein, 357 aa, Homo sapiens
MLSRKKTKNEVSKPAEVQGKYVKKETSPLLRNASRCASCLQTLRVSLDCAASCANSGAEFLSPAAGCRLEKILCLHSSGMVQQFQDELISVFQIQALMPFQLSGSRYYYSDNFFDGQRKRPLGDRAHEDYRYYEYNHDLFQRMPQNQGRHASGIGRVAATSLGNLTNHGSEDLPLPPGWSVDWTMRGRKYYIDHNTNTTHWSHPLEREGLPPGWERVESSEFGTYYVDHTNKKAQYRHPCAPSVPRYDQPPPVTYQPQQTERNQSLLVPANPYHTAEIPDWLQVYARAPVKYDHILKWELFQLADLDTYQGMLKLLFMKELEQIVKMYEAYRQALLTELENRKQRQQWYAQQHGKNF

SEQ ID NO: 9835 - DNA, 5016 bp, Homo sapiens
atactcagtagaggatcaacttatttctagttaatcagcatgaacgtttccagcagaatagatgctttggtgtagcacttgcctgggagtcatggttagcattccgcattttttagagagctgaattcagcagcctaggaaacattaggaagaacaccttcaaacagggaacaacgtcttggggggaaagagagtcactgcctccgctagggatcccgagggggtacaaaagcaacaacaataaaaactcgtggagagtaggttccacgacatgcgcatgcgacgaactcccgcactcagcggggcaggtttcgtccttcatcttctcagtcggcaggacctgcttctcgctgaggatgagtgaggacagccgcagctcggcggggacggcccggtagcctagagcgccggcacccgagtcccgccgccggagccgcgcctggagccgcggtgggggaggggcagcggcggcccgcgctgcgtcgagcttcccagaattcccagcggccgcggggaaagtttacgggatgtaggcggcggcggcggtagtggtagcggttattcggcggcccgcggcggaccatggccctggccctggcccggcgtcgctgggctttcctcacggcgtccccgagcagcgtcgcagagcgggccgacttccgggaaggaactgaccagcgactgagcggcggccggcgcgcttagcgccctgaacatgcggcagtccctgcgggcgaccccgggctccggacaggcggcggcggaggcggcggctcgggagggaaggaggcggcggcgccggcggaggtggcggcggagacggccggcgcccggcgcggagccctagggaggcagttcagcgcggcctcgggcctcgtcgagaaggatgctgtcccgaaagaaaaccaaaaacgaagtgtccaagccggccgaggtgcaggggaagtacgtgaagaaggagacgtcgcctctgcttcggaatcttatgccttcattcatccggcatggtccaacaattccaagacgaactgatatctgtcttccagattcaagccctaatgccttttcaacttctggagatgtagtttcaagaaaccagagtttccttagaactccaattcaaagaacacctcatgaaataatgagaagagaaagcaacagattatctgcaccttcttatcttgccagaagtctagcagatgtccctagagagtatggttcttctcagtcatttgtaacggaagttagttttgctgttgaaaatggagactctggttcccgatattattattcagacaatttttttgatggtcagagaaagcggccacttggagatcgtgcacatgaagactacagatattatgaatacaaccatgatctcttccaaagaatgccacagaatcaggggaggcatgcttcaggtattgggagagttgctgctacatctttaggaaatttgactaaccatggttctgaagatttaccccttcctcctggctggtctgtggactggacaatgagagggagaaaatattatatagatcataacacaaatacaactcactggagccatcctcttgagcgagaaggacttcctcctggatgggaacgagttgagtcatccgaatttggaacctattatgtagatcacacaaataagaaggcccaatacaggcatccctgtgctcctagtgtacctcggtatgatcaaccacctcctgtcacataccagccacagcaaactgaaagaaatcagtcccttctggtacctgcaaatccatatcatactgcagaaattcctgactggcttcaggtttacgcacgagcccctgtgaaatatgaccacattctgaagtgggaactcttccagctggctgacctggatacataccagggaatgctaaagttgctcttcatgaaagaattggagcagattgttaaaatgtatgaagcatacagacaagcccttcttacagagttggaaaaccgaaagcagagacagcagtggtatgcccaacaacatggaaaaaatttttgagctgattttttaaaaatttaagttttgtaagagctttaaaatattttcacagataaaaaattgcaaacaagtactctggttaataaatgctgcttcctttgtggaaattataaaattctaactttacatgtattttgttattagaaattttcttttattgaatgagaaaaattagtctatcattttaagagccaatatggcaaacactttcaaatactgtatattaggaaactgttttggtattcttgatggaaaaaaacgcagcggaaatgtcattatgaacagatgttaaataggaaattattacttgttaacttcttacagcagtagtaccttctttaaaaaaaaaaaagaatctgcggtatttttttaaaaaaaaagtttaccgctgtagtgtgaaatattgtctggaaagggatggtttaaatattaccatgatgtagttgaaatataaaataggatttggaaccttattgtgataaatatttatatatgatgtatgtttgtctcccctctccaaagtaaggaacccagctgggcgtggtggctcactcctgtaatcccagcattttgggaggccgaggtgggtggaccgcttgagtccacgagtttaagaccagcctgggcaacatggtgaagccccatctctacaaaaaatacaaaaaaattagccgggtatgatggtgtgtgcctctagtcccagctacttgggaggctgaggtcagaggatggcttgagcccaagaggcagaggttgcagggtcaagatcgcaccacttgcactgcagcctgagagagagagagccagaccttgtctcaaaaaataaaaaataaaaaaataaaaacaaaataaggaatccttttaaagcatgttgagaaagtattttttggtatgaatgggtgacgggccttttaatctttcaggaatacatataagcaggaatacttagcctgtattgggaaggtgcgtgaaactcaaagttgctaacatcatcttccttattttcagccagtgctgttactgcatttagcatggctctgacgaggcagtggagagttcctgacagcatagcatactgccttctgacagactgggttaagctaccaaaaatgacaaccagggattcaaaaaaaatttttggtcattaaatcgaatgtatattattactttttaattttctaagtatttatcacaggactttaacaccatatatttccctcccagtttttctccccttttggtttaatagttaaaacatttttcataattagtgctgtacatttgattgcaaacaaattggtgatacttctaaactataactataaatctctagaattctgtgaatttcaacattatttgaagtagttcttcagttatatttacatgtgttgtaaatatgtaaatatacttttagcttaggaagtcttccagaatacaaactactcccagttagatatcagtgagtttgaataactgaagaaatgttgacaatgttaagtgtttgattttatataacaagcttattaaatatatttttgtggaaactaagcgcgtggtttttgagtccatgttttagacatagtgctgtatttcatttttctgttcaaaaggccatagacaaaggaatcaatataattgaaaggggtaatgaaaaggggtattgaaaaatgaaagtgtggctagtggaattttatcactgggaaaagataatttgctgaacttgtgatcagacttttctaagatgtcagtatatatatcttatgaactcccacactcctctatcttaattgttctttcctgtcacttcttactttatatcgctacttaattatggtgtagccatttctgtgacagtctttagaagtttctctgttttggacctcctagataagtattacttttttcattaacacactttccttcttcctctaagaagtctgttcagtgaaactccactagagattttagtcattaagaactagaagttacctaaaggaattagcatgttttgtaaaatagaaacttaagtttgtactgatgtcaacattaaataaaatgcatcttgagtctaaaaaaagagataaaccttcatcattctatatcagcacctctcattttcaaattcagtaagcatttgtttttaatcttaggaaccagagtaaactttaataatagttcacatattaaaagaataaacctatgaagaatacattctttgtgtaccaaatgaaaaaatatacaatgcagtgaaactcacatatacaaagtgattttttgtgcattttttatcaagaggtttatattctattaaaccatgtaaaagcaatatctggtttttgataaagcaactaaggaactctaaaatgtgcttaaaaataagattgtgatatatataagatgatacagattaaatccagcctgctgagttatgatgctgtgttttaacaaatggctaatgtgaaataatttaaaattttttctgtagaaattaaatgagcatatccaaacgtggaatatcacatgatttaattataacccagtagtagaatttagtaaattcaagcagaacacgtgtactgttatcataaatagacaaatactttataacagcatttttgaagaaaaatcaggaaattgtacatgttaacaaaatagtataaccatgcatacatacatctgcttattaaacactgaagtaaaagaactaatccagtttgcagtcttcagaggtgtttagtattttactccgttctgatggaagcactttgaatgtttgcatggagacataaaactgaatatttaattgacaattggtcatgcacctgtatttcttaaaatttgcattacatttttttcttttctgattgttcagtagattccgactttggtgtagggaaagcttgatgatacagatgtctgtgggttgctgctgcactgtaaagcttgtacaaagcctagaataaaagcatcaaaattat

SEQ ID NO: 9836 - protein, 383 aa, Homo sapiens; identical to SEQ ID NO: 1437

SEQ ID NO: 9837 - DNA, 1814 bp, Homo sapiens
atttggaacctattatgtagatcacacaaataagaaggcccaatacaggcatccctgtgctcctagatatgaccacattctgaagtgggaactcttccagctggctgacctggatacataccagggaatgctaaagttgctcttcatgaaagaattggagcagattgttaaaatgtatgaagcatacagacaagcccttcttacagagttggaaaaccgaaagcagagacagcagtggtatgcccaacaacatggaaaaaatttttgagctgattttttaaaaatttaagttttgtaagagctttaaaatattttcacagataaaaaattgcaaacaagtactctggttaataaatgctgcttcctttgtggaaattataaaattctaactttacatgtattttgttattagaaattttcttttattgaatgagaaaaattagtctatcattttaagagccaatatggcaaacactttcaaatactgtatattaggaaactgttttggtattcttgatggaaaaaaacgcagcggaaatgtcattatgaacagatgttaaataggaaattattacttgttaacttcttacagcagtagtaccttctttaaaaaaaaaaaagaatctgcggtatttttttaaaaaaaaagtttaccgctgtagtgtgaaatattgtctggaaagggatggtttaaatattaccatgatgtagttgaaatataaaataggatttggaaccttattgtgataaatatttatatatgatgtatgtttgtctcccctctccaaagtaaggaacccagctgggcgtggtggctcactcctgtaatcccagcattttgggaggccgaggtgggtggaccgcttgagtccacgagtttaagaccagcctgggcaacatggtgaagccccatctctacaaaaaatacaaaaaaattagccgggtatgatggtgtgtgcctctagtcccagctacttgggaggctgaggtcagaggatggcttgagcccaagaggcagaggttgcagggtcaagatcgcaccacttgcactgcagcctgagagagagagagccagaccttgtctcaaaaaataaaaaataaaaaaataaaaacaaaataaggaatccttttaaagcatgttgagaaagtattttttggtatgaatgggtgacgggccttttaatctttcaggaatacatataagcaggaatacttagcctgtattgggaaggtgcgtgaaactcaaagttgctaacatcatcttccttattttcagccagtgctgttactgcatttagcatggctctgacgaggcagtggagagttcctgacagcatagcatactgccttctgacagactgggttaagctaccaaaaatgacaaccagggattcaaaaaaaatttttggtcattaaatcgaatgtatattattactttttaattttctaagtatttatcacaggactttaacaccatatatttccctcccagtttttctccccttttggtttaatagttaaaacatttttcataattagtgctgtacatttgattgcaaacaaattggtgatacttctaaactataactataaatctctagaattctgtgaatttcaacattatttgaagtagttcttcagttatatttacatgtgttgtaaatatgtaaatatacttttagcttaggaagtcttccagaatacaaactactcccagttagatatcagtgagtttgaataactgaagaaatgttgacaatgttaagtgtttgattttatataacaagcttattaaatatatttttgtggaaact

SEQ ID NO: 9838 - protein, 46 aa, Homo sapiens; identical to SEQ ID NO: 9828

SEQ ID NO: 9839 - DNA, 2860 bp, Homo sapiens
gcagaatacattttattctagctgagcttttacgcatagtccattaatgcaagttatataaattcatttgattgggaaaatattaatcttcctcaatttaaaatgcccaagtaccatcctaaaccaaaatttaaaattgtgttttcttaagttgactgacattttgattttggggtggtagacataaatgaacaaatttcgaaaacttttgttacttaatgatgaaagggtaattttatcctttgttttattgtagatcttatgccttcattcatccggcatggtccaacaattccaagacgaactgatatctgtcttccagattcaagccctaatgccttttcaacttctggagatgtagtttcaagaaaccagagtttccttagaactccaattcaaagaacacctcatgaaataatgagaagagaaagcaacagattatctgcaccttcttatcttgccagaagtctagcagatgtccctagagagtatggttcttctcagtcatttgtaacggaagttagttttgctgttgaaaatggagactctggttcccgatattattattcagacaatttttttgatggtcagagaaagcggccacttggagatcgtgcacatgaagactacagatattatgaatacaaccatgatctcttccaaagaatgccacagaatcaggggaggcatgcttcaggtattgggagagttgctgctacatctttaggaaatttgactaaccatggttctgaagatttaccccttcctcctggctggtctgtggactggacaatgagagggagaaaatattatatagatcataacacaaatacaactcactggagccatcctcttgagcgagaaggacttcctcctggatgggaacgagttgagtcatccgaatttggaacctattatgtagatcacacaaataagaaggcccaatacaggcatccctgtgctcctagtgtacctcggtatgatcaaccacctcctgtcacataccagccacagcaaactgaaagaaatcagtcccttctggtacctgcaaatccatatcatactgcagaaattcctgactggcttcaggtttacgcacgagcccctgtgaaatatgaccacattctgaagtgggaactcttccagctggctgacctggatacataccagggaatgctaaagttgctcttcatgaaagaattggagcagattgttaaaatgtatgaagcatacagacaagcccttcttacagagttggaaaaccgaaagcagagacagcagtggtatgcccaacaacatggaaaaaatttttgagctgattttttaaaaatttaagttttgtaagagctttaaaatattttcacagataaaaaattgcaaacaagtactctggttaataaatgctgcttcctttgtggaaattataaaattctaactttacatgtattttgttattagaaattttcttttattgaatgagaaaaattagtctatcattttaagagccaatatggcaaacactttcaaatactgtatattaggaaactgttttggtattcttgatggaaaaaaacgcagcggaaatgtcattatgaacagatgttaaataggaaattattacttgttaacttcttacagcagtagtaccttctttaaaaaaaaaaaagaatctgcggtatttttttaaaaaaaaagtttaccgctgtagtgtgaaatattgtctggaaagggatggtttaaatattaccatgatgtagttgaaatataaaataggatttggaaccttattgtgataaatatttatatatgatgtatgtttgtctcccctctccaaagtaaggaacccagctgggcgtggtggctcactcctgtaatcccagcattttgggaggccgaggtgggtggaccgcttgagtccacgagtttaagaccagcctgggcaacatggtgaagccccatctctacaaaaaatacaaaaaaattagccgggtatgatggtgtgtgcctctagtcccagctacttgggaggctgaggtcagaggatggcttgagcccaagaggcagaggttgcagggtcaagatcgcaccacttgcactgcagcctgagagagagagagccagaccttgtctcaaaaaataaaaaataaaaaaataaaaacaaaataaggaatccttttaaagcatgttgagaaagtattttttggtatgaatgggtgacgggccttttaatctttcaggaatacatataagcaggaatacttagcctgtattgggaaggtgcgtgaaactcaaagttgctaacatcatcttccttattttcagccagtgctgttactgcatttagcatggctctgacgaggcagtggagagttcctgacagcatagcatactgccttctgacagactgggttaagctaccaaaaatgacaaccagggattcaaaaaaaatttttggtcattaaatcgaatgtatattattactttttaattttctaagtatttatcacaggactttaacaccatatatttccctcccagtttttctccccttttggtttaatagttaaaacatttttcataattagtgctgtacatttgattgcaaacaaattggtgatacttctaaactataactataaatctctagaattctgtgaatttcaacattatttgaagtagttcttcagttatatttacatgtgttgtaaatatgtaaatatacttttagcttaggaagtcttccagaatacaaactactcccagttagatatcagtgagtttgaataactgaagaaatgttgacaatgttaagtgtttgattttatataacaagcttattaaatatatttttgtggaaact

SEQ ID NO: 9840 - protein, 350 aa, Homo sapiens; identical to SEQ ID NO: 9830

SEQ ID NO: 9841 - DNA, 3109 bp, Homo sapiens
tcagtcggcaggacctgcttctcgctgaggatgagtgaggacagccgcagctcggcggggacggcccggtagcctagagcgccggcacccgagtcccgccgccggagccgcgcctggagccgcggtgggggaggggcagcggcggcccgcgctgcgtcgagcttcccagaattcccagcggccgcggggaaagtttacgggatgtaggcggcggcggcggtagtggtagcggttattcggcggcccgcggcggaccatggccctggccctggcccggcgtcgctgggctttcctcacggcgtccccgagcagcgtcgcagagcgggccgacttccgggaaggaactgaccagcgactgagcggcggccggcgcgcttagcgccctgaacatgcggcagtccctgcgggcgaccccgggctccggacacggcgcccggcgcggagccctagggaggcagttcagcgcggcctcgggcctcgtcgagaaggatgctgtcccgaaagaaaaccaaaaacgaagtgtccaagccggccgaggtgcaggggaagtacgtgaagaaggagacgtcgcctctgcttcggaatgcgtcgagatgtgcgtcatgtttgcaaacattgcgggtgtctctcgactgtgctgcaagttgtgcgaactctggggcagaattccttagtcctgctgccggatgcagacttgagaagatcttatgccttcattcatccggcatggtccaacaattccaagacgaactgatatctgtcttccagattcaagccctaatgccttttcaactttctggttcccgatattattattcagacaatttttttgatggtcagagaaagcggccacttggagatcgtgcacatgaagactacagatattatgaatacaaccatgatctcttccaaagaatgccacagaatcaggggaggcatgcttcaggtattgggagagttgctgctacatctttaggaaatttgactaaccatggttctgaagatttaccccttcctcctggctggtctgtggactggacaatgagagggagaaaatattatatagatcataacacaaatacaactcactggagccatcctcttgagcgagaaggacttcctcctggatgggaacgagttgagtcatccgaatttggaacctattatgtagatcacacaaataagaaggcccaatacaggcatccctgtgctcctagtgtacctcggtatgatcaaccacctcctgtcacataccagccacagcaaactgaaagaaatcagtcccttctggtacctgcaaatccatatcatactgcagaaattcctgactggcttcaggtttacgcacgagcccctgtgaaatatgaccacattctgaagtgggaactcttccagctggctgacctggatacataccagggaatgctaaagttgctcttcatgaaagaattggagcagattgttaaaatgtatgaagcatacagacaagcccttcttacagagttggaaaaccgaaagcagagacagcagtggtatgcccaacaacatggaaaaaatttttgagctgattttttaaaaatttaagttttgtaagagctttaaaatattttcacagataaaaaattgcaaacaagtactctggttaataaatgctgcttcctttgtggaaattataaaattctaactttacatgtattttgttattagaaattttcttttattgaatgagaaaaattagtctatcattttaagagccaatatggcaaacactttcaaatactgtatattaggaaactgttttggtattcttgatggaaaaaaacgcagcggaaatgtcattatgaacagatgttaaataggaaattattacttgttaacttcttacagcagtagtaccttctttaaaaaaaaaaaagaatctgcggtatttttttaaaaaaaaagtttaccgctgtagtgtgaaatattgtctggaaagggatggtttaaatattaccatgatgtagttgaaatataaaataggatttggaaccttattgtgataaatatttatatatgatgtatgtttgtctcccctctccaaagtaaggaacccagctgggcgtggtggctcactcctgtaatcccagcattttgggaggccgaggtgggtggaccgcttgagtccacgagtttaagaccagcctgggcaacatggtgaagccccatctctacaaaaaatacaaaaaaattagccgggtatgatggtgtgtgcctctagtcccagctacttgggaggctgaggtcagaggatggcttgagcccaagaggcagaggttgcagggtcaagatcgcaccacttgcactgcagcctgagagagagagagccagaccttgtctcaaaaaataaaaaataaaaaaataaaaacaaaataaggaatccttttaaagcatgttgagaaagtattttttggtatgaatgggtgacgggccttttaatctttcaggaatacatataagcaggaatacttagcctgtattgggaaggtgcgtgaaactcaaagttgctaacatcatcttccttattttcagccagtgctgttactgcatttagcatggctctgacgaggcagtggagagttcctgacagcatagcatactgccttctgacagactgggttaagctaccaaaaatgacaaccagggattcaaaaaaaatttttggtcattaaatcgaatgtatattattactttttaattttctaagtatttatcacaggactttaacaccatatatttccctcccagtttttctccccttttggtttaatagttaaaacatttttcataattagtgctgtacatttgattgcaaacaaattggtgatacttctaaactataactataaatctctagaattctgtgaatttcaacattatttgaagtagttcttcagttatatttacatgtgttgtaaatatgtaaatatacttttagcttaggaagtcttccagaatacaaactactcccagttagatatcagtgagtttgaataactgaagaaatgttgacaatgttaagtgtttgattttatataacaagcttattaaatatatttttgtggaaact

SEQ ID NO: 9842 - protein, 357 aa, Homo sapiens; identical to SEQ ID NO: 9834

SEQ ID NO: 9843 - DNA, 3080 bp, Homo sapiens
tcagtcggcaggacctgcttctcgctgaggatgagtgaggacagccgcagctcggcggggacggcccggtagcctagagcgccggcacccgagtcccgccgccggagccgcgcctggagccgcggtgggggaggggcagcggcggcccgcgctgcgtcgagcttcccagaattcccagcggccgcggggaaagtttacgggatgtaggcggcggcggcggtagtggtagcggttattcggcggcccgcggcggaccatggccctggccctggcccggcgtcgctgggctttcctcacggcgtccccgagcagcgtcgcagagcgggccgacttccgggaaggaactgaccagcgactgagcggcggccggcgcgcttagcgccctgaacatgcggcagtccctgcgggcgaccccgggctccggacagaggtgcaggggaagtacgtgaagaaggagacgtcgcctctgcttcggaatcttatgccttcattcatccggcatggtccaacaattccaagacgaactgatatctgtcttccagattcaagccctaatgccttttcaacttctggagatgtagtttcaagaaaccagagtttccttagaactccaattcaaagaacacctcatgaaataatgagaagagaaagcaacagattatctgcaccttcttatcttgccagaagtctagcagatgtccctagagagtatggttcttctcagtcatttgtaacggaagttagttttgctgttgaaaatggagactctggttcccgatattattattcagacaatttttttgatggtcagagaaagcggccacttggagatcgtgcacatgaagactacagatattatgaatacaaccatgatctcttccaaagaatgccacagaatcaggggaggcatgcttcaggtattgggagagttgctgctacatctttaggaaatttgactaaccatggttctgaagatttaccccttcctcctggctggtctgtggactggacaatgagagggagaaaatattatatagatcataacacaaatacaactcactggagccatcctcttgagcgagaaggacttcctcctggatgggaacgagttgagtcatccgaatttggaacctattatgtagatcacacaaataagaaggcccaatacaggcatccctgtgctcctagtgtacctcggtatgatcaaccacctcctgtcacataccagccacagcaaactgaaagaaatcagtcccttctggtacctgcaaatccatatcatactgcagaaattcctgactggcttcaggtttacgcacgagcccctgtgaaatatgaccacattctgaagtgggaactcttccagctggctgacctggatacataccagggaatgctaaagttgctcttcatgaaagaattggagcagattgttaaaatgtatgaagcatacagacaagcccttcttacagagttggaaaaccgaaagcagagacagcagtggtatgcccaacaacatggaaaaaatttttgagctgattttttaaaaatttaagttttgtaagagctttaaaatattttcacagataaaaaattgcaaacaagtactctggttaataaatgctgcttcctttgtggaaattataaaattctaactttacatgtattttgttattagaaattttcttttattgaatgagaaaaattagtctatcattttaagagccaatatggcaaacactttcaaatactgtatattaggaaactgttttggtattcttgatggaaaaaaacgcagcggaaatgtcattatgaacagatgttaaataggaaattattacttgttaacttcttacagcagtagtaccttctttaaaaaaaaaaaagaatctgcggtatttttttaaaaaaaaagtttaccgctgtagtgtgaaatattgtctggaaagggatggtttaaatattaccatgatgtagttgaaatataaaataggatttggaaccttattgtgataaatatttatatatgatgtatgtttgtctcccctctccaaagtaaggaacccagctgggcgtggtggctcactcctgtaatcccagcattttgggaggccgaggtgggtggaccgcttgagtccacgagtttaagaccagcctgggcaacatggtgaagccccatctctacaaaaaatacaaaaaaattagccgggtatgatggtgtgtgcctctagtcccagctacttgggaggctgaggtcagaggatggcttgagcccaagaggcagaggttgcagggtcaagatcgcaccacttgcactgcagcctgagagagagagagccagaccttgtctcaaaaaataaaaaataaaaaaataaaaacaaaataaggaatccttttaaagcatgttgagaaagtattttttggtatgaatgggtgacgggccttttaatctttcaggaatacatataagcaggaatacttagcctgtattgggaaggtgcgtgaaactcaaagttgctaacatcatcttccttattttcagccagtgctgttactgcatttagcatggctctgacgaggcagtggagagttcctgacagcatagcatactgccttctgacagactgggttaagctaccaaaaatgacaaccagggattcaaaaaaaatttttggtcattaaatcgaatgtatattattactttttaattttctaagtatttatcacaggactttaacaccatatatttccctcccagtttttctccccttttggtttaatagttaaaacatttttcataattagtgctgtacatttgattgcaaacaaattggtgatacttctaaactataactataaatctctagaattctgtgaatttcaacattatttgaagtagttcttcagttatatttacatgtgttgtaaatatgtaaatatacttttagcttaggaagtcttccagaatacaaactactcccagttagatatcagtgagtttgaataactgaagaaatgttgacaatgttaagtgtttgattttatataacaagcttattaaatatatttttgtggaaact

SEQ ID NO: 9844 - protein, 350 aa, Homo sapiens; identical to SEQ ID NO: 9830

SEQ ID NO: 9845 - DNA, 3584 bp, Homo sapiens
atactcagtagaggatcaacttatttctagttaatcagcatgaacgtttccagcagaatagatgctttggtgtagcacttgcctgggagtcatggttagcattccgcattttttagagagctgaattcagcagcctaggaaacattaggaagaacaccttcaaacagggaacaacgtcttggggggaaagagagtcactgcctccgctagggatcccgagggggtacaaaagcaacaacaataaaaactcgtggagagtaggttccacgacatgcgcatgcgacgaactcccgcactcagcggggcaggtttcgtccttcatcttctcagtcggcaggacctgcttctcgctgaggatgagtgaggacagccgcagctcggcggggacggcccggtagcctagagcgccggcacccgagtcccgccgccggagccgcgcctggagccgcggtgggggaggggcagcggcggcccgcgctgcgtcgagcttcccagaattcccagcggccgcggggaaagtttacgggatgtaggcggcggcggcggtagtggtagcggttattcggcggcccgcggcggaccatggccctggccctggcccggcgtcgctgggctttcctcacggcgtccccgagcagcgtcgcagagcgggccgacttccgggaaggaactgaccagcgactgagcggcggccggcgcgcttagcgccctgaacatgcggcagtccctgcgggcgaccccgggctccggacaggcggcggcggaggcggcggctcgggagggaaggaggcggcggcgccggcggaggtggcggcggagacggccggcgcccggcgcggagccctagggaggcagttcagcgcggcctcgggcctcgtcgagaaggatgctgtcccgaaagaaaaccaaaaacgaagtgtccaagccggccgaggtgcaggggaagtacgtgaagaaggagacgtcgcctctgcttcggaatcttatgccttcattcatccggcatggtccaacaattccaagacgaactgatatctgtcttccagattcaagccctaatgccttttcaacttctggagatgtagtttcaagaaaccagagtttccttagaactccaattcaaagaacacctcatgaaataatgagaagagaaagcaacagattatctgcaccttcttatcttgccagaagtctagcagatgtccctagagagtatggttcttctcagtcatttgtaacggaagttagttttgctgttgaaaatggagactctggttcccgatattattattcagacaatttttttgatggtcagagaaagcggccacttggagatcgtgcacatgaagactacagatattatgaatacaaccatgatctcttccaaagaatgccacagaatcaggggaggcatgcttcaggtattgggagagttgctgctacatctttaggaaatttgactaaccatggttctgaagatttaccccttcctcctggctggtctgtggactggacaatgagagggagaaaatattatatagatcataacacaaatacaactcactggagccatcctcttgagcgagaaggacttcctcctggatgggaacgagttgagtcatccgaatttggaacctattatgtagatcacacaaataagaaggcccaatacaggcatccctgtgctcctagtgtacctcggtatgatcaaccacctcctgtcacataccagccacagcaaactgaaagaaatcagtcccttctggtacctgcaaatccatatcatactgcagaaattcctgactggcttcaggtttacgcacgagcccctgtgaaatatgaccacattctgaagtgggaactcttccagctggctgacctggatacataccagggaatgctaaagttgctcttcatgaaagaattggagcagattgttaaaatgtatgaagcatacagacaagcccttcttacagagttggaaaaccgaaagcagagacagcagtggtatgcccaacaacatggaaaaaatttttgagctgattttttaaaaatttaagttttgtaagagctttaaaatattttcacagataaaaaattgcaaacaagtactctggttaataaatgctgcttcctttgtggaaattataaaattctaactttacatgtattttgttattagaaattttcttttattgaatgagaaaaattagtctatcattttaagagccaatatggcaaacactttcaaatactgtatattaggaaactgttttggtattcttgatggaaaaaaacgcagcggaaatgtcattatgaacagatgttaaataggaaattattacttgttaacttcttacagcagtagtaccttctttaaaaaaaaaaaagaatctgcggtatttttttaaaaaaaaagtttaccgctgtagtgtgaaatattgtctggaaagggatggtttaaatattaccatgatgtagttgaaatataaaataggatttggaaccttattgtgataaatatttatatatgatgtatgtttgtctcccctctccaaagtaaggaacccagctgggcgtggtggctcactcctgtaatcccagcattttgggaggccgaggtgggtggaccgcttgagtccacgagtttaagaccagcctgggcaacatggtgaagccccatctctacaaaaaatacaaaaaaattagccgggtatgatggtgtgtgcctctagtcccagctacttgggaggctgaggtcagaggatggcttgagcccaagaggcagaggttgcagggtcaagatcgcaccacttgcactgcagcctgagagagagagagccagaccttgtctcaaaaaataaaaaataaaaaaataaaaacaaaataaggaatccttttaaagcatgttgagaaagtattttttggtatgaatgggtgacgggccttttaatctttcaggaatacatataagcaggaatacttagcctgtattgggaaggtgcgtgaaactcaaagttgctaacatcatcttccttattttcagccagtgctgttactgcatttagcatggctctgacgaggcagtggagagttcctgacagcatagcatactgccttctgacagactgggttaagctaccaaaaatgacaaccagggattcaaaaaaaatttttggtcattaaatcgaatgtatattattactttttaattttctaagtatttatcacaggactttaacaccatatatttccctcccagtttttctccccttttggtttaatagttaaaacatttttcataattagtgctgtacatttgattgcaaacaaattggtgatacttctaaactataactataaatctctagaattctgtgaatttcaacattatttgaagtagttcttcagttatatttacatgtgttgtaaatatgtaaatatacttttagcttaggaagtcttccagaatacaaactactcccagttagatatcagtgagtttgaataactgaagaaatgttgacaatgttaagtgtttgattttatataacaagcttattaaatatatttttgtggaaact

SEQ ID NO: 9846 - protein, 383 aa, Homo sapiens; identical to SEQ ID NO: 1437

SEQ ID NO: 9847 - DNA, 1181 bp, Homo sapiens
gcagaatacattttattctagctgagcttttacgcatagtccattaatgcaagttatataaattcatttgattgggaaaatattaatcttcctcaatttaaaatgcccaagtaccatcctaaaccaaaatttaaaattgtgttttcttaagttgactgacattttgattttggggtggtagacataaatgaacaaatttcgaaaacttttgttacttaatgatgaaagggtaattttatcctttgttttattgtagatcttatgccttcattcatccggcatggtccaacaattccaagacgaactgatatctgtcttccagattcaagccctaatgccttttcaacttctggagatgtagtttcaagaaaccagagtttccttagaactccaattcaaagaacacctcatgaaataatgagaagagaaagcaacagattatctgcaccttcttatcttgccagaagtctagcagatgtccctagagagtatggttcttctcagtcatttgtaacggaagttagttttgctgttgaaaatggagactctggttcccgatattattattcagacaatttttttgatggtcagagaaagcggccacttggagatcgtgcacatgaagactacagatattatgaatacaaccatgatctcttccaaagaatgccacagaatcaggggaggcatgcttcaggtagcttaacattataaataatatagtagtttatatttattgacatgtcaattaaaaagatgttcttttctagattttcttgggacacgaacaaatactactagcgaaatgtttttccactttgctcatcctgcttaagcctgtgtgcaaatagttgttaatctacactgaatggaagagtccttgtgaccatttattttattaactcatgttatgtaaacttggtatttatctcaaggctgtctagactcttaatgctgtgacccttgaaaacctagagaatttaatgtctccagttgggctgaatttaggtttaggtttggtagaataatgggaagggtaagtcttcagagacacttgacggagtcctcagagacacttgacaaacttgggaaaggaaagaagaatgggagaaatgtacaattctactttattcctgaagtcctggttttaccagataaaatgaagtgagatgaaaattaaa

SEQ ID NO: 9848 - protein, 46 aa, Homo sapiens [sequence omitted]

SEQ ID NO: 9849 - DNA, 735 bp, Homo sapiens
tcagtcggcaggacctgcttctcgctgaggatgagtgaggacagccgcagctcggcggggacggcccggtagcctagagcgccggcacccgagtcccgccgccggagccgcgcctggagccgcggtgggggaggggcagcggcggcccgcgctgcgtcgagcttcccagaattcccagcggccgcggggaaagtttacgggatgtaggcggcggcggcggtagtggtagcggttattcggcggcccgcggcggaccatggccctggccctggcccggcgtcgctgggctttcctcacggcgtccccgagcagcgtcgcagagcgggccgacttccgggaaggaactgaccagcgactgagcggcggccggcgcgcttagcgccctgaacatgcggcagtccctgcgggcgaccccgggctccggacaggcggcggcggaggcggcggctcgggagggaaggaggcggcggcgccggcggaggtggcggcggagacggccggcgcccggcgcggagccctagggaggcagttcagcgcggcctcgggcctcgtcgagaaggatgctgtcccgaaagaaaaccaaaaacgaagtgtccaagccggccgaggtgcaggggaagtacgtgaagaaggagacgtcgcctctgcttcggaatcttatgccttcattcatccggcatggtccaacaattccaagacgaactgatatctgtcttccagattcaagccctaatg

SEQ ID NO: 9850 - protein, 57 aa, Homo sapiens
MLSRKKTKNEVSKPAEVQGKYVKKETSPLLRNLMPSFIRHGPTIPRRTDICLPDSSP

SEQ ID NO: 9851 - DNA, 773 bp, Homo sapiens
tcagtcggcaggacctgcttctcgctgaggatgagtgaggacagccgcagctcggcggggacggcccggtagcctagagcgccggcacccgagtcccgccgccggagccgcgcctggagccgcggtgggggaggggcagcggcggcccgcgctgcgtcgagcttcccagaattcccagcggccgcggggaaagtttacgggatgtaggcggcggcggcggtagtggtagcggttattcggcggcccgcggcggaccatggccctggccctggcccggcgtcgctgggctttcctcacggcgtccccgagcagcgtcgcagagcgggccgacttccgggaaggaactgaccagcgactgagcggcggccggcgcgcttagcgccctgaacatgcggcagtccctgcgggcgaccccgggctccggacaggcggcggcggaggcggcggctcgggagggaaggaggcggcggcgccggcggaggtggcggcggagacggccggcgcccggcgcggagccctagggaggcagttcagcgcggcctcgggcctcgtcgagaaggatgctgtcccgaaagaaaaccaaaaacgaagtgtccaagccggccgaggtgcaggggaagtacgtgaagaaggagacgtcgcctctgcttcggaatgcgtcgagatgtgcgtcatgtttgcaaacattgcgggtgtctctcgactgtgctgcaagttgtgcgaactctggggcagaattccttagtcctgctgccggatgcagacttgagaag

SEQ ID NO: 9852 - protein, 70 aa, Homo sapiens
MLSRKKTKNEVSKPAEVQGKYVKKETSPLLRNASRCASCLQTLRVSLDCAASCANSGAEFLSPAAGCRLE

SEQ ID NO: 9853 - DNA, 8243 bp, Homo sapiens
gagctccgggtggccgcggccgagccgggagccgagcgcgctgggcgcggccgtcccgctgccgccgccaagcccggagtgcgccagcggccatggttcccgcggcggcgccgggcgcctgagccccgggacgcaagcgctggaggcgggctgccggctgtgcgggcgctccggagagaccgacagaaggtgagcactgtgggctatgggatggatgaggtggagcaggaccagcatgaggcccgactcaaggagctgtttgacagttttgacacgacgggcacagggtccctggggcaggaggaactcaccgacctttgccacatgttgagcttggaggaggtggccccagtgctgcagcagacattacttcaggacaacctcttgggcagggtacattttgaccaatttaaagaagcattaatactcatcttgtccagaactctgtcaaatgaagaacactttcaagaaccagactgctcactagaagctcagcccaaatatgttagaggtgggaagcgttacggacgaaggtccttgcccgagttccaagagtccgtggaggagtttcctgaagtgacggtgattgagccactggatgaagaagcgcggccttcacacatcccagccggtgactgcagtgagcactggaagacgcaacgcagtgaggagtatgaagcggaaggccagttaaggttttggaacccagatgacttgaatgcttcacagagtggatcttcccctccccaagactggatagaagagaaactgcaagaagtttgtgaagatttggggatcacccgtgatggtcacctgaaccggaagaagctggtctccatctgtgagcagtatggtttacagaatgtggatggagagatgctcgaggaagtattccataatcttgatcctgacggtacaatgagtgtagaagattttttctatggtttgtttaaaaatggaaaatctcttacaccatcagcatctactccatatagacaactaaaaaggcacctttccatgcagtctttcgatgagagtggacgacgtaccacaacctcatcagcaatgacaagtaccattggctttcgggtcttctcctgcctggatgatgggatgggccatgcatctgtggagagaatactggacacctggcaggaagagggcattgagaacagccaggagatcctgaaggccttggatttcagcctcgatggaaacatcaatttgacagaattaacactggcccttgaaaatgaacttttggttaccaagaacagcattcaccaggcggctctggccagctttaaggctgaaatccggcatttgttggaacgagttgatcaggtggtcagagaaaaagagaagctacggtcagatctggacaaggccgagaagctcaagtctttaatggcctcggaggtggatgatcaccatgcggccatagagcggcggaatgagtacaacctcaggaaactggatgaagagtacaaggagcgaatagcagccttaaaaaatgaactccgaaaagagagagagcagatcctgcagcaggcaggcaagcagcgtttagaacttgaacaggaaattgaaaaggcaaaaacagaagagaactatatccgggaccgccttgccctctctttaaaggaaaacagtcgtctggaaaatgagcttctagaaaatgcagagaagttggcagaatatgagaatctgacaaacaaacttcagagaaatttggaaaatgtgttagcagaaaagtttggtgacctcgatcctagcagtgctgagttcttcctgcaagaagagagactgacacagatgagaaatgaatatgagcggcagtgcagggtactacaagaccaagtagatgaactccagtctgagctggaagaatatcgtgcacaaggcagagtgctcaggcttccgttgaagaactcaccgtcagaagaagttgaggctaacagcggtggcattgagcccgaacacgggctcggttctgaagaatgcaatccattgaatatgagcattgaggcagagctggtcattgaacagatgaaagaacaacatcacagggacatatgttgcctcagactggagctcgaagataaagtgcgccattatgaaaagcagctggacgaaaccgtggtcagctgcaagaaggcacaggagaacatgaagcaaaggcatgagaacgaaacgcacaccttagaaaaacaaataagtgaccttaaaaatgaaattgctgaacttcaggggcaagcagcagtgctcaaggaggcacatcatgaggccacttgcaggcatgaggaggagaaaaaacaactgcaagtgaagcttgaggaggaaaagactcacctgcaggagaagctgaggctgcaacatgagatggagctcaaggctagactgacacaggctcaagcaagctttgagcgggagagggaaggccttcagagtagcgcctggacagaagagaaggtgagaggcttgactcaggaactagagcagtttcaccaggagcagctgacaagcctggtggagaaacacactcttgagaaagaggagttaagaaaagagctcttggaaaagcaccaaagggagcttcaggagggaagatatgaatctgaaaagcttcaacaggaaaattctattttgagaaatgaaattactactttaaatgaagaagatagcatttctaacctgaaattagggacattaaatggatctcaggaagaaatgtggcaaaaaacggaaactgtaaaacaagaaaatgctgcagttcagaagatggttgaaaatttaaagaaacagatttcagaattaaaaatcaaaaaccaacaattggatttggaaaatacagaacttagccaaaagaactctcaaaaccaggaaaaactgcaagaacttaatcaacgtctaacagaaatgctatgccagaaggaaaaagagccaggaaacagtgcattggaggaacgggaacaagagaagtttaatctgaaagaagaactggaacgttgtaaagtgcagtcctccactttagtgtcttctctggaggcggagctctctgaagttaaaatacagacccatattgtgcaacaggaaaaccaccttctcaaagatgaactggagaaaatgaaacagctgcacagatgtcccgatctctctgacttccagcaaaaaatctctagtgttctaagctacaacgaaaaactgctgaaagaaaaggaagctctgagtgaggaattaaatagctgtgtcgataagttggcaaaatcaagtcttttagagcatagaattgcgacgatgaagcaggaacagaaatcctgggaacatcagagtgcgagcttaaagtcacagctggtggcttctcaggaaaaggttcagaatttagaagacaccgtgcagaatgtaaacctgcaaatgtcccggatgaaatctgacctacgagtgactcagcaggaaaaggaggctttaaaacaagaagtgatgtctttacataagcaacttcagaatgctggtggcaagagctgggccccagagatagctactcatccatcagggctccataaccagcagaaaaggctgtcctgggacaagttggatcatctgatgaatgaggaacagcagctgctttggcaagagaatgagaggctccagaccatggtacagaacaccaaagccgaactcacgcactcccgggagaaggtccgtcagttggaatccaatcttcttcccaagcaccaaaaacatctaaacccatcaggtaccatgaatcccacagagcaagaaaaattgagcttaaagagagagtgtgatcagtttcagaaagaacaatctcctgctaacaggaaggtcagtcagatgaattcccttgaacaagaattagaaacaattcatttggaaaatgaaggcctgaaaaagaaacaagtaaaactggatgagcagctcatggagaactcagtggttggaagtagcagagaagggtgcagttctctgcctgagatagtgtgtgaagatgcagcacctgaggtccactgcgacgcctagcccgtcccctcatgcttgggatttgcagctgctccagcagcaagcctgtccgatggtgcccagggagcagtttctgcagcttcaacgccagctgctgcaggcagaaaggataaaccagcacctgcaggaggaacttgaaaacaggacctccgaaaccaacacaccacagggaaaccaggaacaactggtaactgtcatggaggaacgaatgatagaagttgaacagaaactgaaactagtgaaaaggcttcttcaagagaaagtgaatcagctcaaagaacaactctgcaagaacactaaggcagacgcaatggtgaaggacttgtatgttgaaaatgcccagttgttgaaagctctggaagtgactgaacagcgacagaaaacagcagagaagaaaaattacctcctggaggagaagattgccagcctcagtaatatagttaggaatctgacaccagcgccattgacttctacacctcctttgaggtcatagccaaaccaaagggtacactcatatttgtgcactttactgaaatagatgaacatttcagtaggttctcaacttaaaattaagcctaacctaaaactgccagcaacacaactggagtttccatttatcataattagtttttctaaatagacccttatgggagtttgaaaataaatactcacatatttcactacttaaattattcccaagatttgaatttattttaaaattttaatagccaccaagaatgtggacatatgaaaattcaagaacctaaaaaataccagttttgaatgagtttttgtggttttggttttttttttaattattacaaatctatgtgtaaaatctagatatttgaagtttgagatctgatgagaatggttgttataaactttattttaaaaccaaatttaggtgttcttacatatttaaatactggaaagtcattataatagttttggttctttgaattggtagacaattagtagagtataattggttaggaggcagggcttattaagtggttattaaccgctgacatcagacaaacccaaatctgtagaattctaaccttctaacacctgtgacagtattaccactcttcttgtattatagatttagaactgatttactcaattgcactcttaactaatgttaaaagcttacttgctttaaacagccttttcttctttctcttaaaagtttcatttggggagctggtcttctaagaaacggataaagccacataattaaagcagttgaactatagggaaagcactgaacaaaccactttggagtaaatagctactcttagaaaagagggataagcagaccatgtaggttttctgtctctcaaatcttagagttcataaatttacttgaggttgcctcaagaactcagggaacaatactgtaaactgtcttcctgaactactgtagggcctctctaagaatttgaaatgtataaaccatgtgacctcatttatttgtcttatatatttacagccatactagaatttttatttctacgtttttagtaaatttaatattctgggggaaaaaaggccttgattttagggttaaaaacctgacttatagaagagtttatttaatataggtcaaaattttctgtgtttcttattccttctatacctcaaatctgattctaagaatttcttactgtgataatcattggcatgccacctgaggtcaaggagtgccaaataggactttccactcatgctcaagatcaaaactttatagaacagtcaacattttagattcggtaaccttttttttcttccaattataatctctgctagccacttccgccagcagttggtggaagacttactaggtgcagggcactttccaagttcatcacaacaacctgcttgttttcatgagacaataatccgaaaagttcgctttgatatattcctggagggccaagcccatctatttacaaaaggtgaacagcaaaatcaagcactgctttatgggcaggaacacaagagaaagcaaactgcccaagaagtcatcatgtcagaaactcaatctcaacaaaataatttccatcagggaacttcagggtttcttgggggcttatgagtctcaccggtcaacccaggaggcctcactacaagagccttgacaaggcactgttttttgtgggactgggagttcacactgatgaagcaaacctttgaatttttgcacagctcttgtcagaaagccctgagttccccctggataaagagttaattttaatccttccctataattatacttcaaaatatttgacatctgctattatgccttctttagatctttcttctgtggtgcagacatttctagtaagtgtttgactacttgtatggcattagctttcacagaaaattgtttcacttaaaactgtggattggcctaggctaaggacaaaaataaactaagtacctgtagtgtatttatgtgatatgtgtcaagttactcaaagttattgctgttggaactgaacaataatatttcccagatagctggccttagcatgtgatcacggttgttgtatttttaatttttgtcttttacagtatgagaggtgtaggttaatttgtttatttcctataaatttgtatttatgtgtatataaaatgtacaatgaatgtaaatatgactttctggaaagtttagactacatttagaatctctattcaaaatcaaaatgctgctcaaatgaatttaaccaacatctaggtgcttaatttctcattttatcccacttatgagattgggaaaaagatcaatatgagaaataccatacagataccttaaatgtatgcatttgtgcaacaatttttgagaaggtgagtggcaatttataatttagttggcaatttataatagaacttatagcttttaaaagaccttttaaagacattaaatgtaaacttaaaaatgtttagatcttgtttcaaactttacaatagcattcttcaaaatattaagttatatattttataggcatttagttgcttattaaaagcactgattttcaaactttttgatttaagaacaattatttaagatcgtctcagaagatgggatcttcgtttcaagaaaagggaatcaagtttgcctttgagataatacgttacactaagaaaaggaaaatgtggatagtaaaacccacctctctcatcctattgtactctcttctgctttttagaagcctgcacttaagcttagatttgtgaagggagagtagaaggggagaagtagaaccacagtgttttatttatttttctaaaactcttactaaatccagattttttaaactgttttaaatgtgaattcttcccagaaatttcaatgcattgcatatttagccttcggcatatttttcatgaatagatcatgaagtcataggcttccaaggcataggaagagatcttgcaggtctagtattttaataatgcactattacccagggcagatattatgagaaactgtttcttctctaagggtttatggcagactttgcttttttaacatgtgagaaatgaattttttattttgtgatttatgtgatttcttttgctgagtgaaggaaaggagaaattgttgctattgtcagcatcttaaaggtatttccagtcaaggcaaggctaagtgctttgtgatagtattaagcaagtcatgttttgaatggattacctgtagtgactcattggaatgatataattatacaagtaatgccaaaaaccaagtcaaagcctaattaaccaaagcactcatttaaaaatcatcatgtttggacctatctggacctctcagcactgtaaaatagttttggttttgtggcatatgaatagctgtttaacaaatcaaagttagctttttgcttctcagcttttttgggcaatacaagttaagttcttaatggggagacattatcatggcatgacttaagggaacattggtttgtgaaggaaaaacagattatctaaagccatctctatgtttctgttcagataaagattaatgagttctgtgtttatatcagctttgtatatttcatcttagccattctatcctagaaagattttaatgtgagcttaagatgtaaataaataattttgcaaacatgccttttgttttctatataccctgaccttttaataaagtttcagtgtatttatcattggtcttt

SEQ ID NO: 9854 - protein, 1276 aa, Homo sapiens
MDEVEQDQHEARLKELFDSFDTTGTGSLGQEELTDLCHMLSLEEVAPVLQQTLLQDNLLGRVHFDQFKEALILILSRTLSNEEHFQEPDCSLEAQPKYVRGGKRYGRRSLPEFQESVEEFPEVTVIEPLDEEARPSHIPAGDCSEHWKTQRSEEYEAEGQLRFWNPDDLNASQSGSSPPQDWIEEKLQEVCEDLGITRDGHLNRKKLVSICEQYGLQNVDGEMLEEVFHNLDPDGTMSVEDFFYGLFKNGKSLTPSASTPYRQLKRHLSMQSFDESGRRTTTSSAMTSTIGFRVFSCLDDGMGHASVERILDTWQEEGIENSQEILKALDFSLDGNINLTELTLALENELLVTKNSIHQAALASFKAEIRHLLERVDQVVREKEKLRSDLDKAEKLKSLMASEVDDHHAAIERRNEYNLRKLDEEYKERIAALKNELRKEREQILQQAGKQRLELEQEIEKAKTEENYIRDRLALSLKENSRLENELLENAEKLAEYENLTNKLQRNLENVLAEKFGDLDPSSAEFFLQEERLTQMRNEYERQCRVLQDQVDELQSELEEYRAQGRVLRLPLKNSPSEEVEANSGGIEPEHGLGSEECNPLNMSIEAELVIEQMKEQHHRDICCLRLELEDKVRHYEKQLDETVVSCKKAQENMKQRHENETHTLEKQISDLKNEIAELQGQAAVLKEAHHEATCRHEEEKKQLQVKLEEEKTHLQEKLRLQHEMELKARLTQAQASFEREREGLQSSAWTEEKVRGLTQELEQFHQEQLTSLVEKHTLEKEELRKELLEKHQRELQEGRYESEKLQQENSILRNEITTLNEEDSISNLKLGTLNGSQEEMWQKTETVKQENAAVQKMVENLKKQISELKIKNQQLDLENTELSQKNSQNQEKLQELNQRLTEMLCQKEKEPGNSALEEREQEKFNLKEELERCKVQSSTLVSSLEAELSEVKIQTHIVQQENHLLKDELEKMKQLHRCPDLSDFQQKISSVLSYNEKLLKEKEALSEELNSCVDKLAKSSLLEHRIATMKQEQKSWEHQSASLKSQLVASQEKVQNLEDTVQNVNLQMSRMKSDLRVTQQEKEALKQEVMSLHKQLQNAGGKSWAPEIATHPSGLHNQQKRLSWDKLDHLMNEEQQLLWQENERLQTMVQNTKAELTHSREKVRQLESNLLPKHQKHLNPSGTMNPTEQEKLSLKRECDQFQKEQSPANRKVSQMNSLEQELETIHLENEGLKKKQVKLDEQLMENSVVGSSREGCSSLPEIVCEDAAPEVHCDA

SEQ ID NO: 9855 - DNA, 4860 bp, Homo sapiens
cattctgcatgtcttttaaagtatatcttaactaccatcagctgttaatacctttatgaaatctgaaattccttatggggacattttggtggactgcagagggatgggggttgcattctaataagtcaattgcattctaatctctctaggtctctctcctctccaaaactcacttactccttaacccatcaccgttgtgtgagaacaggagatttttcattttcaatctgctctgatagtaaacccatcctccaatccagatgtgtgcttcacatttacaagtgggaaacagatgactagaaaaattggcaggaagaggctattatgaagaaagaaacttaccaccctcacagtcatcagccacttcaaaggaaaaacagacatgcatattgcaagctgattggttatgttaggaaaccctgaatatattcagtgcttgttttgttgttgagaggcccataacattgcagagacccagatcacagatgggaggttgatagcgatcttccaagttaccttggatgtccattttactagaggtactcacaggtattaaattatgggttttcagaattttgctttatatcagggggatgatggtaacacaggtaagattcttttgatttttcagtctgatcctttatctgatagggttacttttctgacatatgcaatccatgcagggctcaaaactctcatttcatgagaaatccatccttcctgttacaaaggcaaaacatttgctgtcctttctctaggcatcttgtggggaaaataaaccagtgttttcagtgtgacatgattttcgaataatatacttttcttcccttcagggaaaccaggaacaactggtaactgtcatggaggaacgaatgatagaagttgaacagaaactgaaactagtgaaaaggcttcttcaagagaaagtgaatcagctcaaagaacaactctgcaagaacactaaggcagacgcaatggtgaaggacttgtatgttgaaaatgcccagttgttgaaagctctggaagtgactgaacagcgacagaaaacagcagagaagaaaaattacctcctggaggagaagattgccagcctcagtaatatagttaggaatctgacaccagcgccattgacttctacacctcctttgaggtcatagccaaaccaaagggtacactcatatttgtgcactttactgaaatagatgaacatttcagtaggttctcaacttaaaattaagcctaacctaaaactgccagcaacacaactggagtttccatttatcataattagtttttctaaatagacccttatgggagtttgaaaataaatactcacatatttcactacttaaattattcccaagatttgaatttattttaaaattttaatagccaccaagaatgtggacatatgaaaattcaagaacctaaaaaataccagttttgaatgagtttttgtggttttggttttttttttaattattacaaatctatgtgtaaaatctagatatttgaagtttgagatctgatgagaatggttgttataaactttattttaaaaccaaatttaggtgttcttacatatttaaatactggaaagtcattataatagttttggttctttgaattggtagacaattagtagagtataattggttaggaggcagggcttattaagtggttattaaccgctgacatcagacaaacccaaatctgtagaattctaaccttctaacacctgtgacagtattaccactcttcttgtattatagatttagaactgatttactcaattgcactcttaactaatgttaaaagcttacttgctttaaacagccttttcttctttctcttaaaagtttcatttggggagctggtcttctaagaaacggataaagccacataattaaagcagttgaactatagggaaagcactgaacaaaccactttggagtaaatagctactcttagaaaagagggataagcagaccatgtaggttttctgtctctcaaatcttagagttcataaatttacttgaggttgcctcaagaactcagggaacaatactgtaaactgtcttcctgaactactgtagggcctctctaagaatttgaaatgtataaaccatgtgacctcatttatttgtcttatatatttacagccatactagaatttttatttctacgtttttagtaaatttaatattctgggggaaaaaaggccttgattttagggttaaaaacctgacttatagaagagtttatttaatataggtcaaaattttctgtgtttcttattccttctatacctcaaatctgattctaagaatttcttactgtgataatcattggcatgccacctgaggtcaaggagtgccaaataggactttccactcatgctcaagatcaaaactttatagaacagtcaacattttagattcggtaaccttttttttcttccaattataatctctgctagccacttccgccagcagttggtggaagacttactaggtgcagggcactttccaagttcatcacaacaacctgcttgttttcatgagacaataatccgaaaagttcgctttgatatattcctggagggccaagcccatctatttacaaaaggtgaacagcaaaatcaagcactgctttatgggcaggaacacaagagaaagcaaactgcccaagaagtcatcatgtcagaaactcaatctcaacaaaataatttccatcagggaacttcagggtttcttgggggcttatgagtctcaccggtcaacccaggaggcctcactacaagagccttgacaaggcactgttttttgtgggactgggagttcacactgatgaagcaaacctttgaatttttgcacagctcttgtcagaaagccctgagttccccctggataaagagttaattttaatccttccctataattatacttcaaaatatttgacatctgctattatgccttctttagatctttcttctgtggtgcagacatttctagtaagtgtttgactacttgtatggcattagctttcacagaaaattgtttcacttaaaactgtggattggcctaggctaaggacaaaaataaactaagtacctgtagtgtatttatgtgatatgtgtcaagttactcaaagttattgctgttggaactgaacaataatatttcccagatagctggccttagcatgtgatcacggttgttgtatttttaatttttgtcttttacagtatgagaggtgtaggttaatttgtttatttcctataaatttgtatttatgtgtatataaaatgtacaatgaatgtaaatatgactttctggaaagtttagactacatttagaatctctattcaaaatcaaaatgctgctcaaatgaatttaaccaacatctaggtgcttaatttctcattttatcccacttatgagattgggaaaaagatcaatatgagaaataccatacagataccttaaatgtatgcatttgtgcaacaatttttgagaaggtgagtggcaatttataatttagttggcaatttataatagaacttatagcttttaaaagaccttttaaagacattaaatgtaaacttaaaaatgtttagatcttgtttcaaactttacaatagcattcttcaaaatattaagttatatattttataggcatttagttgcttattaaaagcactgattttcaaactttttgatttaagaacaattatttaagatcgtctcagaagatgggatcttcgtttcaagaaaagggaatcaagtttgcctttgagataatacgttacactaagaaaaggaaaatgtggatagtaaaacccacctctctcatcctattgtactctcttctgctttttagaagcctgcacttaagcttagatttgtgaagggagagtagaaggggagaagtagaaccacagtgttttatttatttttctaaaactcttactaaatccagattttttaaactgttttaaatgtgaattcttcccagaaatttcaatgcattgcatatttagccttcggcatatttttcatgaatagatcatgaagtcataggcttccaaggcataggaagagatcttgcaggtctagtattttaataatgcactattacccagggcagatattatgagaaactgtttcttctctaagggtttatggcagactttgcttttttaacatgtgagaaatgaattttttattttgtgatttatgtgatttcttttgctgagtgaaggaaaggagaaattgttgctattgtcagcatcttaaaggtatttccagtcaaggcaaggctaagtgctttgtgatagtattaagcaagtcatgttttgaatggattacctgtagtgactcattggaatgatataattatacaagtaatgccaaaaaccaagtcaaagcctaattaaccaaagcactcatttaaaaatcatcatgtttggacctatctggacctctcagcactgtaaaatagttttggttttgtggcatatgaatagctgtttaacaaatcaaagttagctttttgcttctcagcttttttgggcaatacaagttaagttcttaatggggagacattatcatggcatgacttaagggaacattggtttgtgaaggaaaaacagattatctaaagccatctctatgtttctgttcagataaagattaatgagttctgtgtttatatcagctttgtatatttcatcttagccattctatcctagaaagattttaatgtgagcttaagatgtaaataaataattttgcaaacatgccttttgttttctatataccctgaccttttaataaagtttcagtgtatttatcattg

SEQ ID NO: 9856 - protein, 98 aa, Homo sapiens
MEERMIEVEQKLKLVKRLLQEKVNQLKEQLCKNTKADAMVKDLYVENAQLLKALEVTEQRQKTAEKKNYLLEEKIASLSNIVRNLTPAPLTSTPPLRS

SEQ ID NO: 9857 - DNA, 9493 bp, Homo sapiens
gagctccgggtggccgcggccgagccgggagccgagcgcgctgggcgcggccgtcccgctgccgccgccaagcccggagtgcgccagcggccatggttcccgcggcggcgccgggcgcctgagccccgggacgcaagcgctggaggcgggctgccggctgtgcgggcgctccggagagaccgacagaaggtgagcactgtgggctatgggatggatgaggtggagcaggaccagcatgaggcccgactcaaggagctgtttgacagttttgacacgacgggcacagggtccctggggcaggaggaactcaccgacctttgccacatgttgagcttggaggaggtggccccagtgctgcagcagacattacttcaggacaacctcttgggcagggtacattttgaccaatttaaagaagcattaatactcatcttgtccagaactctgtcaaatgaagaacactttcaagaaccagactgctcactagaagctcagcccaaatatgttagaggtgggaagcgttacggacgaaggtccttgcccgagttccaagagtccgtggaggagtttcctgaagtgacggtgattgagccactggatgaagaagcgcggccttcacacatcccagccggtgactgcagtgagcactggaagacgcaacgcagtgaggagtatgaagcggaaggccagttaaggttttggaacccagatgacttgaatgcttcacagagtggatcttcccctccccaagactggatagaagagaaactgcaagaagtttgtgaagatttggggatcacccgtgatggtcacctgaaccggaagaagctggtctccatctgtgagcagtatggtttacagaatgtggatggagagatgctcgaggaagtattccataatcttgatcctgacggtacaatgagtgtagaagattttttctatggtttgtttaaaaatggaaaatctcttacaccatcagcatctactccatatagacaactaaaaaggcacctttccatgcagtctttcgatgagagtggacgacgtaccacaacctcatcagcaatgacaagtaccattggctttcgggtcttctcctgcctggatgatgggatgggccatgcatctgtggagagaatactggacacctggcaggaagagggcattgagaacagccaggagatcctgaaggccttggatttcagcctcgatggaaacatcaatttgacagaattaacactggcccttgaaaatgaacttttggttaccaagaacagcattcaccaggcggctctggccagctttaaggctgaaatccggcatttgttggaacgagttgatcaggtggtcagagaaaaagagaagctacggtcagatctggacaaggccgagaagctcaagtctttaatggcctcggaggtggatgatcaccatgcggccatagagcggcggaatgagtacaacctcaggaaactggatgaagagtacaaggagcgaatagcagccttaaaaaatgaactccgaaaagagagagagcagatcctgcagcaggcaggcaagcagcgtttagaacttgaacaggaaattgaaaaggcaaaaacagaagagaactatatccgggaccgccttgccctctctttaaaggaaaacagtcgtctggaaaatgagcttctagaaaatgcagagaagttggcagaatattttggtgacctcgatcctagcagtgctgagttcttcctgcaagaagagagactgacacagatgagaaatgaatatgagcggcagtgcagggtactacaagaccaagtagatgaactccagtctgagctggaagaatatcgtgcacaaggcagagtgctcaggcttccgttgaagaactcaccgtcagaagaagttgaggctaacagcggtggcattgagcccgaacacgggctcggttctgaagaatgcaatccattgaatatgagcattgaggcagagctggtcattgaacagatgaaagaacaacatcacagggacatatgttgcctcagactggagctcgaagataaagtgcgccattatgaaaagcagctggacgaaaccgtggtcagctgcaagaaggcacaggagaacatgaagcaaaggcatgagaacgaaacgcacaccttagaaaaacaaataagtgaccttaaaaatgaaattgctgaacttcaggggcaagcagcagtgctcaaggaggcacatcatgaggccacttgcaggcatgaggaggagaaaaaacaactgcaagtgaagcttgaggaggaaaagactcacctgcaggagaagctgaggctgcaacatgagatggagctcaaggctagactgacacaggctcaagcaagctttgagcgggagagggaaggccttcagagtagcgcctggacagaagagaaggtgagaggcttgactcaggaactagagcagtttcaccaggagcagctgacaagcctggtggagaaacacactcttgagaaagaggagttaagaaaagagctcttggaaaagcaccaaagggagcttcaggagggaagggaaaaaatggaaacagagtgtaatagaagaacctctcaaatagaagcccagtttcagtctgattgtcagaaagtcactgagaggtgtgaaagcgctctgcaaagcctggaggggcgctaccgccaagagctgaaggacctccaggaacagcagcgtgaggagaaatcccagtgggaatttgagaaggacgagctcacccaggagtgtgcggaagcccaggagctgctgaaagagactcttaagagagagaaaacaacttctctggtcctgacccaggagagagagatgctggagaaaacatacaaagaacatttgaacagcatggtcgtcgagagacagcagctactccaagacctggaagacctaagaaatgtatctgaaacccagcaaagcctgctgtctgaccagatacttgagctgaagagcagtcacaaaagggaactgagggagcgtgaggaggtcctgtgccaggcaggggcttcggagcagctggccagccagcggctggaaagactagaaatggaacatgaccaggaaaggcaggaaatgatgtccaagcttctagccatggagaacattcacaaagcgacctgtgagacagcagatcgagaaagagccgagatgagcacagaaatctccagacttcagagtaaaataaaggaaatgcagcaggcaacatctcctctctcaatgcttcagagtggttgccaggtgataggagaggaggaggtggaaggagatggagccctgtccctgcttcagcaaggggagcagctgttggaagaaaatggggacgtcctcttaagcctgcagagagctcatgaacaggcagtgaaggaaaatgtgaaaatggctactgaaatttctagattgcaacagaggctacaaaagttagagccagggttagtaatgtcttcttgtttggatgagccagctactgagttttttggaaatactgcggaacaaacagagcagtttttacagcaaaaccgaacgaagcaagtagaaggtgtgaccaggcggcatgtcctaagtgacctggaagatgatgaggtccgggacctgggaagtacagggacgagctctgttcagagacaggaagtcaaaatagaggagtctgaagcttcagtagagggtttttctgagcttgaaaacagtgaagagaccaggactgaatcctgggagctgaagaatcagattagtcagcttcaggaacagctaatgatgttatgtgcggactgtgatcgagcttctgaaaagaaacaggacctactttttgatgtttctgtgctaaaaaagaaactgaagatgcttgagagaatccctgaggcttctcccaaatataagctgttgtatgaagatgtgagccgagaaaatgactgccttcaggaagagctgagaatgatggagacacgctacgatgaggcactagaaaataacaaagaactcactgcagaggttttcaggttgcaggatgagctgaagaaaatggaggaagtcactgaaacattcctcagcctggaaaagagttacgatgaggtcaaaatagaaaatgaggggctgaatgttctggttttgagacttcaaggcaagattgagaagcttcaggaaagcgtggaaggcaatgatgcatgacttgcagatcacgtgcagtgagatgcagcaaaaagttgaacttctgagatatgaatctgaaaagcttcaacaggaaaattctattttgagaaatgaaattactactttaaatcattaaattttattttcatcattccttttaggcaaaaaacggaaactgtaaaacaagaaaatgctgcagttcagaagatggttgaaaatttaaagaaacagatttcagaattaaaaatcaaaaaccaacaattggatttggaaaatacagaacttagccaaaagaactctcaaaaccaggaaaaactgcaagaacttaatcaacgtctaacagaaatgctatgccagaaggaaaaagagccaggaaacagtgcattggaggaacgggaacaagagaagtttaatctgaaagaagaactggaacgttgtaaagtgcagtcctccactttagtgtcttctctggaggcggagctctctgaagttaaaatacagacccatattgtgcaacaggaaaaccaccttctcaaagatgaactggagaaaatgaaacagctgcacagatgtcccgatctctctgacttccagcaaaaaatctctagtgttctaagctacaacgaaaaactgctgaaagaaaaggaagctctgagtgaggaattaaatagctgtgtcgataagttggcaaaatcaagtcttttagagcatagaattgcgacgatgaagcaggaacagaaatcctgggaacatcagagtgcgagcttaaagtcacagctggtggcttctcaggaaaaggttcagaatttagaagacaccgtgcagaatgtaaacctgcaaatgtcccggatgaaatctgacctacgagtgactcagcaggaaaaggaggctttaaaacaagaagtgatgtctttacataagcaacttcagaatgctggtggcaagagctgggccccagagatagctactcatccatcagggctccataaccagcagaaaaggctgtcctgggacaagttggatcatctgatgaatgaggaacagcagctgctttggcaagagaatgagaggctccagaccatggtacagaacaccaaagccgaactcacgcactcccgggagaaggtccgtcagttggaatccaatcttcttcccaagcaccaaaaacatctaaacccatcaggtaccatgaatcccacagagcaagaaaaattgagcttaaagagagagtgtgatcagtttcagaaagaacaatctcctgctaacaggaaggtcagtcagatgaattcccttgaacaagaattagaaacaattcatttggaaaatgaaggcctgaaaaagaaacaagtaaaactggatgagcagctcatggagatgcagcacctgaggtccactgcgacgcctagcccgtcccctcatgcttgggatttgcagctgctccagcagcaagcctgtccgatggtgcccagggagcagtttctgcagcttcaacgccagctgctgcaggcagaaaggataaaccagcacctgcaggaggaacttgaaaacaggacctccgaaaccaacacaccacagggaaaccaggaacaactggtaactgtcatggaggaacgaatgatagaagttgaacagaaactgaaactagtgaaaaggcttcttcaagagaaagtgaatcagctcaaagaacaactctgcaagaacactaaggcagacgcaatggtgaaggacttgtatgttgaaaatgcccagttgttgaaagctctggaagtgactgaacagcgacagaaaacagcagagaagaaaaattacctcctggaggagaagattgccagcctcagtaatatagttaggaatctgacaccagcgccattgacttctacacctcctttgaggtcatagccaaaccaaagggtacactcatatttgtgcactttactgaaatagatgaacatttcagtaggttctcaacttaaaattaagcctaacctaaaactgccagcaacacaactggagtttccatttatcataattagtttttctaaatagacccttatgggagtttgaaaataaatactcacatatttcactacttaaattattcccaagatttgaatttattttaaaattttaatagccaccaagaatgtggacatatgaaaattcaagaacctaaaaaataccagttttgaatgagtttttgtggttttggttttttttttaattattacaaatctatgtgtaaaatctagatatttgaagtttgagatctgatgagaatggttgttataaactttattttaaaaccaaatttaggtgttcttacatatttaaatactggaaagtcattataatagttttggttctttgaattggtagacaattagtagagtataattggttaggaggcagggcttattaagtggttattaaccgctgacatcagacaaacccaaatctgtagaattctaaccttctaacacctgtgacagtattaccactcttcttgtattatagatttagaactgatttactcaattgcactcttaactaatgttaaaagcttacttgctttaaacagccttttcttctttctcttaaaagtttcatttggggagctggtcttctaagaaacggataaagccacataattaaagcagttgaactatagggaaagcactgaacaaaccactttggagtaaatagctactcttagaaaagagggataagcagaccatgtaggttttctgtctctcaaatcttagagttcataaatttacttgaggttgcctcaagaactcagggaacaatactgtaaactgtcttcctgaactactgtagggcctctctaagaatttgaaatgtataaaccatgtgacctcatttatttgtcttatatatttacagccatactagaatttttatttctacgtttttagtaaatttaatattctgggggaaaaaaggccttgattttagggttaaaaacctgacttatagaagagtttatttaatataggtcaaaattttctgtgtttcttattccttctatacctcaaatctgattctaagaatttcttactgtgataatcattggcatgccacctgaggtcaaggagtgccaaataggactttccactcatgctcaagatcaaaactttatagaacagtcaacattttagattcggtaaccttttttttcttccaattataatctctgctagccacttccgccagcagttggtggaagacttactaggtgcagggcactttccaagttcatcacaacaacctgcttgttttcatgagacaataatccgaaaagttcgctttgatatattcctggagggccaagcccatctatttacaaaaggtgaacagcaaaatcaagcactgctttatgggcaggaacacaagagaaagcaaactgcccaagaagtcatcatgtcagaaactcaatctcaacaaaataatttccaagtgtttgactacttgtatggcattagctttcacagaaaattgtttcacttaaaactgtggattggcctaggctaaggacaaaaataaactaagtacctgtagtgtatttatgtgatatgtgtcaagttactcaaagttattgctgttggaactgaacaataatatttcccagatagctggccttagcatgtgatcacggttgttgtatttttaatttttgtcttttacagtatgagaggtgtaggttaatttgtttatttcctataaatttgtatttatgtgtatataaaatgtacaatgaatgtaaatatgactttctggaaagtttagactacatttagaatctctattcaaaatcaaaatgctgctcaaatgaatttaaccaacatctaggtgcttaatttctcattttatcccacttatgagattgggaaaaagatcaatatgagaaataccatacagataccttaaatgtatgcatttgtgcaacaatttttgagaaggtgagtggcaatttataatttagttggcaatttataatagaacttatagcttttaaaagaccttttaaagacattaaatgtaaacttaaaaatgtttagatcttgtttcaaactttacaatagcattcttcaaaatattaagttatatattttataggcatttagttgcttattaaaagcactgattttcaaactttttgatttaagaacaattatttaagatcgtctcagaagatgggatcttcgtttcaagaaaagggaatcaagtttgcctttgagataatacgttacactaagaaaaggaaaatgtggatagtaaaacccacctctctcatcctattgtactctcttctgctttttagaagcctgcacttaagcttagatttgtgaagggagagtagaaggggagaagtagaaccacagtgttttatttatttttctaaaactcttactaaatccagattttttaaactgttttaaatgtgaattcttcccagaaatttcaatgcattgcatatttagccttcggcatatttttcatgaatagatcatgaagtcataggcttccaaggcataggaagagatcttgcaggtctagtattttaataatgcactattacccagggcagatattatgagaaactgtttcttctctaagggtttatggcagactttgcttttttaacatgtgagaaatgaattttttattttgtgatttatgtgatttcttttgctgagtgaaggaaaggagaaattgttgctattgtcagcatcttaaaggtatttccagtcaaggcaaggctaagtgctttgtgatagtattaagcaagtcatgttttgaatggattacctgtagtgactcattggaatgatataattatacaagtaatgccaaaaaccaagtcaaagcctaattaaccaaagcactcatttaaaaatcatcatgtttggacctatctggacctctcagcactgtaaaatagttttggttttgtggcatatgaatagctgtttaacaaatcaaagttagctttttgcttctcagcttttttgggcaatacaagttaagttcttaatggggagacattatcatggcatgacttaagggaacattggtttgtgaaggaaaaacagattatctaaagccatctctatgtttctgttcagataaagattaatgagttctgtgtttatatcagctttgtatatttcatcttagccattctatcctagaaagattttaatgtgagcttaagatgtaaataaataattttgcaaacatgccttttgttttctatataccctgaccttttaataaagtttcagtgtatttatcattg

SEQ ID NO: 9858 - protein, 1326 aa, Homo sapiens
MDEVEQDQHEARLKELFDSFDTTGTGSLGQEELTDLCHMLSLEEVAPVLQQTLLQDNLLGRVHFDQFKEALILILSRTLSNEEHFQEPDCSLEAQPKYVRGGKRYGRRSLPEFQESVEEFPEVTVIEPLDEEARPSHIPAGDCSEHWKTQRSEEYEAEGQLRFWNPDDLNASQSGSSPPQDWIEEKLQEVCEDLGITRDGHLNRKKLVSICEQYGLQNVDGEMLEEVFHNLDPDGTMSVEDFFYGLFKNGKSLTPSASTPYRQLKRHLSMQSFDESGRRTTTSSAMTSTIGFRVFSCLDDGMGHASVERILDTWQEEGIENSQEILKALDFSLDGNINLTELTLALENELLVTKNSIHQAALASFKAEIRHLLERVDQVVREKEKLRSDLDKAEKLKSLMASEVDDHHAAIERRNEYNLRKLDEEYKERIAALKNELRKEREQILQQAGKQRLELEQEIEKAKTEENYIRDRLALSLKENSRLENELLENAEKLAEYFGDLDPSSAEFFLQEERLTQMRNEYERQCRVLQDQVDELQSELEEYRAQGRVLRLPLKNSPSEEVEANSGGIEPEHGLGSEECNPLNMSIEAELVIEQMKEQHHRDICCLRLELEDKVRHYEKQLDETVVSCKKAQENMKQRHENETHTLEKQISDLKNEIAELQGQAAVLKEAHHEATCRHEEEKKQLQVKLEEEKTHLQEKLRLQHEMELKARLTQAQASFEREREGLQSSAWTEEKVRGLTQELEQFHQEQLTSLVEKHTLEKEELRKELLEKHQRELQEGREKMETECNRRTSQIEAQFQSDCQKVTERCESALQSLEGRYRQELKDLQEQQREEKSQWEFEKDELTQECAEAQELLKETLKREKTTSLVLTQEREMLEKTYKEHLNSMVVERQQLLQDLEDLRNVSETQQSLLSDQILELKSSHKRELREREEVLCQAGASEQLASQRLERLEMEHDQERQEMMSKLLAMENIHKATCETADRERAEMSTEISRLQSKIKEMQQATSPLSMLQSGCQVIGEEEVEGDGALSLLQQGEQLLEENGDVLLSLQRAHEQAVKENVKMATEISRLQQRLQKLEPGLVMSSCLDEPATEFFGNTAEQTEQFLQQNRTKQVEGVTRRHVLSDLEDDEVRDLGSTGTSSVQRQEVKIEESEASVEGFSELENSEETRTESWELKNQISQLQEQLMMLCADCDRASEKKQDLLFDVSVLKKKLKMLERIPEASPKYKLLYEDVSRENDCLQEELRMMETRYDEALENNKELTAEVFRLQDELKKMEEVTETFLSLEKSYDEVKIENEGLNVLVLRLQGKIEKLQESVEGNDA

SEQ ID NO: 9859 - DNA, 4804 bp, Homo sapiens
cattctgcatgtcttttaaagtatatcttaactaccatcagctgttaatacctttatgaaatctgaaattccttatggggacattttggtggactgcagagggatgggggttgcattctaataagtcaattgcattctaatctctctaggtctctctcctctccaaaactcacttactccttaacccatcaccgttgtgtgagaacaggagatttttcattttcaatctgctctgatagtaaacccatcctccaatccagatgtgtgcttcacatttacaagtgggaaacagatgactagaaaaattggcaggaagaggctattatgaagaaagaaacttaccaccctcacagtcatcagccacttcaaaggaaaaacagacatgcatattgcaagctgattggttatgttaggaaaccctgaatatattcagtgcttgttttgttgttgagaggcccataacattgcagagacccagatcacagatgggaggttgatagcgatcttccaagttaccttggatgtccattttactagaggtactcacaggtattaaattatgggttttcagaattttgctttatatcagggggatgatggtaacacaggtaagattcttttgatttttcagtctgatcctttatctgatagggttacttttctgacatatgcaatccatgcagggctcaaaactctcatttcatgagaaatccatccttcctgttacaaaggcaaaacatttgctgtcctttctctaggcatcttgtggggaaaataaaccagtgttttcagtgtgacatgattttcgaataatatacttttcttcccttcagggaaaccaggaacaactggtaactgtcatggaggaacgaatgatagaagttgaacagaaactgaaactagtgaaaaggcttcttcaagagaaagtgaatcagctcaaagaacaactctgcaagaacactaaggcagacgcaatggtgaaggacttgtatgttgaaaatgcccagttgttgaaagctctggaagtgactgaacagcgacagaaaacagcagagaagaaaaattacctcctggaggagaagattgccagcctcagtaatatagttaggaatctgacaccagcgccattgacttctacacctcctttgaggtcatagccaaaccaaagggtacactcatatttgtgcactttactgaaatagatgaacatttcagtaggttctcaacttaaaattaagcctaacctaaaactgccagcaacacaactggagtttccatttatcataattagtttttctaaatagacccttatgggagtttgaaaataaatactcacatatttcactacttaaattattcccaagatttgaatttattttaaaattttaatagccaccaagaatgtggacatatgaaaattcaagaacctaaaaaataccagttttgaatgagtttttgtggttttggttttttttttaattattacaaatctatgtgtaaaatctagatatttgaagtttgagatctgatgagaatggttgttataaactttattttaaaaccaaatttaggtgttcttacatatttaaatactggaaagtcattataatagttttggttctttgaattggtagacaattagtagagtataattggttaggaggcagggcttattaagtggttattaaccgctgacatcagacaaacccaaatctgtagaattctaaccttctaacacctgtgacagtattaccactcttcttgtattatagatttagaactgatttactcaattgcactcttaactaatgttaaaagcttacttgctttaaacagccttttcttctttctcttaaaagtttcatttggggagctggtcttctaagaaacggataaagccacataattaaagcagttgaactatagggaaagcactgaacaaaccactttggagtaaatagctactcttagaaaagagggataagcagaccatgtaggttttctgtctctcaaatcttagagttcataaatttacttgaggttgcctcaagaactcagggaacaatactgtaaactgtcttcctgaactactgtagggcctctctaagaatttgaaatgtataaaccatgtgacctcatttatttgtcttatatatttacagccatactagaatttttatttctacgtttttagtaaatttaatattctgggggaaaaaaggccttgattttagggttaaaaacctgacttatagaagagtttatttaatataggtcaaaattttctgtgtttcttattccttctatacctcaaatctgattctaagaatttcttactgtgataatcattggcatgccacctgaggtcaaggagtgccaaataggactttccactcatgctcaagatcaaaactttatagaacagtcaacattttagattcggtaaccttttttttcttccaattataatctctgctagccacttccgccagcagttggtggaagacttactaggtgcagggcactttccaagttcatcacaacaacctgcttgttttcatgagacaataatccgaaaagttcgctttgatatattcctggagggccaagcccatctatttacaaaaggtgaacagcaaaatcaagcactgctttatgggcaggaacacaagagaaagcaaactgcccaagaagtcatcatgtcagaaactcaatctcaacaaaataatttccatcagggaacttcagggtttcttgggggcttatgagtctcaccggtcaacccaggaggcctcactacaagagccttgacaaggcactgttttttgtgggactgggagttcacactgatgaagcaaacctttgaatttttgcacagctcttgtcagaaagccctgagttccccctggataaagagttaattttaatccttccctataattatacttcaaaatatttgacatctgctattatgccttctttagatctttcttctgtggtgcagacatttctagtaagtgtttgactacttgtatggcattagctttcacagaaaattgtttcacttaaaactgtggattggcctaggctaaggacaaaaataaactaagtacctgtagtgtatttatgtgatatgtgtcaagttactcaaagttattgctgttggaactgaacaataatatttcccagatagctggccttagcatgtgatcacggttgttgtatttttaatttttgtcttttacagtatgagaggtgtaggttaatttgtttatttcctataaatttgtatttatgtgtatataaaatgtacaatgaatgtaaatatgactttctggaaagtttagactacatttagaatctctattcaaaatcaaaatgctgctcaaatgaatttaaccaacatctaggtgcttaatttctcattttatcccacttatgagattgggaaaaagatcaatatgagaaataccatacagataccttaaatgtatgcatttgtgcaacaatttttgagaaggtgagtggcaatttataatttagttggcaatttataatagaacttatagcttttaaaagaccttttaaagacattaaatgtaaacttaaaaatgtttagatcttgtttcaaactttacaatagcattcttcaaaatattaagttatatattttataggcatttagttgcttattaaaagcactgattttcaaactttttgatttaagaacaattatttaagatcgtctcagaagatgggatcttcgtttcaagaaaagggaatcaagtttgcctttgagataatacgttacactaagaaaaggaaaatgtggatagtaaaacccacctctctcatcctattgtactctcttctgctttttagaagcctgcacttaagcttagatttgtgaagggagagtagaaggggagaagtagaaccacagtgttttatttatttttctaaaactcttactaaatccagattttttaaactgttttaaatgtgaattcttcccagaaatttcaatgcattgcatatttagccttcggcatatttttcatgaatagatcatgaagtcataggcttccaaggcataggaagagatcttgcaggtctagtattttaataatgcactattacccagggcagatattatgagaaactgtttcttctctaagggtttatggcagactttgcttttttaacatgtgagaaatgaattttttattttgtgatttatgtgatttcttttgctgagtgaaggaaaggagaaattgttgctattgtcagcatcttaaaggtatttccagtcaaggcaaggctaagtgctttgtgatagtattaagcaagtcatgttttgaatggattacctgtagtgactcattggaatgatataattatacaagtaatgccaaaaaccaagtcaaagcctaattaaccaaagcactcatttaaaaatcatcatgtttggacctatctggacctctcagcactgtaaaatagttttggttttgtggcatatgaatagctgtttaacaaatcaaagttagctttttgcttctcagcttttttgggcaatacaagttaagttcttaatggggagacattatcatggcatgacttaagggaacattggtttgtgaaggaaaaacagattatctaaagccatctctatgtttctgttcagataaagattaatgagttctgtgtttatatcagctttgtatatttcatcttagccattctatcctagaaagattttaatgtgagcttaagatgtaaataaataattttgcaaacatgc

SEQ ID NO: 9860 - protein, 98 aa, Homo sapiens; identical to SEQ ID NO: 9856

SEQ ID NO: 9861 - DNA, 3122 bp, Homo sapiens
cattctgcatgtcttttaaagtatatcttaactaccatcagctgttaatacctttatgaaatctgaaattccttatggggacattttggtggactgcagagggatgggggttgcattctaataagtcaattgcattctaatctctctaggtctctctcctctccaaaactcacttactccttaacccatcaccgttgtgtgagaacaggagatttttcattttcaatctgctctgatagtaaacccatcctccaatccagatgtgtgcttcacatttacaagtgggaaacagatgactagaaaaattggcaggaagaggctattatgaagaaagaaacttaccaccctcacagtcatcagccacttcaaaggaaaaacagacatgcatattgcaagctgattggttatgttaggaaaccctgaatatattcagtgcttgttttgttgttgagaggcccataacattgcagagacccagatcacagatgggaggttgatagcgatcttccaagttaccttggatgtccattttactagaggtactcacaggtattaaattatgggttttcagaattttgctttatatcagggggatgatggtaacacaggtaagattcttttgatttttcagtctgatcctttatctgatagggttacttttctgacatatgcaatccatgcagggctcaaaactctcatttcatgagaaatccatccttcctgttacaaaggcaaaacatttgctgtcctttctctaggcatcttgtggggaaaataaaccagtgttttcagtgtgacatgattttcgaataatatacttttcttcccttcagggaaaccaggaacaactggtaactgtcatggaggaacgaatgatagaagttgaacagaaactgaaactagtgaaaaggcttcttcaagagaaagtgaatcagctcaaagaacaactctgcaagaacactaaggcagacgcaatggtgaaggacttgtatgttgaaaatgcccagttgttgaaagctctggaagtgactgaacagcgacagaaaacagcagagaagaaaaattacctcctggaggagaagattgccagcctcagtaatatagttaggaatctgacaccagcgccattgacttctacacctcctttgaggtcatagccaaaccaaagggtacactcatatttgtgcactttactgaaatagatgaacatttcagtaggttctcaacttaaaattaagcctaacctaaaactgccagcaacacaactggagtttccatttatcataattagtttttctaaatagacccttatgggagtttgaaaataaatactcacatatttcactacttaaattattcccaagatttgaatttattttaaaattttaatagccaccaagaatgtggacatatgaaaattcaagaacctaaaaaataccagttttgaatgagtttttgtggttttggttttttttttaattattacaaatctatgtgtaaaatctagatatttgaagtttgagatctgatgagaatggttgttataaactttattttaaaaccaaatttaggtgttcttacatatttaaatactggaaagtcattataatagttttggttctttgaattggtagacaattagtagagtataattggttaggaggcagggcttattaagtggttattaaccgctgacatcagacaaacccaaatctgtagaattctaaccttctaacacctgtgacagtattaccactcttcttgtattatagatttagaactgatttactcaattgcactcttaactaatgttaaaagcttacttgctttaaacagccttttcttctttctcttaaaagtttcatttggggagctggtcttctaagaaacggataaagccacataattaaagcagttgaactatagggaaagcactgaacaaaccactttggagtaaatagctactcttagaaaagagggataagcagaccatgtaggttttctgtctctcaaatcttagagttcataaatttacttgaggttgcctcaagaactcagggaacaatactgtaaactgtcttcctgaactactgtagggcctctctaagaatttgaaatgtataaaccatgtgacctcatttatttgtcttatatatttacagccatactagaatttttatttctacgtttttagtaaatttaatattctgggggaaaaaaggccttgattttagggttaaaaacctgacttatagaagagtttatttaatataggtcaaaattttctgtgtttcttattccttctatacctcaaatctgattctaagaatttcttactgtgataatcattggcatgccacctgaggtcaaggagtgccaaataggactttccactcatgctcaagatcaaaactttatagaacagtcaacattttagattcggtaaccttttttttcttccaattataatctctgctagccacttccgccagcagttggtggaagacttactaggtgcagggcactttccaagttcatcacaacaacctgcttgttttcatgagacaataatccgaaaagttcgctttgatatattcctggagggccaagcccatctatttacaaaaggtgaacagcaaaatcaagcactgctttatgggcaggaacacaagagaaagcaaactgcccaagaagtcatcatgtcagaaactcaatctcaacaaaataatttccatcagggaacttcagggtttcttgggggcttatgagtctcaccggtcaacccaggaggcctcactacaagagccttgacaaggcactgttttttgtgggactgggagttcacactgatgaagcaaacctttgaatttttgcacagctcttgtcagaaagccctgagttccccctggataaagagttaattttaatccttccctataattatacttcaaaatatttgacatctgctattatgccttctttagatctttcttctgtggtgcagacatttctagtaagtgtttgactacttgtatggcattagctttcacagaaaattgtttcacttaaaactgtggattggcctaggctaaggacaaaaataaactaagtacctgtagtgt

SEQ ID NO: 9862 - protein, 98 aa, Homo sapiens; identical to SEQ ID NO: 9856

SEQ ID NO: 9863 - DNA, 6180 bp, Homo sapiens
tcacatttatcttctgtgtccacccagttctgctgaaacccctggcaagatcgtggccctgttgtagcttgtcatgttttgaacagctgtctatggaaagaaagcaaacacaacctagagcaacattgatttgttttagaaagctcttttattttcagttctggctgtgttcaacatcttagcttacgtttttcatgttgtaatgatctgccgtatggacgatcacctctaagttagagagttctgtaatttggcttggattaaagatgcttggttagtgaaagctgctgctttttttatagtcaaaggactggttctgagagccttgttgcagatggctgaggtcaccgtcccaagggtgtatgtcgtgtttggcatccattgcatcatggcgaaggcatcttcagatgtgcaggtttcaggctttcatcggaaaatccagcacgttaaaaatgaactttgccacatgttgagcttggaggaggtggccccagtgctgcagcagacattacttcaggacaacctcttgggcagggtacattttgaccaatttaaagaagcattaatactcatcttgtccagaactctgtcaaatgaagaacactttcaagaaccagactgctcactagaagctcagcccaaatatgttagaggtgggaagcgttacggacgaaggtccttgcccgagttccaagagtccgtggaggagtttcctgaagtgacggtgattgagccactggatgaagaagcgcggccttcacacatcccagccggtgactgcagtgagcactggaagacgcaacgcagtgaggagtatgaagcggaaggccagttaaggttttggaacccagatgacttgaatgcttcacagagtggatcttcccctccccaagactggatagaagagaaactgcaagaagtttgtgaagatttggggatcacccgtgatggtcacctgaaccggaagaagctggtctccatctgtgagcagtatggtttacagaatgtggatggagagatgctcgaggaagtattccataatcttgatcctgacggtacaatgagtgtagaagattttttctatggtttgtttaaaaatggaaaatctcttacaccatcagcatctactccatatagacaactaaaaaggcacctttccatgcagtctttcgatgagagtggacgacgtaccacaacctcatcagcaatgacaagtaccattggctttcgggtcttctcctgcctggatgatgggatgggccatgcatctgtggagagaatactggacacctggcaggaagagggcattgagaacagccaggagatcctgaaggccttggatttcagcctcgatggaaacatcaatttgacagaattaacactggcccttgaaaatgaacttttggttaccaagaacagcattcaccaggcggctctggccagctttaaggctgaaatccggcatttgttggaacgagttgatcaggtggtcagagaaaaagagaagctacggtcagatctggacaaggccgagaagctcaagtctttaatggcctcggaggtggatgatcaccatgcggccatagagcggcggaatgagtacaacctcaggaaactggatgaagagtacaaggagcgaatagcagccttaaaaaatgaactccgaaaagagagagagcagatcctgcagcaggcaggcaagcagcgtttagaacttgaacaggaaattgaaaaggcaaaaacagaagagaactatatccgggaccgccttgccctctctttaaaggaaaacagtcgtctggaaaatgagcttctagaaaatgcagagaagttggcagaatatgagaatctgacaaacaaacttcagagaaatttggaaaatgtgttagcagaaaagtttggtgacctcgatcctagcagtgctgagttcttcctgcaagaagagagactgacacagatgagaaatgaatatgagcggcagtgcagggtactacaagaccaagtagatgaactccagtctgagctggaagaatatcgtgcacaaggcagagtgctcaggcttccgttgaagaactcaccgtcagaagaagttgaggctaacagcggtggcattgagcccgaacacgggctcggttctgaagaatgcaatccattgaatatgagcattgaggcagagctggtcattgaacagatgaaagaacaacatcacagggacatatgttgcctcagactggagctcgaagataaagtgcgccattatgaaaagcagctggacgaaaccgtggtcagctgcaagaaggcacaggagaacatgaagcaaaggcatgagaacgaaacgcacaccttagaaaaacaaataagtgaccttaaaaatgaaattgctgaacttcaggggcaagcagcagtgctcaaggaggcacatcatgaggccacttgcaggcatgaggaggagaaaaaacaactgcaagtgaagcttgaggaggaaaagactcacctgcaggagaagctgaggctgcaacatgagatggagctcaaggctagactgacacaggctcaagcaagctttgagcgggagagggaaggccttcagagtagcgcctggacagaagagaaggtgagaggcttgactcaggaactagagcagtttcaccaggagcagctgacaagcctggtggagaaacacactcttgagaaagaggagttaagaaaagagctcttggaaaagcaccaaagggagcttcaggagggaagggaaaaaatggaaacagagtgtaatagaagaacctctcaaatagaagcccagtttcagtctgattgtcagaaagtcactgagaggtgtgaaagcgctctgcaaagcctggaggggcgctaccgccaagagctgaaggacctccaggaacagcagcgtgaggagaaatcccagtgggaatttgagaaggacgagctcacccaggagtgtgcggaagcccaggagctgctgaaagagactcttaagagagagaaaacaacttctctggtcctgacccaggagagagagatgctggagaaaacatacaaagaacatttgaacagcatggtcgtcgagagacagcagctactccaagacctggaagacctaagaaatgtatctgaaacccagcaaagcctgctgtctgaccagatacttgagctgaagagcagtcacaaaagggaactgagggagcgtgaggaggtcctgtgccaggcaggggcttcggagcagctggccagccagcggctggaaagactagaaatggaacatgaccaggaaaggcaggaaatgatgtccaagcttctagccatggagaacattcacaaagcgacctgtgagacagcagatcgagaaagagccgagatgagcacagaaatctccagacttcagagtaaaataaaggaaatgcagcaggcaacatctcctctctcaatgcttcagagtggttgccaggtgataggagaggaggaggtggaaggagatggagccctgtccctgcttcagcaaggggagcagctgttggaagaaaatggggacgtcctcttaagcctgcagagagctcatgaacaggcagtgaaggaaaatgtgaaaatggctactgaaatttctagattgcaacagaggctacaaaagttagagccagggttagtaatgtcttcttgtttggatgagccagctactgagttttttggaaatactgcggaacaaacagagcagtttttacagcaaaaccgaacgaagcaagtagaaggtgtgaccaggcggcatgtcctaagtgacctggaagatgatgaggtccgggacctgggaagtacagggacgagctctgttcagagacaggaagtcaaaatagaggagtctgaagcttcagtagagggtttttctgagcttgaaaacagtgaagagaccaggactgaatcctgggagctgaagaatcagattagtcagcttcaggaacagctaatgatgttatgtgcggactgtgatcgagcttctgaaaagaaacaggacctactttttgatgtttctgtgctaaaaaagaaactgaagatgcttgagagaatccctgaggcttctcccaaatataagctgttgtatgaagatgtgagccgagaaaatgactgccttcaggaagagctgagaatgatggagacacgctacgatgaggcactagaaaataacaaagaactcactgcagaggttttcaggttgcaggatgagctgaagaaaatggaggaagtcactgaaacattcctcagcctggaaaagagttacgatgaggtcaaaatagaaaatgaggggctgaatgttctggttttgagacttcaaggcaagattgagaagcttcaggaaagcgtggaaggcaatgatgcatgacttgcagatcacgtgcagtgagatgcagcaaaaagttgaacttctgagatatgaatctgaaaagcttcaacaggaaaattctattttgagaaatgaaattactactttaaatcattaaattttattttcatcattccttttaggcaaaaaacggaaactgtaaaacaagaaaatgctgcagttcagaagatggttgaaaatttaaagaaacagatttcagaattaaaaatcaaaaaccaacaattggatttggaaaatacagaacttagccaaaagaactctcaaaaccaggaaaaactgcaagaacttaatcaacgtctaacagaaatgctatgccagaaggaaaaagagccaggaaacagtgcattggaggaacgggaacaagagaagtttaatctgaaagaagaactggaacgttgtaaagtgcagtcctccactttagtgtcttctctggaggcggagctctctgaagttaaaatacagacccatattgtgcaacaggaaaaccaccttctcaaagatgaactggagaaaatgaaacagctgcacagatgtcccgatctctctgacttccagcaaaaaatctctagtgttctaagctacaacgaaaaactgctgaaagaaaaggaagctctgagtgaggaattaaatagctgtgtcgataagttggcaaaatcaagtcttttagagcatagaattgcgacgatgaagcaggaacagaaatcctgggaacatcagagtgcgagcttaaagtcacagctggtggcttctcaggaaaaggttcagaatttagaagacaccgtgcagaatgtaaacctgcaaatgtcccggatgaaatctgacctacgagtgactcagcaggaaaaggaggctttaaaacaagaagtgatgtctttacataagcaacttcagaatgctggtggcaagagctgggccccagagatagctactcatccatcagggctccataaccagcagaaaaggctgtcctgggacaagttggatcatctgatgaatgaggaacagcagctgctttggcaagagaatgagaggctccagaccatggtacagaacaccaaagccgaactcacgcactcccgggagaaggtccgtcagttggaatccaatcttcttcccaagcaccaaaaacatctaaacccatcaggtaccatgaatcccacagagcaagaaaaattgagcttaaagagagagtgtgatcagtttcagaaagaacaatctcctgctaacaggaaggtcagtcagatgaattcccttgaacaagaattagaaacaattcatttggaaaatgaaggcctgaaaaagaaacaagtaaaactggatgagcagctcatggagatgcagcacctgaggtccactgcgacgcctagcccgtcccctcatgcttgggatttgcagctgctccagcagcaagcctgtccgatggtgcccagggagcagtttctgcagcttcaacgccagctgctgcaggcagaaaggataaaccagcacctgcaggaggaacttgaaaacaggacctccgaaaccaacacaccacagggaaaccaggaacaactggtaactgtcatggaggaacgaatgatagaagttgaacagaaactgaaactagtgaaaaggcttcttcaagagaaagtgaatcagctcaaagaacaagtgagcctacccggtcatctctgttcacccacctcacattccagctttaactccagttttacatccctttattgccattaactcgttaacttatgttgtctaataaaggcaaattctattat

SEQ ID NO: 9864 - protein, 1350 aa, Homo sapiens
MAEVTVPRVYVVFGIHCIMAKASSDVQVSGFHRKIQHVKNELCHMLSLEEVAPVLQQTLLQDNLLGRVHFDQFKEALILILSRTLSNEEHFQEPDCSLEAQPKYVRGGKRYGRRSLPEFQESVEEFPEVTVIEPLDEEARPSHIPAGDCSEHWKTQRSEEYEAEGQLRFWNPDDLNASQSGSSPPQDWIEEKLQEVCEDLGITRDGHLNRKKLVSICEQYGLQNVDGEMLEEVFHNLDPDGTMSVEDFFYGLFKNGKSLTPSASTPYRQLKRHLSMQSFDESGRRTTTSSAMTSTIGFRVFSCLDDGMGHASVERILDTWQEEGIENSQEILKALDFSLDGNINLTELTLALENELLVTKNSIHQAALASFKAEIRHLLERVDQVVREKEKLRSDLDKAEKLKSLMASEVDDHHAAIERRNEYNLRKLDEEYKERIAALKNELRKEREQILQQAGKQRLELEQEIEKAKTEENYIRDRLALSLKENSRLENELLENAEKLAEYENLTNKLQRNLENVLAEKFGDLDPSSAEFFLQEERLTQMRNEYERQCRVLQDQVDELQSELEEYRAQGRVLRLPLKNSPSEEVEANSGGIEPEHGLGSEECNPLNMSIEAELVIEQMKEQHHRDICCLRLELEDKVRHYEKQLDETVVSCKKAQENMKQRHENETHTLEKQISDLKNEIAELQGQAAVLKEAHHEATCRHEEEKKQLQVKLEEEKTHLQEKLRLQHEMELKARLTQAQASFEREREGLQSSAWTEEKVRGLTQELEQFHQEQLTSLVEKHTLEKEELRKELLEKHQRELQEGREKMETECNRRTSQIEAQFQSDCQKVTERCESALQSLEGRYRQELKDLQEQQREEKSQWEFEKDELTQECAEAQELLKETLKREKTTSLVLTQEREMLEKTYKEHLNSMVVERQQLLQDLEDLRNVSETQQSLLSDQILELKSSHKRELREREEVLCQAGASEQLASQRLERLEMEHDQERQEMMSKLLAMENIHKATCETADRERAEMSTEISRLQSKIKEMQQATSPLSMLQSGCQVIGEEEVEGDGALSLLQQGEQLLEENGDVLLSLQRAHEQAVKENVKMATEISRLQQRLQKLEPGLVMSSCLDEPATEFFGNTAEQTEQFLQQNRTKQVEGVTRRHVLSDLEDDEVRDLGSTGTSSVQRQEVKIEESEASVEGFSELENSEETRTESWELKNQISQLQEQLMMLCADCDRASEKKQDLLFDVSVLKKKLKMLERIPEASPKYKLLYEDVSRENDCLQEELRMMETRYDEALENNKELTAEVFRLQDELKKMEEVTETFLSLEKSYDEVKIENEGLNVLVLRLQGKIEKLQESVEGNDA

SEQ ID NO: 9865 - DNA, 6585 bp, Homo sapiens
gagctccgggtggccgcggccgagccgggagccgagcgcgctgggcgcggccgtcccgctgccgccgccaagcccggagtgcgccagcggccatggttcccgcggcggcgccgggcgcctgagccccgggacgcaagcgctggaggcgggctgccggctgtgcgggcgctccggagagaccgacagaaggtgagcactgtgggctatgggatggatgaggtggagcaggaccagcatgaggcccgactcaaggagctgtttgacagttttgacacgacgggcacagggtccctggggcaggaggaactcaccgacctttgccacatgttgagcttggaggaggtggccccagtgctgcagcagacattacttcaggacaacctcttgggcagggtacattttgaccaatttaaagaagcattaatactcatcttgtccagaactctgtcaaatgaagaacactttcaagaaccagactgctcactagaagctcagcccaaatatgttagaggtgggaagcgttacggacgaaggtccttgcccgagttccaagagtccgtggaggagtttcctgaagtgacggtgattgagccactggatgaagaagcgcggccttcacacatcccagccggtgactgcagtgagcactggaagacgcaacgcagtgaggagtatgaagcggaaggccagttaaggttttggaacccagatgacttgaatgcttcacagagtggatcttcccctccccaagactggatagaagagaaactgcaagaagtttgtgaagatttggggatcacccgtgatggtcacctgaaccggaagaagctggtctccatctgtgagcagtatggtttacagaatgtggatggagagatgctcgaggaagtattccataatcttgatcctgacggtacaatgagtgtagaagattttttctatggtttgtttaaaaatggaaaatctcttacaccatcagcatctactccatatagacaactaaaaaggcacctttccatgcagtctttcgatgagagtggacgacgtaccacaacctcatcagcaatgacaagtaccattggctttcgggtcttctcctgcctggatgatgggatgggccatgcatctgtggagagaatactggacacctggcaggaagagggcattgagaacagccaggagatcctgaaggccttggatttcagcctcgatggaaacatcaatttgacagaattaacactggcccttgaaaatgaacttttggttaccaagaacagcattcaccaggcggctctggccagctttaaggctgaaatccggcatttgttggaacgagttgatcaggtggtcagagaaaaagagaagctacggtcagatctggacaaggccgagaagctcaagtctttaatggcctcggaggtggatgatcaccatgcggccatagagcggcggaatgagtacaacctcaggaaactggatgaagagtacaaggagcgaatagcagccttaaaaaatgaactccgaaaagagagagagcagatcctgcagcaggcaggcaagcagcgtttagaacttgaacaggaaattgaaaaggcaaaaacagaagagaactatatccgggaccgccttgccctctctttaaaggaaaacagtcgtctggaaaatgagcttctagaaaatgcagagaagttggcagaatatgagaatctgacaaacaaacttcagagaaatttggaaaatgtgttagcagaaaagtttggtgacctcgatcctagcagtgctgagttcttcctgcaagaagagagactgacacagatgagaaatgaatatgagcggcagtgcagggtactacaagaccaagtagatgaactccagtctgagctggaagaatatcgtgcacaaggcagagtgctcaggcttccgttgaagaactcaccgtcagaagaagttgaggctaacagcggtggcattgagcccgaacacgggctcggttctgaagaatgcaatccattgaatatgagcattgaggcagagctggtcattgaacagatgaaagaacaacatcacagggacatatgttgcctcagactggagctcgaagataaagtgcgccattatgaaaagcagctggacgaaaccgtggtcagctgcaagaaggcacaggagaacatgaagcaaaggcatgagaacgaaacgcacaccttagaaaaacaaataagtgaccttaaaaatgaaattgctgaacttcaggggcaagcagcagtgctcaaggaggcacatcatgaggccacttgcaggcatgaggaggagaaaaaacaactgcaagtgaagcttgaggaggaaaagactcacctgcaggagaagctgaggctgcaacatgagatggagctcaaggctagactgacacaggctcaagcaagctttgagcgggagagggaaggccttcagagtagcgcctggacagaagagaaggtgagaggcttgactcaggaactagagcagtttcaccaggagcagctgacaagcctggtggagaaacacactcttgagaaagaggagttaagaaaagagctcttggaaaagcaccaaagggagcttcaggagggaagggaaaaaatggaaacagagtgtaatagaagaacctctcaaatagaagcccagtttcagtctgattgtcagaaagtcactgagaggtgtgaaagcgctctgcaaagcctggaggggcgctaccgccaagagctgaaggacctccaggaacagcagcgtgaggagaaatcccagtgggaatttgagaaggacgagctcacccaggagtgtgcggaagcccaggagctgctgaaagagactcttaagagagagaaaacaacttctctggtcctgacccaggagagagagatgctggagaaaacatacaaagaacatttgaacagcatggtcgtcgagagacagcagctactccaagacctggaagacctaagaaatgtatctgaaacccagcaaagcctgctgtctgaccagatacttgagctgaagagcagtcacaaaagggaactgagggagcgtgaggaggtcctgtgccaggcaggggcttcggagcagctggccagccagcggctggaaagactagaaatggaacatgaccaggaaaggcaggaaatgatgtccaagcttctagccatggagaacattcacaaagcgacctgtgagacagcagatcgagaaagagccgagatgagcacagaaatctccagacttcagagtaaaataaaggaaatgcagcaggcaacatctcctctctcaatgcttcagagtggttgccaggtgataggagaggaggaggtggaaggagatggagccctgtccctgcttcagcaaggggagcagctgttggaagaaaatggggacgtcctcttaagcctgcagagagctcatgaacaggcagtgaaggaaaatgtgaaaatggctactgaaatttctagattgcaacagaggctacaaaagttagagccagggttagtaatgtcttcttgtttggatgagccagctactgagttttttggaaatactgcggaacaaacagagcagtttttacagcaaaaccgaacgaagcaagtagaaggtgtgaccaggcggcatgtcctaagtgacctggaagatgatgaggtccgggacctgggaagtacagggacgagctctgttcagagacaggaagtcaaaatagaggagtctgaagcttcagtagagggtttttctgagcttgaaaacagtgaagagaccaggactgaatcctgggagctgaagaatcagattagtcagcttcaggaacagctaatgatgttatgtgcggactgtgatcgagcttctgaaaagaaacaggacctactttttgatgtttctgtgctaaaaaagaaactgaagatgcttgagagaatccctgaggcttctcccaaatataagctgttgtatgaagatgtgagccgagaaaatgactgccttcaggaagagctgagaatgatggagacacgctacgatgaggcactagaaaataacaaagaactcactgcagaggttttcaggttgcaggatgagctgaagaaaatggaggaagtcactgaaacattcctcagcctggaaaagagttacgatgaggtcaaaatagaaaatgaggggctgaatgttctggttttgagacttcaaggcaagattgagaagcttcaggaaagcgtggtccagcggtgtgactgctgcttatgggaagccagtttagagaacctggaaatcgaacctgatggaaatatactccagctcaatcagacactggaagagtgtgtgcccagggttaggagtgtacatcatgtcatagaggaatgtaagcaagaaaaccagtaccttgaggggaacacacagctcttggaaaaagtaaaagcacatgaaattgcctggttacatggaacaattcagacacatcaagaaaggccaagagtacagaatcaagttatactggaggaaaacactactctcctaggctttcaagacaaacattttcagcatcaggccaccatagcagagttagaactggagaaaacaaagttacaggagctgactaggaagttgaaggagagagtcactattttagttaagcaaaaagatgtactttctcacggagaaaaggaggaagagctgaaggcaatgatgcatgacttgcagatcacgtgcagtgagatgcagcaaaaagttgaacttctgagatatgaatctgaaaagcttcaacaggaaaattctattttgagaaatgaaattactactttaaatgaagaagatagcatttctaacctgaaattagggacattaaatggatctcaggaagaaatgtggcaaaaaacggaaactgtaaaacaagaaaatgctgcagttcagaagatggttgaaaatttaaagaaacagatttcagaattaaaaatcaaaaaccaacaattggatttggaaaatacagaacttagccaaaagaactctcaaaaccaggaaaaactgcaagaacttaatcaacgtctaacagaaatgctatgccagaaggaaaaagagccaggaaacagtgcattggaggaacgggaacaagagaagtttaatctgaaagaagaactggaacgttgtaaagtgcagtcctccactttagtgtcttctctggaggcggagctctctgaagttaaaatacagacccatattgtgcaacaggaaaaccaccttctcaaagatgaactggagaaaatgaaacagctgcacagatgtcccgatctctctgacttccagcaaaaaatctctagtgttctaagctacaacgaaaaactgctgaaagaaaaggaagctctgagtgaggaattaaatagctgtgtcgataagttggcaaaatcaagtcttttagagcatagaattgcgacgatgaagcaggaacagaaatcctgggaacatcagagtgcgagcttaaagtcacagctggtggcttctcaggaaaaggttcagaatttagaagacaccgtgcagaatgtaaacctgcaaatgtcccggatgaaatctgacctacgagtgactcagcaggaaaaggaggctttaaaacaagaagtgatgtctttacataagcaacttcagaatgctggtggcaagagctgggccccagagatagctactcatccatcagggctccataaccagcagaaaaggctgtcctgggacaagttggatcatctgatgaatgaggaacagcagctgctttggcaagagaatgagaggctccagaccatggtacagaacaccaaagccgaactcacgcactcccgggagaaggtccgtcagttggaatccaatcttcttcccaagcaccaaaaacatctaaacccatcaggtaccatgaatcccacagagcaagaaaaattgagcttaaagagagagtgtgatcagtttcagaaagaacaatctcctgctaacaggaaggtcagtcagatgaattcccttgaacaagaattagaaacaattcatttggaaaatgaaggcctgaaaaagaaacaagtaaaactggatgagcagctcatggagaactcagtggttggaagtagcagagaagggtgcagttctctgcctgagatagtgtgtgaagatgcagcacctgaggtccactgcgacgcctagcccgtcccctcatgcttgggatttgcagctgctccagcagcaagcctgtccgatggtgcccagggagcagtttctgcagcttcaacgccagctgctgcaggcagaaaggataaaccagcacctgcaggaggaacttgaaaacaggacctccgaaaccaacacaccacagggaaaccaggaacaactggtaactgtcatggaggaacgaatgatagaagttgaacagaaactgaaactagtgaaaaggcttcttcaagagaaagtgaatcagctcaaagaacaagtgagcctacccggtcatctctgttcacccacctcacattccagctttaactccagttttacatccctttattgccattaactcgttaacttatgttgtctaataaaggcaaattctattat

SEQ ID NO: 9866 - protein, 1989 aa, Homo sapiens
MDEVEQDQHEARLKELFDSFDTTGTGSLGQEELTDLCHMLSLEEVAPVLQQTLLQDNLLGRVHFDQFKEALILILSRTLSNEEHFQEPDCSLEAQPKYVRGGKRYGRRSLPEFQESVEEFPEVTVIEPLDEEARPSHIPAGDCSEHWKTQRSEEYEAEGQLRFWNPDDLNASQSGSSPPQDWIEEKLQEVCEDLGITRDGHLNRKKLVSICEQYGLQNVDGEMLEEVFHNLDPDGTMSVEDFFYGLFKNGKSLTPSASTPYRQLKRHLSMQSFDESGRRTTTSSAMTSTIGFRVFSCLDDGMGHASVERILDTWQEEGIENSQEILKALDFSLDGNINLTELTLALENELLVTKNSIHQAALASFKAEIRHLLERVDQVVREKEKLRSDLDKAEKLKSLMASEVDDHHAAIERRNEYNLRKLDEEYKERIAALKNELRKEREQILQQAGKQRLELEQEIEKAKTEENYIRDRLALSLKENSRLENELLENAEKLAEYENLTNKLQRNLENVLAEKFGDLDPSSAEFFLQEERLTQMRNEYERQCRVLQDQVDELQSELEEYRAQGRVLRLPLKNSPSEEVEANSGGIEPEHGLGSEECNPLNMSIEAELVIEQMKEQHHRDICCLRLELEDKVRHYEKQLDETVVSCKKAQENMKQRHENETHTLEKQISDLKNEIAELQGQAAVLKEAHHEATCRHEEEKKQLQVKLEEEKTHLQEKLRLQHEMELKARLTQAQASFEREREGLQSSAWTEEKVRGLTQELEQFHQEQLTSLVEKHTLEKEELRKELLEKHQRELQEGREKMETECNRRTSQIEAQFQSDCQKVTERCESALQSLEGRYRQELKDLQEQQREEKSQWEFEKDELTQECAEAQELLKETLKREKTTSLVLTQEREMLEKTYKEHLNSMVVERQQLLQDLEDLRNVSETQQSLLSDQILELKSSHKRELREREEVLCQAGASEQLASQRLERLEMEHDQERQEMMSKLLAMENIHKATCETADRERAEMSTEISRLQSKIKEMQQATSPLSMLQSGCQVIGEEEVEGDGALSLLQQGEQLLEENGDVLLSLQRAHEQAVKENVKMATEISRLQQRLQKLEPGLVMSSCLDEPATEFFGNTAEQTEQFLQQNRTKQVEGVTRRHVLSDLEDDEVRDLGSTGTSSVQRQEVKIEESEASVEGFSELENSEETRTESWELKNQISQLQEQLMMLCADCDRASEKKQDLLFDVSVLKKKLKMLERIPEASPKYKLLYEDVSRENDCLQEELRMMETRYDEALENNKELTAEVFRLQDELKKMEEVTETFLSLEKSYDEVKIENEGLNVLVLRLQGKIEKLQESVVQRCDCCLWEASLENLEIEPDGNILQLNQTLEECVPRVRSVHHVIEECKQENQYLEGNTQLLEKVKAHEIAWLHGTIQTHQERPRVQNQVILEENTTLLGFQDKHFQHQATIAELELEKTKLQELTRKLKERVTILVKQKDVLSHGEKEEELKAMMHDLQITCSEMQQKVELLRYESEKLQQENSILRNEITTLNEEDSISNLKLGTLNGSQEEMWQKTETVKQENAAVQKMVENLKKQISELKIKNQQLDLENTELSQKNSQNQEKLQELNQRLTEMLCQKEKEPGNSALEEREQEKFNLKEELERCKVQSSTLVSSLEAELSEVKIQTHIVQQENHLLKDELEKMKQLHRCPDLSDFQQKISSVLSYNEKLLKEKEALSEELNSCVDKLAKSSLLEHRIATMKQEQKSWEHQSASLKSQLVASQEKVQNLEDTVQNVNLQMSRMKSDLRVTQQEKEALKQEVMSLHKQLQNAGGKSWAPEIATHPSGLHNQQKRLSWDKLDHLMNEEQQLLWQENERLQTMVQNTKAELTHSREKVRQLESNLLPKHQKHLNPSGTMNPTEQEKLSLKRECDQFQKEQSPANRKVSQMNSLEQELETIHLENEGLKKKQVKLDEQLMENSVVGSSREGCSSLPEIVCEDAAPEVHCDA

SEQ ID NO: 9867 - DNA, 6524 bp, Homo sapiens
gagctccgggtggccgcggccgagccgggagccgagcgcgctgggcgcggccgtcccgctgccgccgccaagcccggagtgcgccagcggccatggttcccgcggcggcgccgggcgcctgagccccgggacgcaagcgctggaggcgggctgccggctgtgcgggcgctccggagagaccgacagaaggtgagcactgtgggctatgggatggatgaggtggagcaggaccagcatgaggcccgactcaaggagctgtttgacagttttgacacgacgggcacagggtccctggggcaggaggaactcaccgacctttgccacatgttgagcttggaggaggtggccccagtgctgcagcagacattacttcaggacaacctcttgggcagggtacattttgaccaatttaaagaagcattaatactcatcttgtccagaactctgtcaaatgaagaacactttcaagaaccagactgctcactagaagctcagcccaaatatgttagaggtgggaagcgttacggacgaaggtccttgcccgagttccaagagtccgtggaggagtttcctgaagtgacggtgattgagccactggatgaagaagcgcggccttcacacatcccagccggtgactgcagtgagcactggaagacgcaacgcagtgaggagtatgaagcggaaggccagttaaggttttggaacccagatgacttgaatgcttcacagagtggatcttcccctccccaagactggatagaagagaaactgcaagaagtttgtgaagatttggggatcacccgtgatggtcacctgaaccggaagaagctggtctccatctgtgagcagtatggtttacagaatgtggatggagagatgctcgaggaagtattccataatcttgatcctgacggtacaatgagtgtagaagattttttctatggtttgtttaaaaatggaaaatctcttacaccatcagcatctactccatatagacaactaaaaaggcacctttccatgcagtctttcgatgagagtggacgacgtaccacaacctcatcagcaatgacaagtaccattggctttcgggtcttctcctgcctggatgatgggatgggccatgcatctgtggagagaatactggacacctggcaggaagagggcattgagaacagccaggagatcctgaaggccttggatttcagcctcgatggaaacatcaatttgacagaattaacactggcccttgaaaatgaacttttggttaccaagaacagcattcaccaggcggctctggccagctttaaggctgaaatccggcatttgttggaacgagttgatcaggtggtcagagaaaaagagaagctacggtcagatctggacaaggccgagaagctcaagtctttaatggcctcggaggtggatgatcaccatgcggccatagagcggcggaatgagtacaacctcaggaaactggatgaagagtacaaggagcgaatagcagccttaaaaaatgaactccgaaaagagagagagcagatcctgcagcaggcaggcaagcagcgtttagaacttgaacaggaaattgaaaaggcaaaaacagaagagaactatatccgggaccgccttgccctctctttaaaggaaaacagtcgtctggaaaatgagcttctagaaaatgcagagaagttggcagaatatgagaatctgacaaacaaacttcagagaaatttggaaaatgtgttagcagaaaagtttggtgacctcgatcctagcagtgctgagttcttcctgcaagaagagagactgacacagatgagaaatgaatatgagcggcagtgcagggtactacaagaccaagtagatgaactccagtctgagctggaagaatatcgtgcacaaggcagagtgctcaggcttccgttgaagaactcaccgtcagaagaagttgaggctaacagcggtggcattgagcccgaacacgggctcggttctgaagaatgcaatccattgaatatgagcattgaggcagagctggtcattgaacagatgaaagaacaacatcacagggacatatgttgcctcagactggagctcgaagataaagtgcgccattatgaaaagcagctggacgaaaccgtggtcagctgcaagaaggcacaggagaacatgaagcaaaggcatgagaacgaaacgcacaccttagaaaaacaaataagtgaccttaaaaatgaaattgctgaacttcaggggcaagcagcagtgctcaaggaggcacatcatgaggccacttgcaggcatgaggaggagaaaaaacaactgcaagtgaagcttgaggaggaaaagactcacctgcaggagaagctgaggctgcaacatgagatggagctcaaggctagactgacacaggctcaagcaagctttgagcgggagagggaaggccttcagagtagcgcctggacagaagagaaggtgagaggcttgactcaggaactagagcagtttcaccaggagcagctgacaagcctggtggagaaacacactcttgagaaagaggagttaagaaaagagctcttggaaaagcaccaaagggagcttcaggagggaagggaaaaaatggaaacagagtgtaatagaagaacctctcaaatagaagcccagtttcagtctgattgtcagaaagtcactgagaggtgtgaaagcgctctgcaaagcctggaggggcgctaccgccaagagctgaaggacctccaggaacagcagcgtgaggagaaatcccagtgggaatttgagaaggacgagctcacccaggagtgtgcggaagcccaggagctgctgaaagagactcttaagagagagaaaacaacttctctggtcctgacccaggagagagagatgctggagaaaacatacaaagaacatttgaacagcatggtcgtcgagagacagcagctactccaagacctggaagacctaagaaatgtatctgaaacccagcaaagcctgctgtctgaccagatacttgagctgaagagcagtcacaaaagggaactgagggagcgtgaggaggtcctgtgccaggcaggggcttcggagcagctggccagccagcggctggaaagactagaaatggaacatgaccaggaaaggcaggaaatgatgtccaagcttctagccatggagaacattcacaaagcgacctgtgagacagcagatcgagaaagagccgagatgagcacagaaatctccagacttcagagtaaaataaaggaaatgcagcaggcaacatctcctctctcaatgcttcagagtggttgccaggtgataggagaggaggaggtggaaggagatggagccctgtccctgcttcagcaaggggagcagctgttggaagaaaatggggacgtcctcttaagcctgcagagagctcatgaacaggcagtgaaggaaaatgtgaaaatggctactgaaatttctagattgcaacagaggctacaaaagttagagccagggttagtaatgtcttcttgtttggatgagccagctactgagttttttggaaatactgcggaacaaacagagcagtttttacagcaaaaccgaacgaagcaagtagaaggtgtgaccaggcggcatgtcctaagtgacctggaagatgatgaggtccgggacctgggaagtacagggacgagctctgttcagagacaggaagtcaaaatagaggagtctgaagcttcagtagagggtttttctgagcttgaaaacagtgaagagaccaggactgaatcctgggagctgaagaatcagattagtcagcttcaggaacagctaatgatgttatgtgcggactgtgatcgagcttctgaaaagaaacaggacctactttttgatgtttctgtgctaaaaaagaaactgaagatgcttgagagaatccctgaggcttctcccaaatataagctgttgtatgaagatgtgagccgagaaaatgactgccttcaggaagagctgagaatgatggagacacgctacgatgaggcactagaaaataacaaagaactcactgcagaggttttcaggttgcaggatgagctgaagaaaatggaggaagtcactgaaacattcctcagcctggaaaagagttacgatgaggtcaaaatagaaaatgaggggctgaatgttctggttttgagacttcaaggcaagattgagaagcttcaggaaagcgtggtccagcggtgtgactgctgcttatgggaagccagtttagagaacctggaaatcgaacctgatggaaatatactccagctcaatcagacactggaagagtgtgtgcccagggttaggagtgtacatcatgtcatagaggaatgtaagcaagaaaaccagtaccttgaggggaacacacagctcttggaaaaagtaaaagcacatgaaattgcctggttacatggaacaattcagacacatcaagaaaggccaagagtacagaatcaagttatactggaggaaaacactactctcctaggctttcaagacaaacattttcagcatcaggccaccatagcagagttagaactggagaaaacaaagttacaggagctgactaggaagttgaaggagagagtcactattttagttaagcaaaaagatgtactttctcacggagaaaaggaggaagagctgaaggcaatgatgcatgacttgcagatcacgtgcagtgagatgcagcaaaaagttgaacttctgagatatgaatctgaaaagcttcaacaggaaaattctattttgagaaatgaaattactactttaaatgaagaagatagcatttctaacctgaaattagggacattaaatggatctcaggaagaaatgtggcaaaaaacggaaactgtaaaacaagaaaatgctgcagttcagaagatggttgaaaatttaaagaaacagatttcagaattaaaaatcaaaaaccaacaattggatttggaaaatacagaacttagccaaaagaactctcaaaaccaggaaaaactgcaagaacttaatcaacgtctaacagaaatgctatgccagaaggaaaaagagccaggaaacagtgcattggaggaacgggaacaagagaagtttaatctgaaagaagaactggaacgttgtaaagtgcagtcctccactttagtgtcttctctggaggcggagctctctgaagttaaaatacagacccatattgtgcaacaggaaaaccaccttctcaaagatgaactggagaaaatgaaacagctgcacagatgtcccgatctctctgacttccagcaaaaaatctctagtgttctaagctacaacgaaaaactgctgaaagaaaaggaagctctgagtgaggaattaaatagctgtgtcgataagttggcaaaatcaagtcttttagagcatagaattgcgacgatgaagcaggaacagaaatcctgggaacatcagagtgcgagcttaaagtcacagctggtggcttctcaggaaaaggttcagaatttagaagacaccgtgcagaatgtaaacctgcaaatgtcccggatgaaatctgacctacgagtgactcagcaggaaaaggaggctttaaaacaagaagtgatgtctttacataagcaacttcagaatgctggtggcaagagctgggccccagagatagctactcatccatcagggctccataaccagcagaaaaggctgtcctgggacaagttggatcatctgatgaatgaggaacagcagctgctttggcaagagaatgagaggctccagaccatggtacagaacaccaaagccgaactcacgcactcccgggagaaggtccgtcagttggaatccaatcttcttcccaagcaccaaaaacatctaaacccatcaggtaccatgaatcccacagagcaagaaaaattgagcttaaagagagagtgtgatcagtttcagaaagaacaatctcctgctaacaggaaggtcagtcagatgaattcccttgaacaagaattagaaacaattcatttggaaaatgaaggcctgaaaaagaaacaagtaaaactggatgagcagctcatggagatgcagcacctgaggtccactgcgacgcctagcccgtcccctcatgcttgggatttgcagctgctccagcagcaagcctgtccgatggtgcccagggagcagtttctgcagcttcaacgccagctgctgcaggcagaaaggataaaccagcacctgcaggaggaacttgaaaacaggacctccgaaaccaacacaccacagggaaaccaggaacaactggtaactgtcatggaggaacgaatgatagaagttgaacagaaactgaaactagtgaaaaggcttcttcaagagaaagtgaatcagctcaaagaacaagtgagcctacccggtcatctctgttcacccacctcacattccagctttaactccagttttacatccctttattgccattaactcgttaacttatgttgtctaataaaggcaaattctattat

SEQ ID NO: 9868 - protein, 2090 aa, Homo sapiens
MDEVEQDQHEARLKELFDSFDTTGTGSLGQEELTDLCHMLSLEEVAPVLQQTLLQDNLLGRVHFDQFKEALILILSRTLSNEEHFQEPDCSLEAQPKYVRGGKRYGRRSLPEFQESVEEFPEVTVIEPLDEEARPSHIPAGDCSEHWKTQRSEEYEAEGQLRFWNPDDLNASQSGSSPPQDWIEEKLQEVCEDLGITRDGHLNRKKLVSICEQYGLQNVDGEMLEEVFHNLDPDGTMSVEDFFYGLFKNGKSLTPSASTPYRQLKRHLSMQSFDESGRRTTTSSAMTSTIGFRVFSCLDDGMGHASVERILDTWQEEGIENSQEILKALDFSLDGNINLTELTLALENELLVTKNSIHQAALASFKAEIRHLLERVDQVVREKEKLRSDLDKAEKLKSLMASEVDDHHAAIERRNEYNLRKLDEEYKERIAALKNELRKEREQILQQAGKQRLELEQEIEKAKTEENYIRDRLALSLKENSRLENELLENAEKLAEYENLTNKLQRNLENVLAEKFGDLDPSSAEFFLQEERLTQMRNEYERQCRVLQDQVDELQSELEEYRAQGRVLRLPLKNSPSEEVEANSGGIEPEHGLGSEECNPLNMSIEAELVIEQMKEQHHRDICCLRLELEDKVRHYEKQLDETVVSCKKAQENMKQRHENETHTLEKQISDLKNEIAELQGQAAVLKEAHHEATCRHEEEKKQLQVKLEEEKTHLQEKLRLQHEMELKARLTQAQASFEREREGLQSSAWTEEKVRGLTQELEQFHQEQLTSLVEKHTLEKEELRKELLEKHQRELQEGREKMETECNRRTSQIEAQFQSDCQKVTERCESALQSLEGRYRQELKDLQEQQREEKSQWEFEKDELTQECAEAQELLKETLKREKTTSLVLTQEREMLEKTYKEHLNSMVVERQQLLQDLEDLRNVSETQQSLLSDQILELKSSHKRELREREEVLCQAGASEQLASQRLERLEMEHDQERQEMMSKLLAMENIHKATCETADRERAEMSTEISRLQSKIKEMQQATSPLSMLQSGCQVIGEEEVEGDGALSLLQQGEQLLEENGDVLLSLQRAHEQAVKENVKMATEISRLQQRLQKLEPGLVMSSCLDEPATEFFGNTAEQTEQFLQQNRTKQVEGVTRRHVLSDLEDDEVRDLGSTGTSSVQRQEVKIEESEASVEGFSELENSEETRTESWELKNQISQLQEQLMMLCADCDRASEKKQDLLFDVSVLKKKLKMLERIPEASPKYKLLYEDVSRENDCLQEELRMMETRYDEALENNKELTAEVFRLQDELKKMEEVTETFLSLEKSYDEVKIENEGLNVLVLRLQGKIEKLQESVVQRCDCCLWEASLENLEIEPDGNILQLNQTLEECVPRVRSVHHVIEECKQENQYLEGNTQLLEKVKAHEIAWLHGTIQTHQERPRVQNQVILEENTTLLGFQDKHFQHQATIAELELEKTKLQELTRKLKERVTILVKQKDVLSHGEKEEELKAMMHDLQITCSEMQQKVELLRYESEKLQQENSILRNEITTLNEEDSISNLKLGTLNGSQEEMWQKTETVKQENAAVQKMVENLKKQISELKIKNQQLDLENTELSQKNSQNQEKLQELNQRLTEMLCQKEKEPGNSALEEREQEKFNLKEELERCKVQSSTLVSSLEAELSEVKIQTHIVQQENHLLKDELEKMKQLHRCPDLSDFQQKISSVLSYNEKLLKEKEALSEELNSCVDKLAKSSLLEHRIATMKQEQKSWEHQSASLKSQLVASQEKVQNLEDTVQNVNLQMSRMKSDLRVTQQEKEALKQEVMSLHKQLQNAGGKSWAPEIATHPSGLHNQQKRLSWDKLDHLMNEEQQLLWQENERLQTMVQNTKAELTHSREKVRQLESNLLPKHQKHLNPSGTMNPTEQEKLSLKRECDQFQKEQSPANRKVSQMNSLEQELETIHLENEGLKKKQVKLDEQLMEMQHLRSTATPSPSPHAWDLQLLQQQACPMVPREQFLQLQRQLLQAERINQHLQEELENRTSETNTPQGNQEQLVTVMEERMIEVEQKLKLVKRLLQEKVNQLKEQVSLPGHLCSPTSHSSFNSSFTSLYCH

SEQ ID NO: 9869 - DNA, 7669 bp, Homo sapiens
gagctccgggtggccgcggccgagccgggagccgagcgcgctgggcgcggccgtcccgctgccgccgccaagcccggagtgcgccagcggccatggttcccgcggcggcgccgggcgcctgagccccgggacgcaagcgctggaggcgggctgccggctgtgcgggcgctccggagagaccgacagaaggtgagcactgtgggctatgggatggatgaggtggagcaggaccagcatgaggcccgactcaaggagctgtttgacagttttgacacgacgggcacagggtccctggggcaggaggaactcaccgacctttgccacatgttgagcttggaggaggtggccccagtgctgcagcagacattacttcaggacaacctcttgggcagggtacattttgaccaatttaaagaagcattaatactcatcttgtccagaactctgtcaaatgaagaacactttcaagaaccagactgctcactagaagctcagcccaaatatgttagaggtgggaagcgttacggacgaaggtccttgcccgagttccaagagtccgtggaggagtttcctgaagtgacggtgattgagccactggatgaagaagcgcggccttcacacatcccagccggtgactgcagtgagcactggaagacgcaacgcagtgaggagtatgaagcggaaggccagttaaggttttggaacccagatgacttgaatgcttcacagagtggatcttcccctccccaagactggatagaagagaaactgcaagaagtttgtgaagatttggggatcacccgtgatggtcacctgaaccggaagaagctggtctccatctgtgagcagtatggtttacagaatgtggatggagagatgctcgaggaagtattccataatcttgatcctgacggtacaatgagtgtagaagattttttctatggtttgtttaaaaatggaaaatctcttacaccatcagcatctactccatatagacaactaaaaaggcacctttccatgcagtctttcgatgagagtggacgacgtaccacaacctcatcagcaatgacaagtaccattggctttcgggtcttctcctgcctggatgatgggatgggccatgcatctgtggagagaatactggacacctggcaggaagagggcattgagaacagccaggagatcctgaaggccttggatttcagcctcgatggaaacatcaatttgacagaattaacactggcccttgaaaatgaacttttggttaccaagaacagcattcaccaggcggctctggccagctttaaggctgaaatccggcatttgttggaacgagttgatcaggtggtcagagaaaaagagaagctacggtcagatctggacaaggccgagaagctcaagtctttaatggcctcggaggtggatgatcaccatgcggccatagagcggcggaatgagtacaacctcaggaaactggatgaagagtacaaggagcgaatagcagccttaaaaaatgaactccgaaaagagagagagcagatcctgcagcaggcaggcaagcagcgtttagaacttgaacaggaaattgaaaaggcaaaaacagaagagaactatatccgggaccgccttgccctctctttaaaggaaaacagtcgtctggaaaatgagcttctagaaaatgcagagaagttggcagaatattttggtgacctcgatcctagcagtgctgagttcttcctgcaagaagagagactgacacagatgagaaatgaatatgagcggcagtgcagggtactacaagaccaagtagatgaactccagtctgagctggaagaatatcgtgcacaaggcagagtgctcaggcttccgttgaagaactcaccgtcagaagaagttgaggctaacagcggtggcattgagcccgaacacgggctcggttctgaagaatgcaatccattgaatatgagcattgaggcagagctggtcattgaacagatgaaagaacaacatcacagggacatatgttgcctcagactggagctcgaagataaagtgcgccattatgaaaagcagctggacgaaaccgtggtcagctgcaagaaggcacaggagaacatgaagcaaaggcatgagaacgaaacgcacaccttagaaaaacaaataagtgaccttaaaaatgaaattgctgaacttcaggggcaagcagcagtgctcaaggaggcacatcatgaggccacttgcaggcatgaggaggagaaaaaacaactgcaagtgaagcttgaggaggaaaagactcacctgcaggagaagctgaggctgcaacatgagatggagctcaaggctagactgacacaggctcaagcaagctttgagcgggagagggaaggccttcagagtagcgcctggacagaagagaaggtgagaggcttgactcaggaactagagcagtttcaccaggagcagctgacaagcctggtggagaaacacactcttgagaaagaggagttaagaaaagagctcttggaaaagcaccaaagggagcttcaggagggaagggaaaaaatggaaacagagtgtaatagaagaacctctcaaatagaagcccagtttcagtctgattgtcagaaagtcactgagaggtgtgaaagcgctctgcaaagcctggaggggcgctaccgccaagagctgaaggacctccaggaacagcagcgtgaggagaaatcccagtgggaatttgagaaggacgagctcacccaggagtgtgcggaagcccaggagctgctgaaagagactcttaagagagagaaaacaacttctctggtcctgacccaggagagagagatgctggagaaaacatacaaagaacatttgaacagcatggtcgtcgagagacagcagctactccaagacctggaagacctaagaaatgtatctgaaacccagcaaagcctgctgtctgaccagatacttgagctgaagagcagtcacaaaagggaactgagggagcgtgaggaggtcctgtgccaggcaggggcttcggagcagctggccagccagcggctggaaagactagaaatggaacatgaccaggaaaggcaggaaatgatgtccaagcttctagccatggagaacattcacaaagcgacctgtgagacagcagatcgagaaagagccgagatgagcacagaaatctccagacttcagagtaaaataaaggaaatgcagcaggcaacatctcctctctcaatgcttcagagtggttgccaggtgataggagaggaggaggtggaaggagatggagccctgtccctgcttcagcaaggggagcagctgttggaagaaaatggggacgtcctcttaagcctgcagagagctcatgaacaggcagtgaaggaaaatgtgaaaatggctactgaaatttctagattgcaacagaggctacaaaagttagagccagggttagtaatgtcttcttgtttggatgagccagctactgagttttttggaaatactgcggaacaaacagagcagtttttacagcaaaaccgaacgaagcaagtagaaggtgtgaccaggcggcatgtcctaagtgacctggaagatgatgaggtccgggacctgggaagtacagggacgagctctgttcagagacaggaagtcaaaatagaggagtctgaagcttcagtagagggtttttctgagcttgaaaacagtgaagagaccaggactgaatcctgggagctgaagaatcagattagtcagcttcaggaacagctaatgatgttatgtgcggactgtgatcgagcttctgaaaagaaacaggacctactttttgatgtttctgtgctaaaaaagaaactgaagatgcttgagagaatccctgaggcttctcccaaatataagctgttgtatgaagatgtgagccgagaaaatgactgccttcaggaagagctgagaatgatggagacacgctacgatgaggcactagaaaataacaaagaactcactgcagaggttttcaggttgcaggatgagctgaagaaaatggaggaagtcactgaaacattcctcagcctggaaaagagttacgatgaggtcaaaatagaaaatgaggggctgaatgttctggttttgagacttcaaggcaagattgagaagcttcaggaaagcgtggaaggcaatgatgcatgacttgcagatcacgtgcagtgagatgcagcaaaaagttgaacttctgagatatgaatctgaaaagcttcaacaggaaaattctattttgagaaatgaaattactactttaaatcattaaattttattttcatcattccttttaggcaaaaaacggaaactgtaaaacaagaaaatgctgcagttcagaagatggttgaaaatttaaagaaacagatttcagaattaaaaatcaaaaaccaacaattggatttggaaaatacagaacttagccaaaagaactctcaaaaccaggaaaaactgcaagaacttaatcaacgtctaacagaaatgctatgccagaaggaaaaagagccaggaaacagtgcattggaggaacgggaacaagagaagtttaatctgaaagaagaactggaacgttgtaaagtgcagtcctccactttagtgtcttctctggaggcggagctctctgaagttaaaatacagacccatattgtgcaacaggaaaaccaccttctcaaagatgaactggagaaaatgaaacagctgcacagatgtcccgatctctctgacttccagcaaaaaatctctagtgttctaagctacaacgaaaaactgctgaaagaaaaggaagctctgagtgaggaattaaatagctgtgtcgataagttggcaaaatcaagtcttttagagcatagaattgcgacgatgaagcaggaacagaaatcctgggaacatcagagtgcgagcttaaagtcacagctggtggcttctcaggaaaaggttcagaatttagaagacaccgtgcagaatgtaaacctgcaaatgtcccggatgaaatctgacctacgagtgactcagcaggaaaaggaggctttaaaacaagaagtgatgtctttacataagcaacttcagaatgctggtggcaagagctgggccccagagatagctactcatccatcagggctccataaccagcagaaaaggctgtcctgggacaagttggatcatctgatgaatgaggaacagcagctgctttggcaagagaatgagaggctccagaccatggtacagaacaccaaagccgaactcacgcactcccgggagaaggtccgtcagttggaatccaatcttcttcccaagcaccaaaaacatctaaacccatcaggtaccatgaatcccacagagcaagaaaaattgagcttaaagagagagtgtgatcagtttcagaaagaacaatctcctgctaacaggaaggtcagtcagatgaattcccttgaacaagaattagaaacaattcatttggaaaatgaaggcctgaaaaagaaacaagtaaaactggatgagcagctcatggagatgcagcacctgaggtccactgcgacgcctagcccgtcccctcatgcttgggatttgcagctgctccagcagcaagcctgtccgatggtgcccagggagcagtttctgcagcttcaacgccagctgctgcaggcagaaaggataaaccagcacctgcaggaggaacttgaaaacaggacctccgaaaccaacacaccacaggccttgctaccggagcagcgagcagtgcacgcagattcctacagaaggattgggcacctgtgaaaactgggctgctattgatggcatttcttaccatggcagacagatgcacacacccacccatgcacacacaccacacacagagacataagctaagatatgttggaattaagtgctcttttaaattattttattatttttactgttaaacctttgcagtattatgtctcttatttatttatgtagaaatgacagatcttgtgaatcaaattcacaaacatcagcttgttacaaatcattttatttataccctttaaagagtgtggatttaagattcttgaaaggatgtagtctatatattttctcattccatatgttgtaactatttttaaccaaaggtactacttttatatatggaatttgaagaaaaccaggggtatttatactgttttgtataagatgtacaaatctttttgacaggaaatttttgatgaaacaataaaataaattttaagtatatgactgcctttgtttttcctgtttttccactcttttgccaactctatgttctttgaattatctttttttttgttttgctttgttgggcaaatagacatcattttgtatttatgtttgaactttaaaaagctattatttttttttaaatataggcctttttaaaagctagatgtcctccaggcccaattttttgtaacttacttcctgcattagacctttgcctattacaatttttatcctccggatagttactacatgatttagggtttcttttatgattaagtgttactacttagtatctaaacagatggtagcctttgactcatgtttagtcattctgcatgtcttttaaagtatatcttaactaccatcagctgttaatacctttatgaaatctgaaattccttatggggacattttggtggactgcagagggatgggggttgcattctaataagtcaattgcattctaatctctctaggtctctctcctctccaaaactcacttactccttaacccatcaccgttgtgtgagaacaggagatttttcattttcaatctgctctgatagtaaacccatcctccaatccagatgtgtgcttcacatttacaagtgggaaacagatgactagaaaaattggcaggaagaggctattatgaagaaagaaacttaccaccctcacagtcatcagccacttcaaaggaaaaacagacatgcatattgcaagctgattggttatgttaggaaaccctgaatatattcagtgcttgttttgttgttgagaggcccataacattgcagagacccagatcacagatgggaggttgatagcgatcttccaagttaccttggatgtccattttactagaggtactcacaggtattaaattatgggttttcagaattttgctttatatcagggggatgatggtaacacaggtaagattcttttgatttttcagtctgatcctttatctgatagggttacttttctgacatatgcaatccatgcagggctcaaaactctcatttcatgagaaatccatccttcctgttacaaaggcaaaacatttgctgtcctttctctaggcatcttgtggggaaaataaaccagtgttttcagtgtgacatgattttcgaataatatacttttcttcccttcagggaaaccaggaacaactggtaactgtcatggaggaacgaatgatagaagttgaacagaaactgaaactagtgaaaaggcttcttcaagagaaagtgaatcagctcaaagaacaagtgagcctacccggtcatctctgttcacccacctcacattccagctttaactccagttttacatccctttattgccattaactcgttaacttatgttgtctaataaaggcaaattctattat

SEQ ID NO: 9870 - protein, 1326 aa, Homo sapiens; identical to SEQ ID NO: 9858

SEQ ID NO: 9871 - DNA, 5984 bp, Homo sapiens
gagctccgggtggccgcggccgagccgggagccgagcgcgctgggcgcggccgtcccgctgccgccgccaagcccggagtgcgccagcggccatggttcccgcggcggcgccgggcgcctgagccccgggacgcaagcgctggaggcgggctgccggctgtgcgggcgctccggagagaccgacagaaggtgagcactgtgggctatgggatggatgaggtggagcaggaccagcatgaggcccgactcaaggagctgtttgacagttttgacacgacgggcacagggtccctggggcaggaggaactcaccgacctttgccacatgttgagcttggaggaggtggccccagtgctgcagcagacattacttcaggacaacctcttgggcagggtacattttgaccaatttaaagaagcattaatactcatcttgtccagaactctgtcaaatgaagaacactttcaagaaccagactgctcactagaagctcagcccaaatatgttagaggtgggaagcgttacggacgaaggtccttgcccgagttccaagagtccgtggaggagtttcctgaagtgacggtgattgagccactggatgaagaagcgcggccttcacacatcccagccggtgactgcagtgagcactggaagacgcaacgcagtgaggagtatgaagcggaaggccagttaaggttttggaacccagatgacttgaatgcttcacagagtggatcttcccctccccaagactggatagaagagaaactgcaagaagtttgtgaagatttggggatcacccgtgatggtcacctgaaccggaagaagctggtctccatctgtgagcagtatggtttacagaatgtggatggagagatgctcgaggaagtattccataatcttgatcctgacggtacaatgagtgtagaagattttttctatggtttgtttaaaaatggaaaatctcttacaccatcagcatctactccatatagacaactaaaaaggcacctttccatgcagtctttcgatgagagtggacgacgtaccacaacctcatcagcaatgacaagtaccattggctttcgggtcttctcctgcctggatgatgggatgggccatgcatctgtggagagaatactggacacctggcaggaagagggcattgagaacagccaggagatcctgaaggccttggatttcagcctcgatggaaacatcaatttgacagaattaacactggcccttgaaaatgaacttttggttaccaagaacagcattcaccaggcggctctggccagctttaaggctgaaatccggcatttgttggaacgagttgatcaggtggtcagagaaaaagagaagctacggtcagatctggacaaggccgagaagctcaagtctttaatggcctcggaggtggatgatcaccatgcggccatagagcggcggaatgagtacaacctcaggaaactggatgaagagtacaaggagcgaatagcagccttaaaaaatgaactccgaaaagagagagagcagatcctgcagcaggcaggcaagcagcgtttagaacttgaacaggaaattgaaaaggcaaaaacagaagagaactatatccgggaccgccttgccctctctttaaaggaaaacagtcgtctggaaaatgagcttctagaaaatgcagagaagttggcagaatattttggtgacctcgatcctagcagtgctgagttcttcctgcaagaagagagactgacacagatgagaaatgaatatgagcggcagtgcagggtactacaagaccaagtagatgaactccagtctgagctggaagaatatcgtgcacaaggcagagtgctcaggcttccgttgaagaactcaccgtcagaagaagttgaggctaacagcggtggcattgagcccgaacacgggctcggttctgaagaatgcaatccattgaatatgagcattgaggcagagctggtcattgaacagatgaaagaacaacatcacagggacatatgttgcctcagactggagctcgaagataaagtgcgccattatgaaaagcagctggacgaaaccgtggtcagctgcaagaaggcacaggagaacatgaagcaaaggcatgagaacgaaacgcacaccttagaaaaacaaataagtgaccttaaaaatgaaattgctgaacttcaggggcaagcagcagtgctcaaggaggcacatcatgaggccacttgcaggcatgaggaggagaaaaaacaactgcaagtgaagcttgaggaggaaaagactcacctgcaggagaagctgaggctgcaacatgagatggagctcaaggctagactgacacaggctcaagcaagctttgagcgggagagggaaggccttcagagtagcgcctggacagaagagaaggtgagaggcttgactcaggaactagagcagtttcaccaggagcagctgacaagcctggtggagaaacacactcttgagaaagaggagttaagaaaagagctcttggaaaagcaccaaagggagcttcaggagggaagggaaaaaatggaaacagagtgtaatagaagaacctctcaaatagaagcccagtttcagtctgattgtcagaaagtcactgagaggtgtgaaagcgctctgcaaagcctggaggggcgctaccgccaagagctgaaggacctccaggaacagcagcgtgaggagaaatcccagtgggaatttgagaaggacgagctcacccaggagtgtgcggaagcccaggagctgctgaaagagactcttaagagagagaaaacaacttctctggtcctgacccaggagagagagatgctggagaaaacatacaaagaacatttgaacagcatggtcgtcgagagacagcagctactccaagacctggaagacctaagaaatgtatctgaaacccagcaaagcctgctgtctgaccagatacttgagctgaagagcagtcacaaaagggaactgagggagcgtgaggaggtcctgtgccaggcaggggcttcggagcagctggccagccagcggctggaaagactagaaatggaacatgaccaggaaaggcaggaaatgatgtccaagcttctagccatggagaacattcacaaagcgacctgtgagacagcagatcgagaaagagccgagatgagcacagaaatctccagacttcagagtaaaataaaggaaatgcagcaggcaacatctcctctctcaatgcttcagagtggttgccaggtgataggagaggaggaggtggaaggagatggagccctgtccctgcttcagcaaggggagcagctgttggaagaaaatggggacgtcctcttaagcctgcagagagctcatgaacaggcagtgaaggaaaatgtgaaaatggctactgaaatttctagattgcaacagaggctacaaaagttagagccagggttagtaatgtcttcttgtttggatgagccagctactgagttttttggaaatactgcggaacaaacagagcagtttttacagcaaaaccgaacgaagcaagtagaaggtgtgaccaggcggcatgtcctaagtgacctggaagatgatgaggtccgggacctgggaagtacagggacgagctctgttcagagacaggaagtcaaaatagaggagtctgaagcttcagtagagggtttttctgagcttgaaaacagtgaagagaccaggactgaatcctgggagctgaagaatcagattagtcagcttcaggaacagctaatgatgttatgtgcggactgtgatcgagcttctgaaaagaaacaggacctactttttgatgtttctgtgctaaaaaagaaactgaagatgcttgagagaatccctgaggcttctcccaaatataagctgttgtatgaagatgtgagccgagaaaatgactgccttcaggaagagctgagaatgatggagacacgctacgatgaggcactagaaaataacaaagaactcactgcagaggttttcaggttgcaggatgagctgaagaaaatggaggaagtcactgaaacattcctcagcctggaaaagagttacgatgaggtcaaaatagaaaatgaggggctgaatgttctggttttgagacttcaaggcaagattgagaagcttcaggaaagcgtggaaggcaatgatgcatgacttgcagatcacgtgcagtgagatgcagcaaaaagttgaacttctgagatatgaatctgaaaagcttcaacaggaaaattctattttgagaaatgaaattactactttaaatcattaaattttattttcatcattccttttaggcaaaaaacggaaactgtaaaacaagaaaatgctgcagttcagaagatggttgaaaatttaaagaaacagatttcagaattaaaaatcaaaaaccaacaattggatttggaaaatacagaacttagccaaaagaactctcaaaaccaggaaaaactgcaagaacttaatcaacgtctaacagaaatgctatgccagaaggaaaaagagccaggaaacagtgcattggaggaacgggaacaagagaagtttaatctgaaagaagaactggaacgttgtaaagtgcagtcctccactttagtgtcttctctggaggcggagctctctgaagttaaaatacagacccatattgtgcaacaggaaaaccaccttctcaaagatgaactggagaaaatgaaacagctgcacagatgtcccgatctctctgacttccagcaaaaaatctctagtgttctaagctacaacgaaaaactgctgaaagaaaaggaagctctgagtgaggaattaaatagctgtgtcgataagttggcaaaatcaagtcttttagagcatagaattgcgacgatgaagcaggaacagaaatcctgggaacatcagagtgcgagcttaaagtcacagctggtggcttctcaggaaaaggttcagaatttagaagacaccgtgcagaatgtaaacctgcaaatgtcccggatgaaatctgacctacgagtgactcagcaggaaaaggaggctttaaaacaagaagtgatgtctttacataagcaacttcagaatgctggtggcaagagctgggccccagagatagctactcatccatcagggctccataaccagcagaaaaggctgtcctgggacaagttggatcatctgatgaatgaggaacagcagctgctttggcaagagaatgagaggctccagaccatggtacagaacaccaaagccgaactcacgcactcccgggagaaggtccgtcagttggaatccaatcttcttcccaagcaccaaaaacatctaaacccatcaggtaccatgaatcccacagagcaagaaaaattgagcttaaagagagagtgtgatcagtttcagaaagaacaatctcctgctaacaggaaggtcagtcagatgaattcccttgaacaagaattagaaacaattcatttggaaaatgaaggcctgaaaaagaaacaagtaaaactggatgagcagctcatggagatgcagcacctgaggtccactgcgacgcctagcccgtcccctcatgcttgggatttgcagctgctccagcagcaagcctgtccgatggtgcccagggagcagtttctgcagcttcaacgccagctgctgcaggcagaaaggataaaccagcacctgcaggaggaacttgaaaacaggacctccgaaaccaacacaccacagggaaaccaggaacaactggtaactgtcatggaggaacgaatgatagaagttgaacagaaactgaaactagtgaaaaggcttcttcaagagaaagtgaatcagctcaaagaacaagtgagcctacccggtcatctctgttcacccacctcacattccagctttaactccagttttacatccctttattgccattaactcgttaacttatgttgtctaataaaggcaaattctattat

SEQ ID NO: 9872 - protein, 1326 aa, Homo sapiens; identical to SEQ ID NO: 9858

SEQ ID NO: 9873 - DNA, 6266 bp, Homo sapiens
gagctccgggtggccgcggccgagccgggagccgagcgcgctgggcgcggccgtcccgctgccgccgccaagcccggagtgcgccagcggccatggttcccgcggcggcgccgggcgcctgagccccgggacgcaagcgctggaggcgggctgccggctgtgcgggcgctccggagagaccgacagaaggtgagcactgtgggctatgggatggatgaggtggagcaggaccagcatgaggcccgactcaaggagctgtttgacagttttgacacgacgggcacagggtccctggggcaggaggaactcaccgacctttgccacatgttgagcttggaggaggtggccccagtgctgcagcagacattacttcaggacaacctcttgggcagggtacattttgaccaatttaaagaagcattaatactcatcttgtccagaactctgtcaaatgaagaacactttcaagaaccagactgctcactagaagctcagcccaaatatgttagaggtgggaagcgttacggacgaaggtccttgcccgagttccaagagtccgtggaggagtttcctgaagtgacggtgattgagccactggatgaagaagcgcggccttcacacatcccagccggtgactgcagtgagcactggaagacgcaacgcagtgaggagtatgaagcggaaggccagttaaggttttggaacccagatgacttgaatgcttcacagagtggatcttcccctccccaagactggatagaagagaaactgcaagaagtttgtgaagatttggggatcacccgtgatggtcacctgaaccggaagaagctggtctccatctgtgagcagtatggtttacagaatgtggatggagagatgctcgaggaagtattccataatcttgatcctgacggtacaatgagtgtagaagattttttctatggtttgtttaaaaatggaaaatctcttacaccatcagcatctactccatatagacaactaaaaaggcacctttccatgcagtctttcgatgagagtggacgacgtaccacaacctcatcagcaatgacaagtaccattggctttcgggtcttctcctgcctggatgatgggatgggccatgcatctgtggagagaatactggacacctggcaggaagagggcattgagaacagccaggagatcctgaaggccttggatttcagcctcgatggaaacatcaatttgacagaattaacactggcccttgaaaatgaacttttggttaccaagaacagcattcaccaggcggctctggccagctttaaggctgaaatccggcatttgttggaacgagttgatcaggtggtcagagaaaaagagaagctacggtcagatctggacaaggccgagaagctcaagtctttaatggcctcggaggtggatgatcaccatgcggccatagagcggcggaatgagtacaacctcaggaaactggatgaagagtacaaggagcgaatagcagccttaaaaaatgaactccgaaaagagagagagcagatcctgcagcaggcaggcaagcagcgtttagaacttgaacaggaaattgaaaaggcaaaaacagaagagaactatatccgggaccgccttgccctctctttaaaggaaaacagtcgtctggaaaatgagcttctagaaaatgcagagaagttggcagaatattttggtgacctcgatcctagcagtgctgagttcttcctgcaagaagagagactgacacagatgagaaatgaatatgagcggcagtgcagggtactacaagaccaagtagatgaactccagtctgagctggaagaatatcgtgcacaaggcagagtgctcaggcttccgttgaagaactcaccgtcagaagaagttgaggctaacagcggtggcattgagcccgaacacgggctcggttctgaagaatgcaatccattgaatatgagcattgaggcagagctggtcattgaacagatgaaagaacaacatcacagggacatatgttgcctcagactggagctcgaagataaagtgcgccattatgaaaagcagctggacgaaaccgtggtcagctgcaagaaggcacaggagaacatgaagcaaaggcatgagaacgaaacgcacaccttagaaaaacaaataagtgaccttaaaaatgaaattgctgaacttcaggggcaagcagcagtgctcaaggaggcacatcatgaggccacttgcaggcatgaggaggagaaaaaacaactgcaagtgaagcttgaggaggaaaagactcacctgcaggagaagctgaggctgcaacatgagatggagctcaaggctagactgacacaggctcaagcaagctttgagcgggagagggaaggccttcagagtagcgcctggacagaagagaaggtgagaggcttgactcaggaactagagcagtttcaccaggagcagctgacaagcctggtggagaaacacactcttgagaaagaggagttaagaaaagagctcttggaaaagcaccaaagggagcttcaggagggaagggaaaaaatggaaacagagtgtaatagaagaacctctcaaatagaagcccagtttcagtctgattgtcagaaagtcactgagaggtgtgaaagcgctctgcaaagcctggaggggcgctaccgccaagagctgaaggacctccaggaacagcagcgtgaggagaaatcccagtgggaatttgagaaggacgagctcacccaggagtgtgcggaagcccaggagctgctgaaagagactcttaagagagagaaaacaacttctctggtcctgacccaggagagagagatgctggagaaaacatacaaagaacatttgaacagcatggtcgtcgagagacagcagctactccaagacctggaagacctaagaaatgtatctgaaacccagcaaagcctgctgtctgaccagatacttgagctgaagagcagtcacaaaagggaactgagggagcgtgaggaggtcctgtgccaggcaggggcttcggagcagctggccagccagcggctggaaagactagaaatggaacatgaccaggaaaggcaggaaatgatgtccaagcttctagccatggagaacattcacaaagcgacctgtgagacagcagatcgagaaagagccgagatgagcacagaaatctccagacttcagagtaaaataaaggaaatgcagcaggcaacatctcctctctcaatgcttcagagtggttgccaggtgataggagaggaggaggtggaaggagatggagccctgtccctgcttcagcaaggggagcagctgttggaagaaaatggggacgtcctcttaagcctgcagagagctcatgaacaggcagtgaaggaaaatgtgaaaatggctactgaaatttctagattgcaacagaggctacaaaagttagagccagggttagtaatgtcttcttgtttggatgagccagctactgagttttttggaaatactgcggaacaaacagagcagtttttacagcaaaaccgaacgaagcaagtagaaggtgtgaccaggcggcatgtcctaagtgacctggaagatgatgaggtccgggacctgggaagtacagggacgagctctgttcagagacaggaagtcaaaatagaggagtctgaagcttcagtagagggtttttctgagcttgaaaacagtgaagagaccaggactgaatcctgggagctgaagaatcagattagtcagcttcaggaacagctaatgatgttatgtgcggactgtgatcgagcttctgaaaagaaacaggacctactttttgatgtttctgtgctaaaaaagaaactgaagatgcttgagagaatccctgaggcttctcccaaatataagctgttgtatgaagatgtgagccgagaaaatgactgccttcaggaagagctgagaatgatggagacacgctacgatgaggcactagaaaataacaaagaactcactgcagaggttttcaggttgcaggatgagctgaagaaaatggaggaagtcactgaaacattcctcagcctggaaaagagttacgatgaggtcaaaatagaaaatgaggggctgaatgttctggttttgagacttcaaggcaagattgagaagcttcaggaaagcgtggaaggcaatgatgcatgacttgcagatcacgtgcagtgagatgcagcaaaaagttgaacttctgagatatgaatctgaaaagcttcaacaggaaaattctattttgagaaatgaaattactactttaaatcattaaattttattttcatcattccttttaggcaaaaaacggaaactgtaaaacaagaaaatgctgcagttcagaagatggttgaaaatttaaagaaacagatttcagaattaaaaatcaaaaaccaacaattggatttggaaaatacagaacttagccaaaagaactctcaaaaccaggaaaaactgcaagaacttaatcaacgtctaacagaaatgctatgccagaaggaaaaagagccaggaaacagtgcattggaggaacgggaacaagagaagtttaatctgaaagaagaactggaacgttgtaaagtgcagtcctccactttagtgtcttctctggaggcggagctctctgaagttaaaatacagacccatattgtgcaacaggaaaaccaccttctcaaagatgaactggagaaaatgaaacagctgcacagatgtcccgatctctctgacttccagcaaaaaatctctagtgttctaagctacaacgaaaaactgctgaaagaaaaggaagctctgagtgaggaattaaatagctgtgtcgataagttggcaaaatcaagtcttttagagcatagaattgcgacgatgaagcaggaacagaaatcctgggaacatcagagtgcgagcttaaagtcacagctggtggcttctcaggaaaaggttcagaatttagaagacaccgtgcagaatgtaaacctgcaaatgtcccggatgaaatctgacctacgagtgactcagcaggaaaaggaggctttaaaacaagaagtgatgtctttacataagcaacttcagaatgctggtggcaagagctgggccccagagatagctactcatccatcagggctccataaccagcagaaaaggctgtcctgggacaagttggatcatctgatgaatgaggaacagcagctgctttggcaagagaatgagaggctccagaccatggtacagaacaccaaagccgaactcacgcactcccgggagaaggtccgtcagttggaatccaatcttcttcccaagcaccaaaaacatctaaacccatcaggtaccatgaatcccacagagcaagaaaaattgagcttaaagagagagtgtgatcagtttcagaaagaacaatctcctgctaacaggaaggtcagtcagatgaattcccttgaacaagaattagaaacaattcatttggaaaatgaaggcctgaaaaagaaacaagtaaaactggatgagcagctcatggagatgcagcacctgaggtccactgcgacgcctagcccgtcccctcatgcttgggatttgcagctgctccagcagcaagcctgtccgatggtgcccagggagcagtttctgcagcttcaacgccagctgctgcaggcagaaaggataaaccagcacctgcaggaggaacttgaaaacaggacctccgaaaccaacacaccacaggccttgctaccggagcagcgagcagtgcacgcagattcctacagaaggattgggcacctgtgaaaactgggctgctattgatggcatttcttaccatggcagacagatgcacacacccacccatgcacacacaccacacacagagacataagctaagatatgttggaattaagtgctcttttaaattattttattatttttactgttaaacctttgcagtattatgtctcttatttatttatgtagaaatgacagatcttgtgaatcaaattcacaaacatcagcttgttacaaatcattttatttataccctttaaagagtgtggatttaagattcttgaaaggatgtagtctatatattttctcattccatatgttgtaactatttttaaccaaaggtactacttttatatatggaatttgaagaaaaccaggggtatttatactgttttgtataagatgtacaaatctttttgacaggaaatttttgatgaaacaataaaataaattttaagtat

SEQ ID NO: 9874 - protein, 1326 aa, Homo sapiens; identical to SEQ ID NO: 9858

SEQ ID NO: 9875 - DNA, 544 bp, Homo sapiens
accacgagctggcgacacggcagcgtgatggactgcagcaatttgaactcagcagctgatttattttctgtggctttctgcttctgctgcttctggtactgcaaaggcatgaagtggtcaaagccaacatggggcccagggccttctatctggctcagattggaaatataccattagctgtcctgggcctcgagtttgccaacctcagatcttgggacttctctacctccataatcattctcgctctattgccaggctggagtgcagtggcacaatcttggctcactgcaacctctgcctgccaggttcaagcaattctcctgcctcagcctcccaagtagctgggaccacagtctggcttctcactgctgaacttttctggaacacacctggtcattgcattggctagccaaataaggccacatctggagatggaccttcccacgtcaccctccaagagaagtagtacatcggcttcctctcggagtcataaatgttctgaatggagtaagtccacagagattcctcgactggagacggaaac

SEQ ID NO: 9876 - protein, 70 aa, Homo sapiens
MGPRAFYLAQIGNIPLAVLGLEFANLRSWDFSTSIIILALLPGWSAVAQSWLTATSACQVQAILLPQPPK

SEQ ID NO: 9877 - DNA, 574 bp, Homo sapiens
agtgctcatcacactgtgatacagttacttactaatatctttttctactcaattttctgtgcactcacagaaggcagaaactgtacctttcatttccatgattctcatggataaagccctcaataaatgtttgccagatgaatgacttgcccaaggtcacactgctaatatatggcagaaccgggaccagaaccaagacctccgactccccagatcccatatccttgctgttctcctgggatgttttctggaagaaaatgagctgtgggcctaaaaagaagccaatcaagcatttggcagattcaggtacatgtgcagcttcgttacctgtgtagattgcaagatgctgaggtttggggtacaaacaggacattggctttttccttcagctggctccctttgtggtaatacgacgtctgcaccaaacacaataacacgcagaaaaagaaagctttcgtgttttttcagaagcatggaagcttttaccagcagtctcctgtagaatcttctttttgtaccattagccagaattggatacatgcccattctttagctagtccctcccaaggggaat

SEQ ID NO: 9878 - protein, 65 aa, Homo sapiens
MNDLPKVTLLIYGRTGTRTKTSDSPDPISLLFSWDVFWKKMSCGPKKKPIKHLADSGTCAASLPV

SEQ ID NO: 9879 - DNA, 2099 bp, Homo sapiens
gggcgcgcatgcgccggccgctgccacctacggcgaccctggcatgtgccagggattctccccgcccccttcctcgctgcgccggtggagagcgtagcagcagcatccaccgcctagcagagccgcgggccacagcgggacggcacagttccagcagggcagcggctgcgcacgccggctccggctcgcacacaggcgtaggccgccctctaccgcctgaaggccggaggctgagcggggcgcgagcggatcctggatcccgggaggagactcgcctccagagaatgctgtgctccctacagcgccgggaatggaccggcccgtgccagctcagtcggcggccctagggggcacccgcactagaggttttgaagctggctccttgctacttttaggggtgcgcgctgctgctgctcagcccctgcagcccgcatttggccgcttgactgctgcttccagcgcgatcctacaatggcatcgctcccccaggagactcagcgaagccctactttatcttgtaagagctgtttccacattcactcgaagagaaagaccccccccacgagggcctgagttcgatgcccggcctctcccgacccgcggctgcgacagcccctctgaggcggaagtttatttagtacgggaaagagaacagcacggggagaggggagaggctttgccctaggatgcgtcctacccgctcggactcggaaaattcccggcgcccgcgatgcagagcagtggaccgaagggctgccccagagcagcccagaccgccagctgagcgggaggaccggagcgcgccgccccagcacacaaagtagtcgcgggacgaggggtgccgccgaggccaatcagagctgcgcgccgcgtgagtggagtgcgagccggccaatcagagggccggaagatgagcttcccgttccaaactcttccctgtagccttgggacccagatcccaagcctggggcgctttacggtgggagagcgaaatggtgcccttaagacaagaatcatttctctaggcttgggcattttaaagtacataccggggatacttatcccaaagcaagtagcggcggccttttagatgttaaatattaaaagatcacagaaaggagatttaagaggcagtggcctgtcaaggttgcaatctgcctaatattcataaattcacatatttattgagaccttcttatgtaccaggaactctatcacagatacacaaataaggtactgctgattcaaaagaaaatcccttgtcctcaagcagctcaggttgtgagggaggctttcctagaccttgagactcgtatttattgtcagctctttaaacaaaaagcactctatgaagtgctgtactttacagtcgtttttatgattatctccctgtgagaaaagaaaattgaaaggaaagtagagtgacttgtccaagatcacacagaagatgtactagcagagccagaattatgttctagctcagtttgggtgtcatcattcaataaaataattcaataacaatttgtaaatgcatggatgctctctcccatgagatttctgtactaaacgtataagcaggacaaaattctggtataaaagtgacacactttggttgttggaaatgaacacaaattttagacttatgtgggattaaaggtaaaaatcttaccagtcatactttagataatttttagaagtcagaggtggggtggatatttacttcttagtttaaacacagcattttaaaaatattttaacaagcaagcgtaactttttttttttaagatagaagaagcaggaaggatcacttaagcccaagagttccaggctgcagtgccacatcgtgcctgtcagtagccacttcagcctgggcaacatagcaagaccctcatgtctaaaattaaaaataaaatttaaaaaaaagaactacttctagttggttaataatcatgatagtttacactgtataatactttgagatacccaagtacaaagctttacatttgcctaaaaattccatttttgtctggtgttccatttttacttccaaaatcctaggaattaaagcacttattttccctacctccttccaactgaaa

SEQ ID NO: 9880 - protein, 124 aa, Homo sapiens
MDRPVPAQSAALGGTRTRGFEAGSLLLLGVRAAAAQPLQPAFGRLTAASSAILQWHRSPRRLSEALLYLVRAVSTFTRRERPPPRGPEFDARPLPTRGCDSPSEAEVYLVREREQHGERGEALP

SEQ ID NO: 9881 - DNA, 1915 bp, Homo sapiens
gggcgcgcatgcgccggccgctgccacctacggcgaccctggcatgtgccagggattctccccgcccccttcctcgctgcgccggtggagagcgtagcagcagcatccaccgcctagcagagccgcgggccacagcgggacggcacagttccagcagggcagcggctgcgcacgccggctccggctcgcacacaggcgtaggccgccctctaccgcctgaaggccggaggctgagcggggcgcgagcggatcctggatcccgggaggagactcgcctccagagaatgctgtgctccctacagcgccgggaatggaccggcccgtgccagctcagtcggcggccctagggggcacccgcactagaggttttgaagctggctccttgctacttttaggggtgcgcgctgctgctgctcagcccctgcagcccgcatttggccgcttgactgctgcttccagcgcgatcctacaatggcatcgctcccccaggagactcagcgaagccctactttatcttgtaagagctgtttccacattcactcgaagagaaagaccccccccacgagggcctgagttcgatgcccggcctctcccgacccgcggctgcgacagcccctctgaggcggaagtttatttagtacgggaaagagaacagcacggggagaggggagaggctttgccctaggatgcgtcctacccgctcggactcggaaaattcccggcgcccgcgatgcagagcagtggaccgaagggctgccccagagcagcccagaccgccagctgagcgggaggaccggagcgcgccgccccagcacacaaagtagtcgcgggacgaggggtgccgccgaggccaatcagagctgcgcgccgcgtgagtggagtgcgagccggccaatcagagggccggaagatgagcttcccgttccaaactcttccctgtagccttgggacccagatcccaagcctggggcgctttacggtgggagagcgaaatggtgcccttaagacaagaatcatttctctaggcttgggcattttaaagtacataccggggatacttatcccaaagcaagtagcggcggccttttagatgttaaatattaaaagatcacagaaaggagatttaagaggcagtggcctgtcaaggttgcaatctgcctaatattcataaattcacatatttattgagaccttcttatgtaccaggaactctatcacagatacacaaataaggtactgctgattcaaaagaaaatcccttgtcctcaagcagctcaggttgtgagggaggctttcctagaccttgagactcgtatttattgtcagctctttaaacaaaaagcactctatgaagtgctgtactttacagtcgtttttatgattatctccctgtgagaaaagaaaattgaaaggaaagtagagtgacttgtccaagatcacacagaagatgtactagcagagccagaattatgttctagctcagtttgggtgtcatcattcaataaaataattcaataacaatttgtaaatgcatggatgctctctcccatgagatttctgtactaaacgtataagcaggacaaaattctggtataaaagtgacacactttggttgttggaaatgaacacaaattttagacttatgtgggattaaaggtaaaaatcttaccagtcatactttagataatttttagaagtcagaggtggggtggatatttacttcttagtttaaacacagcattttaaaaatattttaacaagcaagcgtaactttttttttttaagatagaagaagcaggaaggatcacttaagcccaagagttccaggctgcagtgccacatcgtgcctgtcagtagccacttcagcctgggcaacatagcaagaccctcatgtctaaaattaaaaataaaattt

SEQ ID NO: 9882 - protein, 124 aa, Homo sapiens; identical to SEQ ID NO: 9880

SEQ ID NO: 9883 - DNA, 1526 bp, Homo sapiens
gggcgcgcatgcgccggccgctgccacctacggcgaccctggcatgtgccagggattctccccgcccccttcctcgctgcgccggtggagagcgtagcagcagcatccaccgcctagcagagccgcgggccacagcgggacggcacagttccagcagggcagcggctgcgcacgccggctccggctcgcacacaggcgtaggccgccctctaccgcctgaaggccggaggctgagcggggcgcgagcggatcctggatcccgggaggagactcgcctccagagaatgctgtgctccctacagcgccgggaatggaccggcccgtgccagctcagtcggcggccctagggggcacccgcactagaggttttgaagctggctccttgctacttttaggggtgcgcgctgctgctgctcagcccctgcagcccgcatttggccgcttgactgctgcttccagcgcgatcctacaatggcatcgctcccccaggagactcagcgaagccctactttatcttgtaagagctgtttccacattcactcgaagagaaagaccccccccacgagggcctgagttcgatgcccggcctctcccgacccgcggctgcgacagcccctctgaggcggaagtttatttagtacgggaaagagaacagcacggggagaggggagaggctttgccctaggatgcgtcctacccgctcggactcggaaaattcccggcgcccgcgatgcagagcagtggaccgaagggctgccccagagcagcccagaccgccagctgagcgggaggaccggagcgcgccgccccagcacacaaagtagtcgcgggacgaggggtgccgccgaggccaatcagagctgcgcgccgcgtgagtggagtgcgagccggccaatcagagggccggaagatgagcttcccgttccaaactcttccctgtagccttgggacccagatcccaagcctggggcgctttacggtgggagagcgaaatggtgcccttaagacaagaatcatttctctaggcttgggcattttaaagtacataccggggatacttatcccaaagcaagtagcggcggccttttagatgttaaatattaaaagatcacagaaaggagatttaagaggcagtggcctgtcaaggttgcaatctgcctaatattcataaattcacatatttattgagaccttcttatgtaccaggaactctatcacagatacacaaataaggtactgctgattcaaaagaaaatcccttgtcctcaagcagctcaggttgtgagggaggctttcctagaccttgagactcgtatttattgtcagctctttaaacaaaaagcactctatgaagtgctgtactttacagtcgtttttatgattatctccctgtgagaaaagaaaattgaaaggaaagtagagtgacttgtccaagatcacacagaagatgtactagcagagccagaattatgttctagctcagtttgggtgtcatcattcaataaaataattcaataacaatttgt

SEQ ID NO: 9884 - protein, 124 aa, Homo sapiens; identical to SEQ ID NO: 9880

SEQ ID NO: 9885 - DNA, 3131 bp, Homo sapiens
tggctctgctagtacatcttctgtgtgatcttggacaagtcactctactttcctttcaattttcttttctcacagggagataatcataaaaacgactgtaaagtacagcacttcatagagtgctttttgtttaaagagctgacaataaatacgagtctcaaggtctaggaaagcctccctcacaacctgagctgcttgaggacaagggattttcttttgaatcagcagtaccttatttgtgtatctgtgatagagttcctggtacataagaaggtctcaataaatatgtgaatttatgaatattaggcagattgcaaccttgacaggccactgcctcttaaatctcctttctgtgatcttttaatatttaacatctaaaaggccgccgctacttgctttgggataagtatccccggtatgtactttaaaatgcccaagcctagagaaatgattcttgtcttaagggcaccatttcgctctcccaccgtaaagcgccccaggcttgggatctgggtcccaaggctacagggaagagtttggaacgggaagctcatcttccggccctctgattggccggctcgcactccactcacgcggcgcgcagctctgattggcctcggcggcacccctcgtcccgcgactactttgtgtgctggggcggcgcgctccggtcctcccgctcagctggcggtctgggctgctctggggcagcccttcggtccactgctctgcatcgcgggcgccgggaattttccgagtccgagcggcatgtagagcgcatgaagtacaggacaataaagcttcctacacatatcaccaggaggatctctttgaaagattcactgcaggactaccagagagaataatttgtctgaagcatcatgtgttgaaacaacagaagtctattcacctgtgcactaactagaaacagagttacaatgttttcaattctttgagctccaggactccagggaagtgagttgaaaatctgaaaatgcggccatggactggttcctggcgttggattatgctcattctttttgcctgggggaccttgctgttttatataggtggtcacttggtacgagataatgaccatcctgatcactctagccgagaactgtccaagattctggcaaagcttgaacgcttaaaacaacagaatgaagacttgaggcgaatggccgaatctctccggataccagaaggccctattgatcaggggccagctataggaagagtacgcgttttagaagagcagcttgttaaggccaaagaacagattgaaaattacaagaaacagaccagaaatggtctggggaaggatcatgaaatcctgaggaggaggattgaaaatggagctaaagagctctggtttttcctacagagtgaattgaagaaattaaagaacttagaaggaaatgaactccaaagacatgcagatgaatttcttttggatttaggacatcatgaaaggtctataatgacggatctatactacctcagtcagacagatggagcaggtgattggcgggaaaaagaggccaaagatctgacagaactggttcagcggagaataacatatcttcagaatcccaaggactgcagcaaagccaaaaagctggtgtgtaatatcaacaaaggctgtggctatggctgtcagctccatcatgtggtctactgcttcatgattgcatatggcacccagcgaacactcatcttggaatctcagaattggcgctatgctactggtggatgggagactgtatttaggcctgtaagtgagacatgcacagacagatctggcatctccactggacactggtcaggtaccccaattatgaatttattagtgataactctatttcctggtcagctggactgcacaatcgatacacagaaaattcacttcgtggagtgatcctggatatacattttctctctcaggcagacttcctagtgtgtactttttcatcccaggtctgtcgagttgcttatgaaattatgcaaacactacatcctgatgcctctgcaaacttccattctttagatgacatctactattttgggggccagaatgcccacaatcaaattgccatttatgctcaccaaccccgaactgcagatgaaattcccatggaacctggagatatcattggtgtggctggaaatcattgggatggctattctaaaggtgtcaacaggaaattgggaaggacgggcctatatccctcctacaaagttcgagagaagatagaaacggtcaagtaccccacatatcctgaggctgagaaataaagctcagatggaagagataaacgaccaaactcagttcgaccaaactcagttcaaaccatttcagccaaactgtagatgaagagggctctgatctaacaaaataaggttatatgagtagatactctcagcaccaagagcagctgggaactgacataggcttcaattggtggaattcctctttaacaagggctgcaatgccctcatacccatgcacagtacaataatgtactcacatataacatgcaaacaggttgttttctactttgcccctttcagtatgtccccataagacaaacactgccatattgtgtaatttaagtgacacagacattttgtgtgagacttaaaacatggtgcctatatctgagagacctgtgtgaactattgagaagatcggaacagctccttactctgaggaagttgattcttatttgatggtggtattgtgaccactgaattcactccagtcaacagattcagaatgagaatggacgtttggtttttttttgtttttgtttttgttttttcctttataaggttgtctgtttttttttttttaaataattgcatcagttcattgacctcatcattaataagtgaagaatacatcagaaaataaaatattcactctccattagaaaattttgtaaaacaatgccatgaacaaattctttagtactcaatgtttctggacattctctttgataacaaaaaataaattttaaaaaggaattttgtaaagtttctagaattttatatcattggatgatatgttgatcagccttatgtggaagaactgtgataaaaagaggagctttttagtttttcagctt

SEQ ID NO: 9886 - protein, 308 aa, Homo sapiens
MRPWTGSWRWIMLILFAWGTLLFYIGGHLVRDNDHPDHSSRELSKILAKLERLKQQNEDLRRMAESLRIPEGPIDQGPAIGRVRVLEEQLVKAKEQIENYKKQTRNGLGKDHEILRRRIENGAKELWFFLQSELKKLKNLEGNELQRHADEFLLDLGHHERSIMTDLYYLSQTDGAGDWREKEAKDLTELVQRRITYLQNPKDCSKAKKLVCNINKGCGYGCQLHHVVYCFMIAYGTQRTLILESQNWRYATGGWETVFRPVSETCTDRSGISTGHWSGTPIMNLLVITLFPGQLDCTIDTQKIHFVE

SEQ ID NO: 9887 - DNA, 3307 bp, Homo sapiens
tggctctgctagtacatcttctgtgtgatcttggacaagtcactctactttcctttcaattttcttttctcacagggagataatcataaaaacgactgtaaagtacagcacttcatagagtgctttttgtttaaagagctgacaataaatacgagtctcaaggtctaggaaagcctccctcacaacctgagctgcttgaggacaagggattttcttttgaatcagcagtaccttatttgtgtatctgtgatagagttcctggtacataagaaggtctcaataaatatgtgaatttatgaatattaggcagattgcaaccttgacaggccactgcctcttaaatctcctttctgtgatcttttaatatttaacatctaaaaggccgccgctacttgctttgggataagtatccccggtatgtactttaaaatgcccaagcctagagaaatgattcttgtcttaagggcaccatttcgctctcccaccgtaaagcgccccaggcttgggatctgggtcccaaggctacagggaagagtttggaacgggaagctcatcttccggccctctgattggccggctcgcactccactcacgcggcgcgcagctctgattggcctcggcggcacccctcgtcccgcgactactttgtgtgctggggcggcgcgctccggtcctcccgctcagctggcggtctgggctgctctggggcagcccttcggtccactgctctgcatcgcgggcgccgggaattttccgagtccgagcgggttgctgcttttgctcagaggacatccatgaccctaatggtctttttgttcaagataaagtgattttttgcctttgttgattaactggacaaattcagattctattttgaccagcaataagttgaattatggggctagaagataaggactaaaaacaagaattggtgtccagaaagcatgtagagcgcatgaagtacaggacaataaagcttcctacacatatcaccaggaggatctctttgaaagattcactgcaggactaccagagagaataatttgtctgaagcatcatgtgttgaaacaacagaagtctattcacctgtgcactaactagaaacagagttacaatgttttcaattctttgagctccaggactccagggaagtgagttgaaaatctgaaaatgcggccatggactggttcctggcgttggattatgctcattctttttgcctgggggaccttgctgttttatataggtggtcacttggtacgagataatgaccatcctgatcactctagccgagaactgtccaagattctggcaaagcttgaacgcttaaaacaacagaatgaagacttgaggcgaatggccgaatctctccggataccagaaggccctattgatcaggggccagctataggaagagtacgcgttttagaagagcagcttgttaaggccaaagaacagattgaaaattacaagaaacagaccagaaatggtctggggaaggatcatgaaatcctgaggaggaggattgaaaatggagctaaagagctctggtttttcctacagagtgaattgaagaaattaaagaacttagaaggaaatgaactccaaagacatgcagatgaatttcttttggatttaggacatcatgaaaggtctataatgacggatctatactacctcagtcagacagatggagcaggtgattggcgggaaaaagaggccaaagatctgacagaactggttcagcggagaataacatatcttcagaatcccaaggactgcagcaaagccaaaaagctggtgtgtaatatcaacaaaggctgtggctatggctgtcagctccatcatgtggtctactgcttcatgattgcatatggcacccagcgaacactcatcttggaatctcagaattggcgctatgctactggtggatgggagactgtatttaggcctgtaagtgagacatgcacagacagatctggcatctccactggacactggtcaggtaccccaattatgaatttattagtgataactctatttcctggtcagctggactgcacaatcgatacacagaaaattcacttcgtggagtgatcctggatatacattttctctctcaggcagacttcctagtgtgtactttttcatcccaggtctgtcgagttgcttatgaaattatgcaaacactacatcctgatgcctctgcaaacttccattctttagatgacatctactattttgggggccagaatgcccacaatcaaattgccatttatgctcaccaaccccgaactgcagatgaaattcccatggaacctggagatatcattggtgtggctggaaatcattgggatggctattctaaaggtgtcaacaggaaattgggaaggacgggcctatatccctcctacaaagttcgagagaagatagaaacggtcaagtaccccacatatcctgaggctgagaaataaagctcagatggaagagataaacgaccaaactcagttcgaccaaactcagttcaaaccatttcagccaaactgtagatgaagagggctctgatctaacaaaataaggttatatgagtagatactctcagcaccaagagcagctgggaactgacataggcttcaattggtggaattcctctttaacaagggctgcaatgccctcatacccatgcacagtacaataatgtactcacatataacatgcaaacaggttgttttctactttgcccctttcagtatgtccccataagacaaacactgccatattgtgtaatttaagtgacacagacattttgtgtgagacttaaaacatggtgcctatatctgagagacctgtgtgaactattgagaagatcggaacagctccttactctgaggaagttgattcttatttgatggtggtattgtgaccactgaattcactccagtcaacagattcagaatgagaatggacgtttggtttttttttgtttttgtttttgttttttcctttataaggttgtctgtttttttttttttaaataattgcatcagttcattgacctcatcattaataagtgaagaatacatcagaaaataaaatattcactctccattagaaaattttgtaaaacaatgccatgaacaaattctttagtactcaatgtttctggacattctctttgataacaaaaaataaattttaaaaaggaattttgtaaagtttctagaattttatatcattggatgatatgttgatcagccttatgtggaagaactgtgataaaaagaggagctttttagtttttcagctt

SEQ ID NO: 9888 - protein, 308 aa, Homo sapiens; identical to SEQ ID NO: 9886

SEQ ID NO: 9889 - DNA, 3323 bp, Homo sapiens
tggctctgctagtacatcttctgtgtgatcttggacaagtcactctactttcctttcaattttcttttctcacagggagataatcataaaaacgactgtaaagtacagcacttcatagagtgctttttgtttaaagagctgacaataaatacgagtctcaaggtctaggaaagcctccctcacaacctgagctgcttgaggacaagggattttcttttgaatcagcagtaccttatttgtgtatctgtgatagagttcctggtacataagaaggtctcaataaatatgtgaatttatgaatattaggcagattgcaaccttgacaggccactgcctcttaaatctcctttctgtgatcttttaatatttaacatctaaaaggccgccgctacttgctttgggataagtatccccggtatgtactttaaaatgcccaagcctagagaaatgattcttgtcttaagggcaccatttcgctctcccaccgtaaagcgccccaggcttgggatctgggtcccaaggctacagggaagagtttggaacgggaagctcatcttccggccctctgattggccggctcgcactccactcacgcggcgcgcagctctgattggcctcggcggcacccctcgtcccgcgactactttgtgtgctggggcggcgcgctccggtcctcccgctcagctggcggtctgggctgctctggggcagcccttcggtccactgctctgcatcgcgggcgccgggaattttccgagtccgagcggagacagggtttctctgtgttgcccaggctggtctcgaactctgagctcaagcgacctgcccacctcggccacccaaaatgttgggattacaggggttgctgcttttgctcagaggacatccatgaccctaatggtctttttgttcaagataaagtgattttttgcctttgttgattaactggacaaattcagcatgtagagcgcatgaagtacaggacaataaagcttcctacacatatcaccaggaggatctctttgaaagattcactgcaggactaccagagagaataatttgtctgaagcatcatgtgttgaaacaacagaagtctattcacctgtgcactaactagaaacagagttacaatgttttcaattctttgagctccaggactccagggaagtgagttgaaaatctgaaaatgcggccatggactggttcctggcgttggattatgctcattctttttgcctgggggaccttgctgttttatataggtggtcacttggtacgagataatgaccatcctgatcactctagccgagaactgtccaagattctggcaaagcttgaacgcttaaaacaacagaatgaagacttgaggcgaatggccgaatctctccggataccagaaggccctattgatcaggggccagctataggaagagtacgcgttttagaagagcagcttgttaaggccaaagaacagattgaaaattacaagaaacagaccagaaatggtctggggaaggatcatgaaatcctgaggaggaggattgaaaatggagctaaagagctctggtttttcctacagagtgaattgaagaaattaaagaacttagaaggaaatgaactccaaagacatgcagatgaatttcttttggatttaggacatcatgaaaggtctataatgacggatctatactacctcagtcagacagatggagcaggtgattggcgggaaaaagaggccaaagatctgacagaactggttcagcggagaataacatatcttcagaatcccaaggactgcagcaaagccaaaaagctggtgtgtaatatcaacaaaggctgtggctatggctgtcagctccatcatgtggtctactgcttcatgattgcatatggcacccagcgaacactcatcttggaatctcagaattggcgctatgctactggtggatgggagactgtatttaggcctgtaagtgagacatgcacagacagatctggcatctccactggacactggtcaggtaccccaattatgaatttattagtgataactctatttcctggtcagctggactgcacaatcgatacacagaaaattcacttcgtggagtgatcctggatatacattttctctctcaggcagacttcctagtgtgtactttttcatcccaggtctgtcgagttgcttatgaaattatgcaaacactacatcctgatgcctctgcaaacttccattctttagatgacatctactattttgggggccagaatgcccacaatcaaattgccatttatgctcaccaaccccgaactgcagatgaaattcccatggaacctggagatatcattggtgtggctggaaatcattgggatggctattctaaaggtgtcaacaggaaattgggaaggacgggcctatatccctcctacaaagttcgagagaagatagaaacggtcaagtaccccacatatcctgaggctgagaaataaagctcagatggaagagataaacgaccaaactcagttcgaccaaactcagttcaaaccatttcagccaaactgtagatgaagagggctctgatctaacaaaataaggttatatgagtagatactctcagcaccaagagcagctgggaactgacataggcttcaattggtggaattcctctttaacaagggctgcaatgccctcatacccatgcacagtacaataatgtactcacatataacatgcaaacaggttgttttctactttgcccctttcagtatgtccccataagacaaacactgccatattgtgtaatttaagtgacacagacattttgtgtgagacttaaaacatggtgcctatatctgagagacctgtgtgaactattgagaagatcggaacagctccttactctgaggaagttgattcttatttgatggtggtattgtgaccactgaattcactccagtcaacagattcagaatgagaatggacgtttggtttttttttgtttttgtttttgttttttcctttataaggttgtctgtttttttttttttaaataattgcatcagttcattgacctcatcattaataagtgaagaatacatcagaaaataaaatattcactctccattagaaaattttgtaaaacaatgccatgaacaaattctttagtactcaatgtttctggacattctctttgataacaaaaaataaattttaaaaaggaattttgtaaagtttctagaattttatatcattggatgatatgttgatcagccttatgtggaagaactgtgataaaaagaggagctttttagtttttcagctt

SEQ ID NO: 9890 - protein, 308 aa, Homo sapiens; identical to SEQ ID NO: 9886

SEQ ID NO: 9891 - DNA, 3229 bp, Homo sapiens
tggctctgctagtacatcttctgtgtgatcttggacaagtcactctactttcctttcaattttcttttctcacagggagataatcataaaaacgactgtaaagtacagcacttcatagagtgctttttgtttaaagagctgacaataaatacgagtctcaaggtctaggaaagcctccctcacaacctgagctgcttgaggacaagggattttcttttgaatcagcagtaccttatttgtgtatctgtgatagagttcctggtacataagaaggtctcaataaatatgtgaatttatgaatattaggcagattgcaaccttgacaggccactgcctcttaaatctcctttctgtgatcttttaatatttaacatctaaaaggccgccgctacttgctttgggataagtatccccggtatgtactttaaaatgcccaagcctagagaaatgattcttgtcttaagggcaccatttcgctctcccaccgtaaagcgccccaggcttgggatctgggtcccaaggctacagggaagagtttggaacgggaagctcatcttccggccctctgattggccggctcgcactccactcacgcggcgcgcagctctgattggcctcggcggcacccctcgtcccgcgactactttgtgtgctggggcggcgcgctccggtcctcccgctcagctggcggtctgggctgctctggggcagcccttcggtccactgctctgcatcgcgggcgccgggaattttccgagtccgagcgggttgctgcttttgctcagaggacatccatgaccctaatggtctttttgttcaagataaagtgattttttgcctttgttgattaactggacaaattcagcatgtagagcgcatgaagtacaggacaataaagcttcctacacatatcaccaggaggatctctttgaaagattcactgcaggactaccagagagaataatttgtctgaagcatcatgtgttgaaacaacagaagtctattcacctgtgcactaactagaaacagagttacaatgttttcaattctttgagctccaggactccagggaagtgagttgaaaatctgaaaatgcggccatggactggttcctggcgttggattatgctcattctttttgcctgggggaccttgctgttttatataggtggtcacttggtacgagataatgaccatcctgatcactctagccgagaactgtccaagattctggcaaagcttgaacgcttaaaacaacagaatgaagacttgaggcgaatggccgaatctctccggataccagaaggccctattgatcaggggccagctataggaagagtacgcgttttagaagagcagcttgttaaggccaaagaacagattgaaaattacaagaaacagaccagaaatggtctggggaaggatcatgaaatcctgaggaggaggattgaaaatggagctaaagagctctggtttttcctacagagtgaattgaagaaattaaagaacttagaaggaaatgaactccaaagacatgcagatgaatttcttttggatttaggacatcatgaaaggtctataatgacggatctatactacctcagtcagacagatggagcaggtgattggcgggaaaaagaggccaaagatctgacagaactggttcagcggagaataacatatcttcagaatcccaaggactgcagcaaagccaaaaagctggtgtgtaatatcaacaaaggctgtggctatggctgtcagctccatcatgtggtctactgcttcatgattgcatatggcacccagcgaacactcatcttggaatctcagaattggcgctatgctactggtggatgggagactgtatttaggcctgtaagtgagacatgcacagacagatctggcatctccactggacactggtcaggtaccccaattatgaatttattagtgataactctatttcctggtcagctggactgcacaatcgatacacagaaaattcacttcgtggagtgatcctggatatacattttctctctcaggcagacttcctagtgtgtactttttcatcccaggtctgtcgagttgcttatgaaattatgcaaacactacatcctgatgcctctgcaaacttccattctttagatgacatctactattttgggggccagaatgcccacaatcaaattgccatttatgctcaccaaccccgaactgcagatgaaattcccatggaacctggagatatcattggtgtggctggaaatcattgggatggctattctaaaggtgtcaacaggaaattgggaaggacgggcctatatccctcctacaaagttcgagagaagatagaaacggtcaagtaccccacatatcctgaggctgagaaataaagctcagatggaagagataaacgaccaaactcagttcgaccaaactcagttcaaaccatttcagccaaactgtagatgaagagggctctgatctaacaaaataaggttatatgagtagatactctcagcaccaagagcagctgggaactgacataggcttcaattggtggaattcctctttaacaagggctgcaatgccctcatacccatgcacagtacaataatgtactcacatataacatgcaaacaggttgttttctactttgcccctttcagtatgtccccataagacaaacactgccatattgtgtaatttaagtgacacagacattttgtgtgagacttaaaacatggtgcctatatctgagagacctgtgtgaactattgagaagatcggaacagctccttactctgaggaagttgattcttatttgatggtggtattgtgaccactgaattcactccagtcaacagattcagaatgagaatggacgtttggtttttttttgtttttgtttttgttttttcctttataaggttgtctgtttttttttttttaaataattgcatcagttcattgacctcatcattaataagtgaagaatacatcagaaaataaaatattcactctccattagaaaattttgtaaaacaatgccatgaacaaattctttagtactcaatgtttctggacattctctttgataacaaaaaataaattttaaaaaggaattttgtaaagtttctagaattttatatcattggatgatatgttgatcagccttatgtggaagaactgtgataaaaagaggagctttttagtttttcagctt

SEQ ID NO: 9892 - protein, 308 aa, Homo sapiens; identical to SEQ ID NO: 9886

SEQ ID NO: 9893 - DNA, 2849 bp, Homo sapiens
attcgcgcgcgcacgccggcgctggccgaggcttccccgcctgcgctcgttgtcagagccgctccggcgcgtgcgcgcgttatctccggccgacccgagcagccggttccctcctctccaggccccctccccatcccacccccgccgcctggccccagccgacccgtcccttcgtctccccgcggaatggggccggcactgctcagggtcgcgcgccctggacccagctcgctctcggtctcgcgctgtcagcgactgcccggctcgcgccgcctcgcgctctgcctcagtcagtggcgccgaaggctccgttaagcggcggcggcggttcctgtttccgtttcttcctctccgttcggtcgggagtagcatcctccactcagccacccttcccactcccccatcgtggggcagctgcggctgagggctgtggctttggcagctgcgacggggagcggcggagaccgcctctgctcccgcctgggcatgtagagcgcatgaagtacaggacaataaagcttcctacacatatcaccaggaggatctctttgaaagattcactgcaggactaccagagagaataatttgtctgaagcatcatgtgttgaaacaacagaagtctattcacctgtgcactaactagaaacagagttacaatgttttcaattctttgagctccaggactccagggaagtgagttgaaaatctgaaaatgcggccatggactggttcctggcgttggattatgctcattctttttgcctgggggaccttgctgttttatataggtggtcacttggtacgagataatgaccatcctgatcactctagccgagaactgtccaagattctggcaaagcttgaacgcttaaaacaacagaatgaagacttgaggcgaatggccgaatctctccggataccagaaggccctattgatcaggggccagctataggaagagtacgcgttttagaagagcagcttgttaaggccaaagaacagattgaaaattacaagaaacagaccagaaatggtctggggaaggatcatgaaatcctgaggaggaggattgaaaatggagctaaagagctctggtttttcctacagagtgaattgaagaaattaaagaacttagaaggaaatgaactccaaagacatgcagatgaatttcttttggatttaggacatcatgaaaggtctataatgacggatctatactacctcagtcagacagatggagcaggtgattggcgggaaaaagaggccaaagatctgacagaactggttcagcggagaataacatatcttcagaatcccaaggactgcagcaaagccaaaaagctggtgtgtaatatcaacaaaggctgtggctatggctgtcagctccatcatgtggtctactgcttcatgattgcatatggcacccagcgaacactcatcttggaatctcagaattggcgctatgctactggtggatgggagactgtatttaggcctgtaagtgagacatgcacagacagatctggcatctccactggacactggtcaggtaccccaattatgaatttattagtgataactctatttcctggtcagctggactgcacaatcgatacacagaaaattcacttcgtggagtgatcctggatatacattttctctctcaggcagacttcctagtgtgtactttttcatcccaggtctgtcgagttgcttatgaaattatgcaaacactacatcctgatgcctctgcaaacttccattctttagatgacatctactattttgggggccagaatgcccacaatcaaattgccatttatgctcaccaaccccgaactgcagatgaaattcccatggaacctggagatatcattggtgtggctggaaatcattgggatggctattctaaaggtgtcaacaggaaattgggaaggacgggcctatatccctcctacaaagttcgagagaagatagaaacggtcaagtaccccacatatcctgaggctgagaaataaagctcagatggaagagataaacgaccaaactcagttcgaccaaactcagttcaaaccatttcagccaaactgtagatgaagagggctctgatctaacaaaataaggttatatgagtagatactctcagcaccaagagcagctgggaactgacataggcttcaattggtggaattcctctttaacaagggctgcaatgccctcatacccatgcacagtacaataatgtactcacatataacatgcaaacaggttgttttctactttgcccctttcagtatgtccccataagacaaacactgccatattgtgtaatttaagtgacacagacattttgtgtgagacttaaaacatggtgcctatatctgagagacctgtgtgaactattgagaagatcggaacagctccttactctgaggaagttgattcttatttgatggtggtattgtgaccactgaattcactccagtcaacagattcagaatgagaatggacgtttggtttttttttgtttttgtttttgttttttcctttataaggttgtctgtttttttttttttaaataattgcatcagttcattgacctcatcattaataagtgaagaatacatcagaaaataaaatattcactctccattagaaaattttgtaaaacaatgccatgaacaaattctttagtactcaatgtttctggacattctctttgataacaaaaaataaattttaaaaaggaattttgtaaagtttctagaattttatatcattggatgatatgttgatcagccttatgtggaagaactgtgataaaaagaggagctttttagtttttcagctt

SEQ ID NO: 9894 - protein, 308 aa, Homo sapiens; identical to SEQ ID NO: 9886

SEQ ID NO: 9895 - DNA, 3025 bp, Homo sapiens
attcgcgcgcgcacgccggcgctggccgaggcttccccgcctgcgctcgttgtcagagccgctccggcgcgtgcgcgcgttatctccggccgacccgagcagccggttccctcctctccaggccccctccccatcccacccccgccgcctggccccagccgacccgtcccttcgtctccccgcggaatggggccggcactgctcagggtcgcgcgccctggacccagctcgctctcggtctcgcgctgtcagcgactgcccggctcgcgccgcctcgcgctctgcctcagtcagtggcgccgaaggctccgttaagcggcggcggcggttcctgtttccgtttcttcctctccgttcggtcgggagtagcatcctccactcagccacccttcccactcccccatcgtggggcagctgcggctgagggctgtggctttggcagctgcgacggggagcggcggagaccgcctctgctcccgcctggggttgctgcttttgctcagaggacatccatgaccctaatggtctttttgttcaagataaagtgattttttgcctttgttgattaactggacaaattcagattctattttgaccagcaataagttgaattatggggctagaagataaggactaaaaacaagaattggtgtccagaaagcatgtagagcgcatgaagtacaggacaataaagcttcctacacatatcaccaggaggatctctttgaaagattcactgcaggactaccagagagaataatttgtctgaagcatcatgtgttgaaacaacagaagtctattcacctgtgcactaactagaaacagagttacaatgttttcaattctttgagctccaggactccagggaagtgagttgaaaatctgaaaatgcggccatggactggttcctggcgttggattatgctcattctttttgcctgggggaccttgctgttttatataggtggtcacttggtacgagataatgaccatcctgatcactctagccgagaactgtccaagattctggcaaagcttgaacgcttaaaacaacagaatgaagacttgaggcgaatggccgaatctctccggataccagaaggccctattgatcaggggccagctataggaagagtacgcgttttagaagagcagcttgttaaggccaaagaacagattgaaaattacaagaaacagaccagaaatggtctggggaaggatcatgaaatcctgaggaggaggattgaaaatggagctaaagagctctggtttttcctacagagtgaattgaagaaattaaagaacttagaaggaaatgaactccaaagacatgcagatgaatttcttttggatttaggacatcatgaaaggtctataatgacggatctatactacctcagtcagacagatggagcaggtgattggcgggaaaaagaggccaaagatctgacagaactggttcagcggagaataacatatcttcagaatcccaaggactgcagcaaagccaaaaagctggtgtgtaatatcaacaaaggctgtggctatggctgtcagctccatcatgtggtctactgcttcatgattgcatatggcacccagcgaacactcatcttggaatctcagaattggcgctatgctactggtggatgggagactgtatttaggcctgtaagtgagacatgcacagacagatctggcatctccactggacactggtcaggtaccccaattatgaatttattagtgataactctatttcctggtcagctggactgcacaatcgatacacagaaaattcacttcgtggagtgatcctggatatacattttctctctcaggcagacttcctagtgtgtactttttcatcccaggtctgtcgagttgcttatgaaattatgcaaacactacatcctgatgcctctgcaaacttccattctttagatgacatctactattttgggggccagaatgcccacaatcaaattgccatttatgctcaccaaccccgaactgcagatgaaattcccatggaacctggagatatcattggtgtggctggaaatcattgggatggctattctaaaggtgtcaacaggaaattgggaaggacgggcctatatccctcctacaaagttcgagagaagatagaaacggtcaagtaccccacatatcctgaggctgagaaataaagctcagatggaagagataaacgaccaaactcagttcgaccaaactcagttcaaaccatttcagccaaactgtagatgaagagggctctgatctaacaaaataaggttatatgagtagatactctcagcaccaagagcagctgggaactgacataggcttcaattggtggaattcctctttaacaagggctgcaatgccctcatacccatgcacagtacaataatgtactcacatataacatgcaaacaggttgttttctactttgcccctttcagtatgtccccataagacaaacactgccatattgtgtaatttaagtgacacagacattttgtgtgagacttaaaacatggtgcctatatctgagagacctgtgtgaactattgagaagatcggaacagctccttactctgaggaagttgattcttatttgatggtggtattgtgaccactgaattcactccagtcaacagattcagaatgagaatggacgtttggtttttttttgtttttgtttttgttttttcctttataaggttgtctgtttttttttttttaaataattgcatcagttcattgacctcatcattaataagtgaagaatacatcagaaaataaaatattcactctccattagaaaattttgtaaaacaatgccatgaacaaattctttagtactcaatgtttctggacattctctttgataacaaaaaataaattttaaaaaggaattttgtaaagtttctagaattttatatcattggatgatatgttgatcagccttatgtggaagaactgtgataaaaagaggagctttttagtttttcagctt

SEQ ID NO: 9896 - protein, 308 aa, Homo sapiens; identical to SEQ ID NO: 9886

SEQ ID NO: 9897 - DNA, 2947 bp, Homo sapiens
attcgcgcgcgcacgccggcgctggccgaggcttccccgcctgcgctcgttgtcagagccgctccggcgcgtgcgcgcgttatctccggccgacccgagcagccggttccctcctctccaggccccctccccatcccacccccgccgcctggccccagccgacccgtcccttcgtctccccgcggaatggggccggcactgctcagggtcgcgcgccctggacccagctcgctctcggtctcgcgctgtcagcgactgcccggctcgcgccgcctcgcgctctgcctcagtcagtggcgccgaaggctccgttaagcggcggcggcggttcctgtttccgtttcttcctctccgttcggtcgggagtagcatcctccactcagccacccttcccactcccccatcgtggggcagctgcggctgagggctgtggctttggcagctgcgacggggagcggcggagaccgcctctgctcccgcctggggttgctgcttttgctcagaggacatccatgaccctaatggtctttttgttcaagataaagtgattttttgcctttgttgattaactggacaaattcagcatgtagagcgcatgaagtacaggacaataaagcttcctacacatatcaccaggaggatctctttgaaagattcactgcaggactaccagagagaataatttgtctgaagcatcatgtgttgaaacaacagaagtctattcacctgtgcactaactagaaacagagttacaatgttttcaattctttgagctccaggactccagggaagtgagttgaaaatctgaaaatgcggccatggactggttcctggcgttggattatgctcattctttttgcctgggggaccttgctgttttatataggtggtcacttggtacgagataatgaccatcctgatcactctagccgagaactgtccaagattctggcaaagcttgaacgcttaaaacaacagaatgaagacttgaggcgaatggccgaatctctccggataccagaaggccctattgatcaggggccagctataggaagagtacgcgttttagaagagcagcttgttaaggccaaagaacagattgaaaattacaagaaacagaccagaaatggtctggggaaggatcatgaaatcctgaggaggaggattgaaaatggagctaaagagctctggtttttcctacagagtgaattgaagaaattaaagaacttagaaggaaatgaactccaaagacatgcagatgaatttcttttggatttaggacatcatgaaaggtctataatgacggatctatactacctcagtcagacagatggagcaggtgattggcgggaaaaagaggccaaagatctgacagaactggttcagcggagaataacatatcttcagaatcccaaggactgcagcaaagccaaaaagctggtgtgtaatatcaacaaaggctgtggctatggctgtcagctccatcatgtggtctactgcttcatgattgcatatggcacccagcgaacactcatcttggaatctcagaattggcgctatgctactggtggatgggagactgtatttaggcctgtaagtgagacatgcacagacagatctggcatctccactggacactggtcaggtaccccaattatgaatttattagtgataactctatttcctggtcagctggactgcacaatcgatacacagaaaattcacttcgtggagtgatcctggatatacattttctctctcaggcagacttcctagtgtgtactttttcatcccaggtctgtcgagttgcttatgaaattatgcaaacactacatcctgatgcctctgcaaacttccattctttagatgacatctactattttgggggccagaatgcccacaatcaaattgccatttatgctcaccaaccccgaactgcagatgaaattcccatggaacctggagatatcattggtgtggctggaaatcattgggatggctattctaaaggtgtcaacaggaaattgggaaggacgggcctatatccctcctacaaagttcgagagaagatagaaacggtcaagtaccccacatatcctgaggctgagaaataaagctcagatggaagagataaacgaccaaactcagttcgaccaaactcagttcaaaccatttcagccaaactgtagatgaagagggctctgatctaacaaaataaggttatatgagtagatactctcagcaccaagagcagctgggaactgacataggcttcaattggtggaattcctctttaacaagggctgcaatgccctcatacccatgcacagtacaataatgtactcacatataacatgcaaacaggttgttttctactttgcccctttcagtatgtccccataagacaaacactgccatattgtgtaatttaagtgacacagacattttgtgtgagacttaaaacatggtgcctatatctgagagacctgtgtgaactattgagaagatcggaacagctccttactctgaggaagttgattcttatttgatggtggtattgtgaccactgaattcactccagtcaacagattcagaatgagaatggacgtttggtttttttttgtttttgtttttgttttttcctttataaggttgtctgtttttttttttttaaataattgcatcagttcattgacctcatcattaataagtgaagaatacatcagaaaataaaatattcactctccattagaaaattttgtaaaacaatgccatgaacaaattctttagtactcaatgtttctggacattctctttgataacaaaaaataaattttaaaaaggaattttgtaaagtttctagaattttatatcattggatgatatgttgatcagccttatgtggaagaactgtgataaaaagaggagctttttagtttttcagctt

SEQ ID NO: 9898 - protein, 308 aa, Homo sapiens; identical to SEQ ID NO: 9886

SEQ ID NO: 9899 - DNA, 2517 bp, Homo sapiens
attcgcgcgcgcacgccggcgctggccgaggcttccccgcctgcgctcgttgtcagagccgctccggcgcgtgcgcgcgttatctccggccgacccgagcagccggttccctcctctccaggccccctccccatcccacccccgccgcctggccccagccgacccgtcccttcgtctccccgcggaatggggccggcactgctcagggtcgcgcgccctggacccagctcgctctcggtctcgcgctgtcagcgactgcccggctcgcgccgcctcgcgctctgcctcagtcagtggcgccgaaggctccgttaagcggcggcggcggttcctgtttccgtttcttcctctccgttcggtcgggagtagcatcctccactcagccacccttcccactcccccatcgtggggcagctgcggctgagggctgtggctttggcagctgcgacggggagcggcggagaccgcctctgctcccgcctggggttgctgcttttgctcagaggacatccatgaccctaatggtctttttgttcaagataaagtgattttttgcctttgttgattaactggacaaattcaggataccagaaggccctattgatcaggggccagctataggaagagtacgcgttttagaagagcagcttgttaaggccaaagaacagattgaaaattacaagaaacagaccagaaatggtctggggaaggatcatgaaatcctgaggaggaggattgaaaatggagctaaagagctctggtttttcctacagagtgaattgaagaaattaaagaacttagaaggaaatgaactccaaagacatgcagatgaatttcttttggatttaggacatcatgaaaggtctataatgacggatctatactacctcagtcagacagatggagcaggtgattggcgggaaaaagaggccaaagatctgacagaactggttcagcggagaataacatatcttcagaatcccaaggactgcagcaaagccaaaaagctggtgtgtaatatcaacaaaggctgtggctatggctgtcagctccatcatgtggtctactgcttcatgattgcatatggcacccagcgaacactcatcttggaatctcagaattggcgctatgctactggtggatgggagactgtatttaggcctgtaagtgagacatgcacagacagatctggcatctccactggacactggtcaggtaccccaattatgaatttattagtgataactctatttcctggtcagctggactgcacaatcgatacacagaaaattcacttcgtggagtgatcctggatatacattttctctctcaggcagacttcctagtgtgtactttttcatcccaggtctgtcgagttgcttatgaaattatgcaaacactacatcctgatgcctctgcaaacttccattctttagatgacatctactattttgggggccagaatgcccacaatcaaattgccatttatgctcaccaaccccgaactgcagatgaaattcccatggaacctggagatatcattggtgtggctggaaatcattgggatggctattctaaaggtgtcaacaggaaattgggaaggacgggcctatatccctcctacaaagttcgagagaagatagaaacggtcaagtaccccacatatcctgaggctgagaaataaagctcagatggaagagataaacgaccaaactcagttcgaccaaactcagttcaaaccatttcagccaaactgtagatgaagagggctctgatctaacaaaataaggttatatgagtagatactctcagcaccaagagcagctgggaactgacataggcttcaattggtggaattcctctttaacaagggctgcaatgccctcatacccatgcacagtacaataatgtactcacatataacatgcaaacaggttgttttctactttgcccctttcagtatgtccccataagacaaacactgccatattgtgtaatttaagtgacacagacattttgtgtgagacttaaaacatggtgcctatatctgagagacctgtgtgaactattgagaagatcggaacagctccttactctgaggaagttgattcttatttgatggtggtattgtgaccactgaattcactccagtcaacagattcagaatgagaatggacgtttggtttttttttgtttttgtttttgttttttcctttataaggttgtctgtttttttttttttaaataattgcatcagttcattgacctcatcattaataagtgaagaatacatcagaaaataaaatattcactctccattagaaaattttgtaaaacaatgccatgaacaaattctttagtactcaatgtttctggacattctctttgataacaaaaaataaattttaaaaaggaattttgtaaagtttctagaattttatatcattggatgatatgttgatcagccttatgtggaagaactgtgataaaaagaggagctttttagtttttcagctt

SEQ ID NO: 9900 - protein, 169 aa, Homo sapiens; identical to SEQ ID NO: 1456

SEQ ID NO: 9901 - DNA, 539 bp, Homo sapiens
gcgcgcgttatctccggccgacccgagcagccggttccctcctctccaggccccctccccatcccaccccctttcagtatgtccccataagacaaacactgccatattgtgtaatttaagtgacacagacattttgtgtgagacttaaaacatggtgcctatatctgagagacctgtgtgaactattgagaagatcggaacagctccttactctgaggaagttgattcttatttgatggtggtattgtgaccactgaattcactccagtcaacagattcagaatgagaatggacgtttggtttttttttgtttttgtttttgttttttcctttataaggttgtctgtttttttttttttaaataattgcatcagttcattgacctcatcattaataagtgaagaatacatcagaaaataaaatattcactctccattagaaaattttgtaaaacaatgccatgaacaaattctttagtactcaatgtttctggacattctctttgataacaaaaaataaattttaaaaaggaattttgt

SEQ ID NO: 9902 - protein, 45 aa, Homo sapiens
MRMDVWFFFVFVFVFSFIRLSVFFFLNNCISSLTSSLISEEYIRK

SEQ ID NO: 9903 - DNA, 1640 bp, Homo sapiens
gcgcgcgttatctccggccgacccgagcagccggttccctcctctccaggccccctccccatcccaccccctttcagtatgtccccataagacaaacactgccatattgtgtaatttaagtgacacagacattttgtgtgagacttaaaacatggtgcctatatctgagagacctgtgtgaactattgagaagatcggaacagctccttactctgaggaagttgattcttatttgatggtggtattgtgaccactgaattcactccagtcaacagattcagaatgagaatggacgtttggtttttttttgtttttgtttttgttttttcctttataaggttgtctgtttttttttttttaaataattgcatcagttcattgacctcatcattaataagtgaagaatacatcagaaaataaaatattcactctccattagaaaattttgtaaaacaatgccatgaacaaattctttagtactcaatgtttctggacattctctttgataacaaaaaataaattttaaaaaggaattttgtaaagtttctagaattttatatcattggatgatatgttgatcagccttatgtggaagaactgtgataaaaagaggagctttttagtttttcagcttatttactttgttttttttcctgtttctgatatagtaactaattcttaactcagagacattggtccattttaatactgaaaaccaattttcattggtacacattacaaaattgctaagaacactgtttgggagctttcattctcatattttggacattgttttaattgagtgaaataatcataactccttgctcccagagaagctatcacctccatttctaaaaccatttcaggtttgtttggtagtctttcttaatgtatttattatcgctttttgtgagtagggtcctgttttatccaggaaccaatttctgccctagcctatcatgccctgcttttgagagtaccaggtatctttgggattgggaagctggctgtttcagaagtatatgtctcatagtgtgcagaacttggtgaccaagtgagaagcgggaccaatgggagactcacaatggactgagtcttgggattatcttttccaaattcttccatgttagaatcacttcagaaaataagactttgatgctttgtctctgagcatcatttttctcctcataaaaacacttccttattgtatgtagcctgcctcctacagaggcctggtaggtgttactgcattctaaaagaaaaatgtcatctctgtaggagcgactatcaggcctagtgtgaaatattagggatcctaggcagaagagctattagtcctggccttcatatcttcaccaaatgaaaatactgtatataaaatttcaccaccaaacttaactaaattctttttctcaagtcaagcctcccaaagaaaaaagaaattaacttcctacagtgtcagcaagcaattttccatttagttttggtacaaataaaagtcatttgaaacaatctccaactgagcggaggtaattttgattatgagttattttgcaactcgcatctcacatgtcattggaacatcagtaactgtggatctgatttgtgcccttatagaagatccaaaggtaaattaagtt

SEQ ID NO: 9904 - protein, 53 aa, Homo sapiens
MYLLSLFVSRVLFYPGTNFCPSLSCPAFESTRYLWDWEAGCFRSICLIVCRTW

SEQ ID NO: 9905 - DNA, 2630 bp, Homo sapiens
gatgatcctagtagaagtcaaatgagatcatttttgatagttggtttgcaggcttcggtgtatgcacccaacctttcaaagactgcctgtgcttttcagggagctcagttttgtgactgaaaggatcagctattctcttctacctttttaatgcactactggtttctagcagctgctgcttaacgctgttcattcttgagtttggtgaattgttttctgtgctccatgtgatttctttgtctttatgaggtacattttgactacagcatgtagagcgcatgaagtacaggacaataaagcttcctacacatatcaccaggaggatctctttgaaagattcactgcaggactaccagagagaataatttgtctgaagcatcatgtgttgaaacaacagaagtctattcacctgtgcactaactagaaacagagttacaatgttttcaattctttgagctccaggactccagggaagtgagttgaaaatctgaaaatgcggccatggactggttcctggcgttggattatgctcattctttttgcctgggggaccttgctgttttatataggtggtcacttggtacgagataatgaccatcctgatcactctagccgagaactgtccaagattctggcaaagcttgaacgcttaaaacaacagaatgaagacttgaggcgaatggccgaatctctccggataccagaaggccctattgatcaggggccagctataggaagagtacgcgttttagaagagcagcttgttaaggccaaagaacagattgaaaattacaagaaacagaccagaaatggtctggggaaggatcatgaaatcctgaggaggaggattgaaaatggagctaaagagctctggtttttcctacagagtgaattgaagaaattaaagaacttagaaggaaatgaactccaaagacatgcagatgaatttcttttggatttaggacatcatgaaaggtctataatgacggatctatactacctcagtcagacagatggagcaggtgattggcgggaaaaagaggccaaagatctgacagaactggttcagcggagaataacatatcttcagaatcccaaggactgcagcaaagccaaaaagctggtgtgtaatatcaacaaaggctgtggctatggctgtcagctccatcatgtggtctactgcttcatgattgcatatggcacccagcgaacactcatcttggaatctcagaattggcgctatgctactggtggatgggagactgtatttaggcctgtaagtgagacatgcacagacagatctggcatctccactggacactggtcaggtaccccaattatgaatttattagtgataactctatttcctggtcagctggactgcacaatcgatacacagaaaattcacttcgtggagtgatcctggatatacattttctctctcaggcagacttcctagtgtgtactttttcatcccaggtctgtcgagttgcttatgaaattatgcaaacactacatcctgatgcctctgcaaacttccattctttagatgacatctactattttgggggccagaatgcccacaatcaaattgccatttatgctcaccaaccccgaactgcagatgaaattcccatggaacctggagatatcattggtgtggctggaaatcattgggatggctattctaaaggtgtcaacaggaaattgggaaggacgggcctatatccctcctacaaagttcgagagaagatagaaacggtcaagtaccccacatatcctgaggctgagaaataaagctcagatggaagagataaacgaccaaactcagttcgaccaaactcagttcaaaccatttcagccaaactgtagatgaagagggctctgatctaacaaaataaggttatatgagtagatactctcagcaccaagagcagctgggaactgacataggcttcaattggtggaattcctctttaacaagggctgcaatgccctcatacccatgcacagtacaataatgtactcacatataacatgcaaacaggttgttttctactttgcccctttcagtatgtccccataagacaaacactgccatattgtgtaatttaagtgacacagacattttgtgtgagacttaaaacatggtgcctatatctgagagacctgtgtgaactattgagaagatcggaacagctccttactctgaggaagttgattcttatttgatggtggtattgtgaccactgaattcactccagtcaacagattcagaatgagaatggacgtttggtttttttttgtttttgtttttgttttttcctttataaggttgtctgtttttttttttttaaataattgcatcagttcattgacctcatcattaataagtgaagaatacatcagaaaataaaatattcactctccattagaaaattttgtaaaacaatgccatgaacaaattctttagtactcaatgtttctggacattctctttgataacaaaaaataaattttaaaaaggaattttgtaaagtttctagaattttatatcattggatgatatgttgatcagccttatgtggaagaactgtgataaaaagaggagctttttagtttttcagctt

SEQ ID NO: 9906 - protein, 308 aa, Homo sapiens; identical to SEQ ID NO: 9886

SEQ ID NO: 9907 - DNA, 1914 bp, Homo sapiens
atgaactttcctcttagcaccacctttgccatatcccagaggttatggtaggatttgtcgttactgtcattcagttcaaagaatttttaaatttccatgttgattttgtttttgacccagtgatcattcaggagcaggatcccagaaatgcagatggccactttatttgctacccaacactaataccgacgctggaaaactgagatggcaccgaatcctgagagacagatatcttaacttatttaacttaactcatttaactcatgatggtgaaattttacaaaaacacatccagagcctgcagcactttctcagattgaccagcctacaattgtgtatcaactgcttgtttactaactgccaagaacctttgtaatcccaaggactgcagcaaagccaaaaagctggtgtgtaatatcaacaaaggctgtggctatggctgtcagctccatcatgtggtctactgcttcatgattgcatatggcacccagcgaacactcatcttggaatctcagaattggcgctatgctactggtggatgggagactgtatttaggcctgtaagtgagacatgcacagacagatctggcatctccactggacactggtcaggtaccccaattatgaatttattagtgataactctatttcctggtcagctggactgcacaatcgatacacagaaaattcacttcgtggagtgatcctggatatacattttctctctcaggcagacttcctagtgtgtactttttcatcccaggtctgtcgagttgcttatgaaattatgcaaacactacatcctgatgcctctgcaaacttccattctttagatgacatctactattttgggggccagaatgcccacaatcaaattgccatttatgctcaccaaccccgaactgcagatgaaattcccatggaacctggagatatcattggtgtggctggaaatcattgggatggctattctaaaggtgtcaacaggaaattgggaaggacgggcctatatccctcctacaaagttcgagagaagatagaaacggtcaagtaccccacatatcctgaggctgagaaataaagctcagatggaagagataaacgaccaaactcagttcgaccaaactcagttcaaaccatttcagccaaactgtagatgaagagggctctgatctaacaaaataaggttatatgagtagatactctcagcaccaagagcagctgggaactgacataggcttcaattggtggaattcctctttaacaagggctgcaatgccctcatacccatgcacagtacaataatgtactcacatataacatgcaaacaggttgttttctactttgcccctttcagtatgtccccataagacaaacactgccatattgtgtaatttaagtgacacagacattttgtgtgagacttaaaacatggtgcctatatctgagagacctgtgtgaactattgagaagatcggaacagctccttactctgaggaagttgattcttatttgatggtggtattgtgaccactgaattcactccagtcaacagattcagaatgagaatggacgtttggtttttttttgtttttgtttttgttttttcctttataaggttgtctgtttttttttttttaaataattgcatcagttcattgacctcatcattaataagtgaagaatacatcagaaaataaaatattcactctccattagaaaattttgtaaaacaatgccatgaacaaattctttagtactcaatgtttctggacattctctttgataacaaaaaataaattttaaaaaggaattttgtaaagtttctagaattttatatcattggatgatatgttgatcagccttatgtggaagaactgtgataaaaagaggagctttttagtttttcagctt

SEQ ID NO: 9908 - protein, 169 aa, Homo sapiens; identical to SEQ ID NO: 1456

SEQ ID NO: 9909 - DNA, 464 bp, Homo sapiens
attcagtgatagtggcggtggataacaatgacctcctaccagctgtgaatttctcgtcttccactagtactagtaaaagagattgctgctggctaagaatacccaccggtggggtcttgagccttggaggagcctccctcggggtcaggaatcgagcggggacaccgctgggccactcagaaggaccgtttcctggggactgatcaagaggagggaaggtcctattacagcccagaggccacgtggggcctgagccccaaacctcagctgctgttccagcagccccgtagctgggtggagcctccgggcctgacgtggaccttcactggagaagtgactcaggtgggaaaagtctccccgggcctctccacctgcaggatcgccttcctacaccttcccccgcccgcttccttcgcgcgggctcctcccaatgaccaccagcagaactgcagcctcctgcctta

SEQ ID NO: 9910 - protein, 113 aa, Homo sapiens
ALEEPPSGSGIERGHRWATQKDRFLGTDQEEGRSYYSPEATWGLSPKPQLLFQQPRSWVEPPGLTWTFTGEVTQVGKVSPGLSTCRIAFLHLPPPASFARAPPNDHQQNCSLL

SEQ ID NO: 9911 - DNA, 5334 bp, Homo sapiens
ctgtcactgcagcctggcggcctgagcgccgagcctggggctggggccgcggtgctgaggacgcaaatcagccccgtagctgggtggagcctccgggcctgacgtggaccttcactggagaagtgactcagggatcctcccaggatgtctgcctcaccagacgacctgagtacagggggaaggttacagaacatgacagtggatgaatgcttccagtctcggaacaccgtcctccaggggcagccctttgggggtgtccccaccgtgctgtgcctcaacatcgccctgtgggtgctcgtccttgtggtttactccttcctccggaaagctgcgtgggactatgggcgcctggctctgctgatacacaatgacagcctgacctcgctgatctatggggagcagagcgagaagacatctccctcggagacttccttggagatggaacgcagagacaagggattctgttcctggttcttcaacagcataacaatgaaggacgaggatctgattaacaagtgtggggacgacgcacgcatctacatcgtgttccagtaccacctcatcatctttgtgctcatcatctgtatcccctccctgggcatcattttgcccatcaactatactggatctgttctggactggagcagtcactttgctcggaccaccattgtcaatgtctccacagagagcaagctcctgtggctgcatagcctgctgtccttcttctacttcatcaccaacttcatgttcatggctcatcactgcctggggtttgcacccaggaatagccaaaaggtcacaaggacactaatgatcacctatgtgcccaaggacattgaagacccagaactcatcattaagcattttcacgaggcctatccaggcagtgtcgtgacaagagtccacttctgctacgacgtcaggaacctgatcgacttggacgatcagaggcgccatgccatgcggggccggcttttctatacagccaaggccaagaagactgggaaggtgatgatcaggatccacccctgtgcccgcctgtgcttctgcaagtgctggacctgcttcaaggaggtggatgcagagcagtattacagcgagctagaggagcagctaacggacgagttcaacgccgagctcaaccgcgtgccgctcaagcggctggacctgatctttgtcaccttccaggactccaggatggccaagcgtgtccgtaaggattacaagtatgtccagtgtggtgtgcaaccccagcagtcctcagtgaccaccatcgtcaaatcatattactggagggtcactatggccccacaccccaaagacattatttggaaacacctgtctgtccgccgcttcttttggtgggcccgctttatcgcaatcaacaccttcctcttcttcctcttcttctttctcaccacgcctgccatcatcatgaacactatcgacatgtacaacgtcacccgccccatcgagaagctgcagaacccaattgtgacccagttcttcccctctgtgatgctctggggcttcacagtgatactgcctctgattgtctacttctccgccttcctcgaggcccactggaccagatcaagtcagaatctggtcatggtgcacaagtgctacatctttctggtgttcatggtagtcattctgccctctatgggactgaccagtttggatgtctttctccgctggctctttgacatctactatctagagcaagcatccatcaggttccagtgtgtgttcctgccagacaacggcgccttctttgtcaactacgtgatcacggcagctttacttggcacaggcatggagctgctgcgtctggggtcactcttctgctacagcacccgcctcttcttctctagatcagagccagagagagtcaacatcagaaagaaccaggccatagacttccagtttgggcgtgagtatgcgtggatgatgaacgtgttcagcgtggtgatggcgtacagcatcacttgccccatcattgtgccttttgggttgctctacctgtgcatgaagcacttgacggatcgctataacatgtactactcctttgcacccaccaaactgaacgagcagatccacatggctgccgtctcccaggccatctttgcgccactcttgggtctgttctggatgctgttcttctccatcctgcggttgggttctctccacgccatcaccatcttttccctgtccaccctcctcattgccatggtgattgcctttgttggcatttttctggggaagcttcggatggttgccgactacgagcccgaggaggaggagatccagacagtgtttgacatggagccaagcagcacctcctccacgcccacctccctcctgtatgtggccaccgtgctgcaagaaccggagttgaatctgacccccgcctcctccccagccaggcacacctatggcaccatgaacaaccagccggaagagggagaagaagagagtggtctgaggggctttgcgagggagctagactcggcccagttccaggaagggctggaactggagggccagaaccagtaccactgaccgggacctgaggcctccactggcgacttgttgaggggtcaggggagggcctggcaaggggaggcaggagggtggcctggacctccccactacctcctgcagactttgagaagcccacagtggagacatccaccaccccagccatgggccatacgggggtcctgacctgctgcccggctggaactgggggtgctcggcagtgctgaaggagcctgggaagggatgggaggatacaggcaagcacatgtcttgagagaggtggctggagccccggcacagagactgaacgctggggtcccttcctgggaccaagatggagaaggtgttcctaagggaggagacagaaggaggctgccgaaggctctgtggggtcatcaccactctgcatcagctgcccttccaaggagcttctgctgctgctcctcctcccagccccggcccattcctcccctgcagtctgaggaggcaaaggtatgtgcacggggcacattgacaggacacggaggaccacctcatcacagggttccctgcatggggatctgtaaagagaaagtttctgcacccaccagagcaagagccaactgaaagcgtagacctgagaagaggtaactcagccccttcctgctcctctgccctcatcagatgtccccaggagcagcagggcagaggcccttctttctattcttacaagggtagctagagcgtgatcactcagggctcatcaaatgagactcgtgtgcatttttcagaaggaaaccttggttagtccttgctgggtaacacaaagtggggtgagacgacagaagccgaattcatggaaggggggtcttctccccaaaactctgtgtggtgggaaaccagctatacctccccaagccccagggcctaaagagaagacccccgaagccaaagatgtggccacttaaaagcgtctcctgcctcctacccaactgagtgcctgggcccccagcttggccaagatgggcagtacgttagggtaagaaccccatgcttcaaacttaaggactgaccatcacctgcgtcccaagtaggacccttcctcccttctcggggctgcccctgcaccctgccttgaagaccacccaagcggcctccagtgtgggcctggtccagacattgcagatgcttcaaccgtgatgtcgccccaggcctgccaggggtgtggtggaggggaaggccacgtgctccagggagaagccctttctggagaagcaaggctgtcctcccagggctgccactaccagagacctgggggagctgaattccgaacagtgatggtgacactcagcacctttgccacagccggggggaaccggcttctgcctctgggatgggctctcatcaggaccaccgtgcagcccagccagggaggacatgagaagggccagtgggggcctcaatgaaccagaacaagccaagctgaatggggtctgtgtgctccagggccctcttcagccccctcccccaaaggtctgggtccctgccaccaacctactgaaggccggcccccggctcacctcacctgagcacctgcaccaggccccaggcacatggctgccctgaactcagatcacctagaccttgtccctgccccacctttgccccatcctagccccagaagctccaagcttcaccgcaggtgagaaattgtgctcaatgggcagaaactgctatacccccagggcatggcccacattttggcatgagggtgtctttccagagagcttgggttggctggagagaggctgtctttcccattccttgtccagctaggaataaaggggaaatggtcctagcctggcccctacacacccaggtcccacaggccccctccccactggaatttcaccaaccaacaaggggaaagtacgctgttacagcatagcggtcaggcccagcaggagcttggcacatgatggggaggtggccagctccaggccctgcccgaccccatcatgtgtatttggtgtatggggtgtggggggtcacaccagaagctggcctggggtctcttctttgctggacacagctccctggcccctgcccccagcccctgcagcccctgccggactgtggaagccacatatgggaaaagtcctggcagacaatgtggcgggatgactgggggcttctccctctgaacctgggtccagtgtagcctggctctgagagaaggtggtgagcatgtggagaaggttccatagtccactcttaggggaaccagcaaagcctcatggcagttggctccatctggacctcccatggtcactacaggatggtggagcagggggcatcttttagcctccccccgccaccacatccaggccctctcaggcacctcctgcctcagcccacacctgcctcacccattgcccccctccccccacctactgccatcccactcctctgccagccacttcccagccgccccaccccactccatccaccaaatcacctcctgacttaatcctttctggaaggagctgccgcccaggaaccggtattgcctagagcctccaggaggggccctcctcaggcctccagtggccccatgcccacctgcctgaccctccactgcccctggaagcaaagtgcctatcagcagcgttgcgtcctctggggcccccggtcgggggggagggggtgtgggctaaccttggccaccaccacaaaaggaatgtgccagaatgctgaaccttcttgttaatgctatgaccgtgccttgaataaacaagtcctcccaacctc

SEQ ID NO: 9912 - protein, 806 aa, Homo sapiens
MSASPDDLSTGGRLQNMTVDECFQSRNTVLQGQPFGGVPTVLCLNIALWVLVLVVYSFLRKAAWDYGRLALLIHNDSLTSLIYGEQSEKTSPSETSLEMERRDKGFCSWFFNSITMKDEDLINKCGDDARIYIVFQYHLIIFVLIICIPSLGIILPINYTGSVLDWSSHFARTTIVNVSTESKLLWLHSLLSFFYFITNFMFMAHHCLGFAPRNSQKVTRTLMITYVPKDIEDPELIIKHFHEAYPGSVVTRVHFCYDVRNLIDLDDQRRHAMRGRLFYTAKAKKTGKVMIRIHPCARLCFCKCWTCFKEVDAEQYYSELEEQLTDEFNAELNRVPLKRLDLIFVTFQDSRMAKRVRKDYKYVQCGVQPQQSSVTTIVKSYYWRVTMAPHPKDIIWKHLSVRRFFWWARFIAINTFLFFLFFFLTTPAIIMNTIDMYNVTRPIEKLQNPIVTQFFPSVMLWGFTVILPLIVYFSAFLEAHWTRSSQNLVMVHKCYIFLVFMVVILPSMGLTSLDVFLRWLFDIYYLEQASIRFQCVFLPDNGAFFVNYVITAALLGTGMELLRLGSLFCYSTRLFFSRSEPERVNIRKNQAIDFQFGREYAWMMNVFSVVMAYSITCPIIVPFGLLYLCMKHLTDRYNMYYSFAPTKLNEQIHMAAVSQAIFAPLLGLFWMLFFSILRLGSLHAITIFSLSTLLIAMVIAFVGIFLGKLRMVADYEPEEEEIQTVFDMEPSSTSSTPTSLLYVATVLQEPELNLTPASSPARHTYGTMNNQPEEGEEESGLRGFARELDSAQFQEGLELEGQNQYH

SEQ ID NO: 9913 - DNA, 7902 bp, Homo sapiens
gggaggacgcgcggcgcgcccggcggacgccgcaggtcccatgccgcgccgcgacccccgcgcccctgccgcccgcgcccgcggccgccccccgccgcccgccgccccgggctcgccgcgccgcgcccgcgcgtccttagcggggccaccgagcgatgcccgccgggcgcccgcgaaagtttgtcggctcctgctgaagggcagcggcgcccccgcacccccgtgccccgctccggccaggagccttcacgtaaatgggtccagtcatgcctcccagtaagaagccagaaagctcaggaattagtgtctccagtggactgagtcagtgttacgggggcagcggtttctccaaggcccttcaggaagacgatgacctcgacttttctctgcctgacatccgattagaagagggggccatggaagatgaagagctgaccaacctgaactggctgcacgagagcaagaacttgctgaagagctttggggagtcggtcctcaggagtgtcagccccgtccaggacctggacgatgacacccccccatcccctgcccactctgacatgccctacgatgccaggcagaaccccaactgcaaacccccctactccttcagctgcctcatatttatggccatcgaggactctccaaccaagcgcctgccagtgaaggatatctacaactggatcttggaacattttccgtattttgcaaatgcacctactgggtggaaaaactcagtgagacacaatttatcattgaataagtgttttaagaaagtggacaaagagaggagtcagagtattgggaaagggtcgttgtggtgcatagacccagagtatagacaaaatctaattcaggctttgaaaaagacaccttatcacccacacccacacgtgttcaatacacctcccacctgtcctcaggcatatcaaagcacatcaggtccacccatctggccgggcagtaccttcttcaagagaaatggagcccttctccaagttcctccaggagtgatccaaaatggagcgcgggtcctgagccgagggctgtttcctggcgtgcggccgctgccaatcactcccattggggtgacagcggccatgaggaatggcatcaccagctgccggatgcggactgagagtgagccatcttgtggctccccagtggtcagcggagaccccaaggaggatcacaactacagcagtgccaagtcctccaacgcccggagcacctcgcccaccagcgactccatctcctcctcctcctcctcagccgacgaccactatgagtttgccaccaaggggagccaggagggcagcgagggcagcgaggggagcttccggagccacgagagccccagcgacacggaagaggacgacaggaagcacagccagaaggagcccaaggattctctgggggacagcgggtacgcatcccagcacaagaagcgccagcacttcgccaaggccaggaaggtccccagcgacacactgcccctcaaaaagagacgcaccgaaaagccccccgagagcgatgatgaggagatgaaagaagcggcagggtccctcctgcacttagcagggatccggtcctgtttgaataacatcaccaatcggacggcaaaggggcagaaagagcaaaaggaaaccacaaaaaattaaaaacaagtcactgatttgttttgaacttacgaccatttggtttcagcatgtcaggagatttctaatgatttgtggcaatatcagcaattttttttcttttttcttgtttttggtttggttttctttcttttcttttccttttattttgttttaatttgccccctcttctttgttttggacccttaagaattttatttttaaaggagattgaagccatagaactcatattgacactcagctgttttacaaaagcttttcattatctgaagacaaaaccgaaaaagccaaaattaccattgcttcctccagcttgtcagaaacctgtggctgaatccgcagggatgtcaacgtcaatatcacaggaacacacattcggcacctagaaggcacgtgggcaaagtaatcatcgttcaggcccaacccttaggtttaaaaagtcaggttgtccatcccattgggttcactgagtgaaggcacataaagcaattgaggaggaggaggaacccctcgtccccctaggagcagacccaagcttgtggcaccaggcatctgatggtgccaggaaagccactggaattgtcacacggcgagcacagagggccggccaccagtcctcgatgcttctgaaccctgaagcccgatgacatcttacgaggtggacgttggactgttcatgcgcatcgggtgtcagtgactcatggagaagaaatggggtaaatttttagtgatgttgctaatcattgaattctgttctctattaaattaagaaaatgttccaaaagccataagcctgaagattggccctgtgcacgcacgcacacacacacacacacacacacacacacacacacacacacgaaggagagagagagaaaactgatggggaaaacaagctgtgtcttcttaactgcccaagtgaaaagcaaccaagtccaggaaattacaatagctgttaaggaaaggaaataatggtacagatctttttctgtctatcaaaactatttgatccaagtgaaaaaaaaaaaaaaactagaaagctacggaacctgccattagtattgtggtgtatttttaagattaaaggtacactgatggacaaaaaaaaaaagtaaaacatggcaaaaaataaaataactcctatactgccctcaaaatggagtttgcaattaatatcaggatttatctttgcaaaaatcagtgatttccacattcagccagtatagccagcagaaatttctgatccacaatgcatggattcctttgaagaaaaaaaagaaaaagagaaaaaaatcacaaaaacaaactttttttattcaaaagtaacaaagttcttgtaaggtaaataatgtatttagcatgaagcatgaattattttcatataaatatagaaaatagagaaaaggctatgcctgtaatttttaagcccttaggcttagagtttcttttggttttcttcttttttctttccttttctttgctttctttttttcctttttgtttttgtttttgttttttgtttttgtttttttttcgggttattttgttttggttttttgaagcaggtgtttaaggtttaaccttcttcagggacaaattctgactgttggggaacttactctgcaatataaaaatatcttcatgctctggtagggcttggatggttgaactctgtactgccttgtgtgcacttcagccccgaccccctctgattctctgttgaaaagtgtgtcctttctctctgtctgtacatgtttaacatgacgcaataatttgagggcaaacttagtagtgagtgtgtatgatagaatcaagagaattatgggacgcttacttgagaaaatcattaccatgatttggttctaggaaaaaggcagtgaataattatgcaaattagccagaagaaggggaaccgtgctaatgggccttattgggtgaggggacgagatggggttcatgtgaaggaggaagcgatgccgaggtaggaaaggccagccccagacatcctatcgccacaatgccatgtcgcaataggaagcaggggccggccatcgctaccttcagcacactgaccaacctggaattaagaccacctagattgcgagagctgaatttagaaaccagacaacgtcatgcagcccagaaactcctgttgttacctttgcctaagaaattttctttaatggcgggggcggggggcgggggtacaaagagaaatctctaaaagaatatgatcttccatccaagtggagggaaactttaaaacaaaaacacccagtactgtggctcaggatatgatgcgtgaggagagggagggaacagagatgaccttaacttttaaaaaagggactgctgtgggccaaagccaagcccatctgccaggacgaggtaatgtcagagctccatcagcccggacagtgggaactaactggtgcattccccacacttaccttccggtgggttgctgatgagagaacctgaaaaaacctacacctctacagcaggtcgaattcatgacctgaagctgaatacttccagcatatttattcagggtgtaggtgggaataaagtatcttcgcagtgctctgttccctccgtctccccagacatctgacaccctaaaagccatccacagctatggaacctgagcgacaccttgatttgtgttgtcacctgaccaagcctaaagacctccagctcagtcccccaccttcatcccaccccacagatgataaaattcagacctctctcctgaaaggcagaggttcaacattcaggactgtttctggccgaggacttcttccaattaaaacccccaccgtgggctgtctcccctcatttcatttttctaaaggggcagaggcctcttttagaaaataataaaatgcaatgtgtgtgatttacttttctgatctctttgagaaatagagaaatataaaagtgtgttcttaactccagaaccactctttttgcataaatacctcatcgggcagctttctaagtgtgattttcctgagtctcccttcgttggatctgccggaagacttgtcggggaacctttagtgagggtacttcttcctatttttcttctgtttttggaggcatacacattatgcataaccaaaacaatggctcaattgtgtttaactttgtattttgattgttgagaacaaaaacaaaaagtatcaatgtgtatgtggctgtttgtagtgaatttattggagaatgaggttgtccgtgtccttaacaagccaaggggcaggaggcaccctctcttatcccctcctccaagagcagtagagaatttaagcacaagcctatttgtgaaagaatattttgcttaagtgtcattcactttagtcttggaattccttcccaaacgtcaggtgttcttttagcttccaaactagcatatgtatccattagtctgacagatcgcctgaacaccattaagaggtgtggcgtttttgctttcatttctcctgctgggagaagtggcggttcatgtgtcattccagtatctcacatactcacacggggcaggggggagggggaaacggggaactatagcaatatttaaagatgctttggaaaccaaccgtgaacacatcaacaccacgacgtctacgattacttgctattggccctcggatacatttaagagaaagagacagtcactcttttttttcttaaatgatatacatataaacagttatttttatcctattataattgtcttttgtctttatctagtactatgtggaaagggtttgcatcatagatttttcccagccttataatataccataagctcctacttccctgcccctccctaatcagtattctttcaagagttctttggtgaagccatctatctgaaactaaaatgaaccaaacccatatttcactggtggttggagaaaaccatggccaaaacgattgtggcaggtctcaatcttgggagtttttaagaaggaatgtgccagaggccgattcccaagaacagagttttcttttgttttgcagaggcattcaatgtgtctagtgcttgctggccacagcagttactaccacagagccttctgggaggggccgttgtgttgaaggaggctcctgcctgagggacagcatcaggcagtgggctctgtagagtgagaaccaggtggaggccttctgtgcccagctcagagttctgcaccacgccaggactgcccaggccaagggctactgacgcaagttccactcattccactctgtggggggcgccttgggcctctcctggaagggctcttggagaaggaattggagttacgtacaagtgacctaaatgggaagcttttctagatgagattggattaaattccatgtgatttctctttccctttaatccaggttgggactcgtttctttctggtggatcacagctgcccagatgttgcaattgatttttatgtttctgtagagaagtatttttctttcatcttcaggattttttttgccaccaaaagaaaacattggaactctgtgtttcctcttgattgtgacttcccagtgttgacagttaagtccttagtgtcgtaggtcccagcccaccaatactatatcaaacactgttatgcacataatgcagcactgtgatctaatttaaataatacttttttattatttatactactatatataatatacatcaacacttttgctatataacctaagtgataaccctcttttagttacctgccaaactctggacttggtttatattgcagttaacacagttacaaagctgtaatggtgtctttttttcctttgtaacggaatgtgtaaatcaaagtatatacattgtgtggtgttcctgtttctggagtttcatgaggatttacacatggcattcagtgttctgtatagatctgcctacctttgtgaattcatctgttaacccctcttcctttgagagagcaccggcgatggtggttaactccttgtgttttctctctctcctactggttattcttgaattaagcacagactcgtcagctcggttgctttatcatgaataatgtgtgtgaccttgcagttcttccacagttcagcaaacaagtgctagcttcactgaccaaaaattaaggaaggaaaacacagtttttaaaacgatccatcttttaacagccgaaaccgatgtgtctatggtgctgcaccttgctgttgtacttctgaaatcagacgtgtgtgaacgatcatttctgacttaaccgtgagatgctcacgagtacccttcctgttgttttgttagcattgaaatcgagactatttatttggaatatatacaacagtgtttttccactgtatttcatttgcaaaagttgagaactgctttctctaccttttgcaaaataattgatattccatattggattctcaaagacttcgatatggtgaacctattaaacctagaaattgtattcatcctttcatgactgtggcctgagttccccagcccctctcctccttttttttagatgagatttagcacactctcagttatttaaacatgcaacatttcttgagtatgtatgttgaggccatctgagctcatagctgattcagtaaccagtttcatgctgtgtcattcacactcactacttaatactgccatggtgaaaatgtggaggaaaaatgtatccatgtgtgtctgggaagcatatacacttgtacattttttaatactctgattctgtaacatttctgagttttgttttgttttacagaaaaaaaaaaaaagtgataaagcaatcagaagaccaagaggtttactattgatgcttagggtcgtctgaccttggctggccaatagacctacacggccaaattaatttacgagagtaataatttttcaaaagccaattttttttctgtattttctgtatgaaactgccaatatcatgaatagaaagggagaaccataaaggagaaagaacgtgatgttctgttatgttcatgtaaacctaaagaaacagtgtggaggcaggcgcgatcagccgaactctagggacttggtgttgcttggaaggcatccatacctgcattttgcattcttcgtatgtaatcatattgccaaagacaaactatttcatcatttattgtaaataacacttttccccagacctaccataaagtttctgtgatgtattgtcttccagttgcaataaaaattactgagttgcatcaattgaagaaaaacacc

SEQ ID NO: 9914 - protein, 468 aa, Homo sapiens; identical to SEQ ID NO: 1460

SEQ ID NO: 9915 - DNA, 3047 bp, Homo sapiens
gcgatctgctgcagctcggccgggagacggcgcgacccggcggcggggccacccgcgagtccagcgtcgccgcagccccccaatgcggccgcgagaagcagcgggggggcaggcgatcgaaggagccttcacgtaaatgggtccagtcatgcctcccagtaagaagccagaaagctcaggaattagtgtctccagtggactgagtcagtgttacgggggcagcggtttctccaaggcccttcaggaagacgatgacctcgacttttctctgcctgacatccgattagaagagggggccatggaagatgaagagctgaccaacctgaactggctgcacgagagcaagaacttgctgaagagctttggggagtcggtcctcaggagtgtcagccccgtccaggacctggacgatgacacccccccatcccctgcccactctgacatgccctacgatgccaggcagaaccccaactgcaaacccccctactccttcagctgcctcatatttatggccatcgaggactctccaaccaagcgcctgccagtgaaggatatctacaactggatcttggaacattttccgtattttgcaaatgcacctactgggtggaaaaactcagtgagacacaatttatcattgaataagtgttttaagaaagtggacaaagagaggagtcagagtattgggaaagggtcgttgtggtgcatagacccagagtatagacaaaatctaattcaggctttgaaaaagacaccttatcacccacacccacacgtgttcaatacacctcccacctgtcctcaggcatatcaaagcacatcaggtccacccatctggccgggcagtaccttcttcaagagaaatggagcccttctccaagatcctgacattgatgctgccagtgccatgatgcttttgaatactccccctgagatacaagcaggttttcctccaggagtgatccaaaatggagcgcgggtcctgagccgagggctgtttcctggcgtgcggccgctgccaatcactcccattggggtgacagcggccatgaggaatggcatcaccagctgccggatgcggactgagagtgagccatcttgtggctccccagtggtcagcggagaccccaaggaggatcacaactacagcagtgccaagtcctccaacgcccggagcacctcgcccaccagcgactccatctcctcctcctcctcctcagccgacgaccactatgagtttgccaccaaggggagccaggagggcagcgagggcagcgaggggagcttccggagccacgagagccccagcgacacggaagaggacgacaggaagcacagccagaaggagcccaaggattctctgggggacagcgggtacgcatcccagcacaagaagcgccagcacttcgccaaggccaggaaggtccccagcgacacactgcccctcaaaaagagacgcaccgaaaagccccccgagagcgatgatgaggagatgaaagaagcggcagggtccctcctgcacttagcagggatccggtcctgtttgaataacatcaccaatcggacggcaaaggggcagaaagagcaaaaggaaaccacaaaaaattaaaaacaagtcactgatttgttttgaacttacgaccatttggtttcagcatgtcaggagatttctaatgatttgtggcaatatcagcaattttttttcttttttcttgtttttggtttggttttctttcttttcttttccttttattttgttttaatttgccccctcttctttgttttggacccttaagaattttatttttaaaggagattgaagccatagaactcatattgacactcagctgttttacaaaagcttttcattatctgaagacaaaaccgaaaaagccaaaattaccattgcttcctccagcttgtcagaaacctgtggctgaatccgcagggatgtcaacgtcaatatcacaggaacacacattcggcacctagaaggcacgtgggcaaagtaatcatcgttcaggcccaacccttaggtttaaaaagtcaggttgtccatcccattgggttcactgagtgaaggcacataaagcaattgaggaggaggaggaacccctcgtccccctaggagcagacccaagcttgtggcaccaggcatctgatggtgccaggaaagccactggaattgtcacacggcgagcacagagggccggccaccagtcctcgatgcttctgaaccctgaagcccgatgacatcttacgaggtggacgttggactgttcatgcgcatcgggtgtcagtgactcatggagaagaaatggggtaaatttttagtgatgttgctaatcattgaattctgttctctattaaattaagaaaatgttccaaaagccataagcctgaagattggccctgtgcacgcacgcacacacacacacacacacacacacacacacacacacacacgaaggagagagagagaaaactgatggggaaaacaagctgtgtcttcttaactgcccaagtgaaaagcaaccaagtccaggaaattacaatagctgttaaggaaaggaaataatggtacagatctttttctgtctatcaaaactatttgatccaagtgaaaaaaaaaaaaaaactagaaagctacggaacctgccattagtattgtggtgtatttttaagattaaaggtacactgatggacaaaaaaaaaaagtaaaacatggcaaaaaataaaataactcctatactgccctcaaaatggagtttgcaattaatatcaggatttatctttgcaaaaatcagtgatttccacattcagccagtatagccagcagaaatttctgatccacaatgcatggattcctttgaagaaaaaaaagaaaaagagaaaaaaatcacaaaaacaaactttttttattcaaaagtaacaaagttcttgtaaggtaaataatgtatttagcatgaagcatgaattattttcatataaatatagaaaatagagaaaaggctatgcctgtaatttttaagcccttaggcttagag

SEQ ID NO: 9916 - protein, 490 aa, Homo sapiens
MGPVMPPSKKPESSGISVSSGLSQCYGGSGFSKALQEDDDLDFSLPDIRLEEGAMEDEELTNLNWLHESKNLLKSFGESVLRSVSPVQDLDDDTPPSPAHSDMPYDARQNPNCKPPYSFSCLIFMAIEDSPTKRLPVKDIYNWILEHFPYFANAPTGWKNSVRHNLSLNKCFKKVDKERSQSIGKGSLWCIDPEYRQNLIQALKKTPYHPHPHVFNTPPTCPQAYQSTSGPPIWPGSTFFKRNGALLQDPDIDAASAMMLLNTPPEIQAGFPPGVIQNGARVLSRGLFPGVRPLPITPIGVTAAMRNGITSCRMRTESEPSCGSPVVSGDPKEDHNYSSAKSSNARSTSPTSDSISSSSSSADDHYEFATKGSQEGSEGSEGSFRSHESPSDTEEDDRKHSQKEPKDSLGDSGYASQHKKRQHFAKARKVPSDTLPLKKRRTEKPPESDDEEMKEAAGSLLHLAGIRSCLNNITNRTAKGQKEQKETTKN

SEQ ID NO: 9917 - DNA, 340 bp, Homo sapiens
gctttgctaagtaagatgtttactggagtacatttctctcctgatatcagagatgcggctgccccaagcacatttagaagttgcactcttggtacaaaagtaaaggtttgttctcttctgcctgcaaaactacagccagcaactagaggtgatacctgaatgtatccggattgacaatcttcatccctggaaaacatgactcccagaatccagcggtgggggacgggggggtcgcatggcgggagaacagctcctcccagtgtgcctcaacacagggcatccaacacccacttgtcactcccaaggctgactgatgaataatgttcccaagtctcgctgc

SEQ ID NO: 9918 - protein, 47 aa, Homo sapiens
MFTGVHFSPDIRDAAAPSTFRSCTLGTKVKVCSLLPAKLQPATRGDT

SEQ ID NO: 9919 - DNA, 1627 bp, Homo sapiens
actgtacacatgctagggtccaggacagcaggaccaagccagcagaaacagcctgagcccaccgcagactggcctggctatactggacaatgccactcctcctgtacacctgtcttctctggctgcccaccagcggcctctggaccgtccaggccatggatcctaacgctgcttatgtgaacatgagtaaccatcaccggggcctggcttcagccaacgttgactttgccttcagcctgtataagcacctagtggccttgagtcccaaaaagaacattttcatctcccctgtgagcatctccatggccttagctatgctgtccctgggcacctgtggccacacacgggcccagcttctccagggcctgggtttcaacctcactgagaggtctgagactgagatccaccagggtttccagcacctgcaccaactctttgcaaagtcagacaccagcttagaaatgaccatgggcaatgccttgtttcttgatggcagcctggagttgctggagtcattctcagcagacatcaagcactactatgagtcagaggtcttggctatgaatttccaggactgggcaacagccagcagacagatcaacagctatgtcaagaataagacacaggggaaaattgtcgacttgttttcagggctggatagcccagccatcctcgtcctggtcaactatatcttcttcaaaggtattcccacccatccccatctgaaggcccatccactatggccaggaataacagccgctaaaatccagggcacactcttgggcaaagtctttgattctgtaaagcacatacacatctgggaatctccatcttcaccacaatcctgctgggcacatggacacagccctttgacctggcaagcaccagggaggagaacttctatgtggacgagacaactgtggtgaaggtgcccatgatgttgcagtcgagcaccatcagttaccttcatgactcggagctcccctgccagctggtgcagatgaactacgtgggcaatgggactgtcttcttcatccttccggacaaggggaagatgaacacagtcatcgctgcactgagccgggacacgattaacaggtggtccgcaggcctgaccagcagccaggtggacctgtacattccaaaggtcaccatctctggagtctatgacctcggagatgtgctggaggaaatgggcattgcagacttgttcaccaaccaggcaaatttctcacgcatcacccaggacgcccagctgaagtcatcaaaggtggtccataaagctgtgctgcaactcaatgaggagggtgtggacacagctggctccactggggtcaccctaaacctgacgtccaagcctatcatcttgcgtttcaaccagcccttcatcatcatgatcttcgaccacttcacctggagcagccttttcctggcgagggttatgaacccagtgtaagagaccacccacccagagcctcagcactgtctgactttgggaaccagggatcccacagaaatgttttggagagcgggaggtttcccccaatctcctccaagttcttctccctccaaccagagttgtgtctaactttaggcatcttttaataaatgtcattgcgactctgat

SEQ ID NO: 9920 - protein, 278 aa, Homo sapiens
MPLLLYTCLLWLPTSGLWTVQAMDPNAAYVNMSNHHRGLASANVDFAFSLYKHLVALSPKKNIFISPVSISMALAMLSLGTCGHTRAQLLQGLGFNLTERSETEIHQGFQHLHQLFAKSDTSLEMTMGNALFLDGSLELLESFSADIKHYYESEVLAMNFQDWATASRQINSYVKNKTQGKIVDLFSGLDSPAILVLVNYIFFKGIPTHPHLKAHPLWPGITAAKIQGTLLGKVFDSVKHIHIWESPSSPQSCWAHGHSPLTWQAPGRRTSMWTRQLW

SEQ ID NO: 9921 - DNA, 1536 bp, Homo sapiens
attaaccacccaggaagctggcaaacaaaatttaacaggcagcatccaccgcaggcttactgtacacatgctagggtccaggacagcaggaccaagccagcagaaacagcctgagcccaccgcagactggcctggctatactggacaatgccactcctcctgtacacctgtcttctctggctgcccaccagcggcctctggaccgtccaggccatggatcctaacgctgcttatgtgaacatgagtaaccatcaccggggcctggcttcagccaacgttgactttgccttcagcctgtataagcacctagtggccttgagtcccaaaaagaacattttcatctcccctgtgagcatctccatggccttagctatgctgtccctgggcacctgtggccacacacgggcccagcttctccagggcctgggtttcaacctcactgagaggtctgagactgagatccaccagggtttccagcacctgcaccaactctttgcaaagtcagacaccagcttagaaatgaccatgggcaatgccttgtttcttgatggcagcctggagttgctggagtcattctcagcagacatcaagcactactatgagtcagaggtcttggctatgaatttccaggactgggcaacagccagcagacagatcaacagctatgtcaagaataagacacaggggaaaattgtcgacttgttttcagggctggatagcccagccatcctcgtcctggtcaactatatcttcttcaaaggcacatggacacagccctttgacctggcaagcaccagggaggagaacttctatgtggacgagacaactgtggtgaaggtgcccatgatgttgcagtcgagcaccatcagttaccttcatgactcggagctcccctgccagctggtgcagatgaactacgtgggcaatgggactgtcttcttcatccttccggacaaggggaagatgaacacagtcatcgctgcactgagccgggacacgattaacaggtggtccgcaggcctgaccagcagccaggtggacctgtacattccaaaggtcaccatctctggagtctatgacctcggagatgtgctggaggaaatgggcattgcagacttgttcaccaaccaggcaaatttctcacgcatcacccaggacgcccagctgaagtcatcaaaggtggtccataaagctgtgctgcaactcaatgaggagggtgtggacacagctggctccactggggtcaccctaaacctgacgtccaagcctatcatcttgcgtttcaaccagcccttcatcatcatgatcttcgaccacttcacctggagcagccttttcctggcgagggttatgaacccagtgtaagagaccacccacccagagcctcagcactgtctgactttgggaaccagggatcccacagaaatgttttggagagcgggaggtttcccccaatctcctccaagttcttctccctccaaccagagttgtgtctaactttaggcatcttttaataaatgtcattgcgactctgat

SEQ ID NO: 9922 - protein, 405 aa, Homo sapiens
MPLLLYTCLLWLPTSGLWTVQAMDPNAAYVNMSNHHRGLASANVDFAFSLYKHLVALSPKKNIFISPVSISMALAMLSLGTCGHTRAQLLQGLGFNLTERSETEIHQGFQHLHQLFAKSDTSLEMTMGNALFLDGSLELLESFSADIKHYYESEVLAMNFQDWATASRQINSYVKNKTQGKIVDLFSGLDSPAILVLVNYIFFKGTWTQPFDLASTREENFYVDETTVVKVPMMLQSSTISYLHDSELPCQLVQMNYVGNGTVFFILPDKGKMNTVIAALSRDTINRWSAGLTSSQVDLYIPKVTISGVYDLGDVLEEMGIADLFTNQANFSRITQDAQLKSSKVVHKAVLQLNEEGVDTAGSTGVTLNLTSKPIILRFNQPFIIMIFDHFTWSSLFLARVMNPV

SEQ ID NO: 9923 - DNA, 568 bp, Homo sapiens
aggcttactgtacacatgctagggtccaggacagcaggaccaagccagcagaaacagcctgagcccaccgcagactggcctggctatactggacaatgccactcctcctgtacacctgtcttctctggctgcccaccagcggcctctggaccgtccaggccatggatcctaacgctgcttatgtgaacatgagtaaccatcaccggggcctggcttcagccaacgttgactttgccttcagcctcactgagaggtctgagactgagatccaccagggtttccagcacctgcaccaactctttgcaaagtcagacaccagcttagaaatgaccatgggcaatgccttgtttcttgatggcagcctggagttgctggagtcattctcagcagacatcaagcactactatgagtcagaggtcttggctatgaatttccaggactgggcaacagccagcagacagatcaacagctatgtcaagaataagacacaggggaaaattgtcgacttgttttcagggctggatagcccagccatcctcgtcctggtcaactatatcttcttcaaagg

SEQ ID NO: 9924 - protein, 156 aa, Homo sapiens
MPLLLYTCLLWLPTSGLWTVQAMDPNAAYVNMSNHHRGLASANVDFAFSLTERSETEIHQGFQHLHQLFAKSDTSLEMTMGNALFLDGSLELLESFSADIKHYYESEVLAMNFQDWATASRQINSYVKNKTQGKIVDLFSGLDSPAILVLVNYIFF

SEQ ID NO: 9925 - DNA, 923 bp, Homo sapiens
ccacccaggaagctggcaaacaaaatttaacaggcagcatccaccgcaggcttactgtacacatgctagggtccaggacagcaggaccaagccagcagaaacagcctgagcccaccgcagactatgaggaaactgaagtccagcgccctctgtgatgtgctccaggtcacacagccagtgtggaggaaggaactggggcttgaatggggtcttttgcctgcctcctcttgcactacgccccattgactcagagactgccacagcatctaacaagcttttctgatttggcagggcctggctatactggacaatgccactcctcctgtacacctgtcttctctggctgcccaccagcggcctctggaccgtccaggccatggatcctaacgctgcttatgtgaacatgagtaaccatcaccggggcctggcttcagccaacgttgactttgccttcagcctgtataagcacctagtggccttgagtcccaaaaagaacattttcatctcccctgtgagcatctccatggccttagctatgctgtccctgggcacctgtggccacacacgggcccagcttctccagggcctgggtttcaacctcactgagaggtctgagactgagatccaccagggtttccagcacctgcaccaactctttgcaaagtcagacaccagcttagaaatgaccatgggcaatgccttgtttcttgatggcagcctggagttgctggagtcattctcagcagacatcaagcactactatgagtcagaggtcttggctatgaatttccaggactgggcaacagccagcagacagatcaacagctatgtcaagaataagacacaggggaaaattgtcgacttgttttcagggctggatagcccagccatcctcgtcctggtcaactatatcttcttcaaag

SEQ ID NO: 9926 - protein, 40 aa, Homo sapiens
MRKLKSSALCDVLQVTQPVWRKELGLEWGLLPASSCTTPH

SEQ ID NO: 9927 - DNA, 2142 bp, Homo sapiens
ggaaaagtggtgaatcccacccaaaaataactgcctctcgctcctcaacccctcccctccatccctggccccctccctggatgacattaaagaagggttgagctggtccctgcctgcatgtgactgtaaatccctcccatgttttctctgagtctccctttgcctgctgaggctgtatgtgggctccaggtaacagtgctgtcttcgggccccctgaactgtgttcatggagcatctggctgggtaggcacatgctgggcttgaatccaggggggactgaatcctcagcttacggacctgggcccatctgtttctggagggctccagtcttccttgtcctgtcttggagtccccaagaaggaatcacaggggaggaaccagataccagccatgaccccaggctccaccaagcatcttcatgtccccctgctcatcccccactcccccccacccagagttgctcatcctgccagggctggctgtgcccaccccaaggctgccctcctgggggccccagaactgcctgatcgtgccgtggcccagttttgtggcatctgcagcaacacaagagagaggacaattcacatggccataggcctgctgatggctcaggaaggccattgcaaggactcctcagctatgggagaggaagcacatcacccattgacccccgcaacccctccctttcctcctctgagtcccgactggggccacatgcagcctgacttctttgtgcctgttgctgtccctgcagtcttcagagggccaccgcagctccagtgccacggcaggaggctgttcctgaatagcccctgtgcccagaaatcttcctctggcctagttgtggagcctggcctaagtcgcacattgctggagatggtgaagctgaccagcatgagaggcagtggcacagcagagccagggccagatctggaggtggctgtgcccccctggggggtgcagactcacagcccctccaacagggagcccctccagagtggagagaacgagtccttcccagtcacacccaggagccctcgggtggcacttggcagctggtgtcaccaccctaagtacccacacaaatgggctatggaggcagagcaacaaggattccagctcctggtgagagattcccaggccagggtcttggtagacacaagcctggtgacttcaggcagctggcaattactgggcatctaccaagggacaataccattctctgtctcatggggcgtcctcctgctggcaggcctgtgctgcctggtccccagctccctggttgaggatccccaggaagatgctgcccaaaagacggatacatcccaccatgatcaaggggactgggaggaccttgcttgccagaagatctcctataacgtcaccgacctcgcctttgatttgtacaaagagctggctgatctatcacaaaccagcaatgtcttagtcaccccaacaagcgtggctatggcctttgcaatgctctccctggggaccaaggctgacactcgcacagagatcctggaaggcctgaatgtcaacctcacagagacgcctgaggccaagatccacgaatgcttccagcaagttctccaagccctcagcaggccagacacccggctccagctgaccaccggcagtagcctgtttgttaacaagagtatgaagctagtggacacgtttttggaggataccaagaagctgtaccactcagaagcctcttccatcaacttcagggacaccgaggaggccaaagagcagatcaacaattatgtggagaaaagaactggaagaaaagtagtggatttggtcaaacacctgaaaaaagacacaagtcttgccctggtggattacatttcctttcacggcaagtggaaagataaattcaaggctgagcgcattatggtagagggcttccatgtggatgataagaccatcatcagagtgcctatgataaaccacctgggtagatttgacatccaccgggacagggagttatccagctgggtgctggcacagcactatgtggggaacgccactgccttcttcatcctgcccgatccaaagaagatgtggcagttggaagaaaaattgacctacagccaccttgaaaatatccagagagcctttgacataaggtga

SEQ ID NO: 9928 - protein, 583 aa, Homo sapiens [sequence omitted]

SEQ ID NO: 9929 - DNA, 2963 bp, Homo sapiens
gacaatgccgtcttctgtctcgtggggcatcctcctgctggcaggcctgtgctgcctggtccctgtctccctggctgaggatccccagggagatgctgcccagaagacagatacatcccaccatgatcaggatcacccaaccttcaacaagatcacccccaacctggctgagttcgccttcagcctataccgccagctggcacaccagtccaacagcaccaatatcttcttctccccagtgagcatcgctacagcctttgcaatgctctccctggggaccaaggctgacactcacgatgaaatcctggagggcctgaatttcaacctcacggagattccggaggctcagatccatgaaggcttccaggaactcctccgtaccctcaaccagccagacagccagctccagctgaccaccggcaatggcctgttcctcagcgagggcctgaagctagtggataagtttttggaggatgttaaaaagttgtaccactcagaagccttcactgtcaacttcggggacaccgaagaggccaagaaacagatcaacgattacgtggagaagggtactcaagggaaaattgtggatttggtcaaggagcttgacagagacacagtttttgctctggtgaattacatcttctttaaaggcaaatgggagagaccctttgaagtcaaggacaccgaggaagaggacttccacgtggaccaggtgaccaccgtgaaggtgcctatgatgaagcgtttaggcatgtttaacatccagcactgtaagaagctgtccagctgggtgctgctgatgaaatacctgggcaatgccaccgccatcttcttcctgcctgatgaggggaaactacagcacctggaaaatgaactcacccacgatatcatcaccaagttcctggaaaatgaagacagaaggtctgccagcttacatttacccaaactgtccattactggaacctatgatctgaagagcgtcctgggtcaactgggcatcactaaggtcttcagcaatggggctgacctctccggggtcacagaggaggcacccctgaagctctccaaggccgtgcataaggctgtgctgaccatcgacgagaaagggactgaagctgctggggccatgtttttagaggccatacccatgtctatcccccccgaggtcaagttcaacaaaccctttgtcttcttaatgattgaacaaaataccaagtctcccctcttcatgggaaaagtggtgaatcccacccaaaaataactgcctctcgctcctcaacccctcccctccatccctggccccctccctggatgacattaaagaagggttgagctggtccctgcctgcatgtgactgtaaatccctcccatgttttctctgagtctccctttgcctgctgaggctgtatgtgggctccaggtaacagtgctgtcttcgggccccctgaactgtgttcatggagcatctggctgggtaggcacatgctgggcttgaatccaggggggactgaatcctcagcttacggacctgggcccatctgtttctggagggctccagtcttccttgtcctgtcttggagtccccaagaaggaatcacaggggaggaaccagataccagccatgaccccaggctccaccaagcatcttcatgtccccctgctcatcccccactcccccccacccagagttgctcatcctgccagggctggctgtgcccaccccaaggctgccctcctgggggccccagaactgcctgatcgtgccgtggcccagttttgtggcatctgcagcaacacaagagagaggacaatgtcctcctcttgacccgctgtcacctaaccagactcgggccctgcacctctcaggcacttctggaaaatgactgaggcagattcttcctgaagcccattctccatggggcaacaaggacacctattctgtccttgtccttccatcgctgccccagaaagcctcacatatctccgtttagaatcaggtcccttctccccagatgaagaggagggtctctgctttgttttctctatctcctcctcagacttgaccaggcccagcaggccccagaagaccattaccctatatcccttctcctccctagtcacatggccataggcctgctgatggctcaggaaggccattgcaaggactcctcagctatgggagaggaagcacatcacccattgacccccgcaacccctccctttcctcctctgagtcccgactggggccacatgcagcctgacttctttgtgcctgttgctgtccctgcagtcttcagagggccaccgcagctccagtgccacggcaggaggctgttcctgaatagcccctgtggtaagggccaggagagtccttccatcctccaaggccctgctaaaggacacagcagccaggaagtcccctgggcccctagctgaaggacagcctgctccctccgtctctaccaggaatggccttgtcctatggaaggcactgccccatcccaaactaatctaggaatcactgtctaaccactcactgtcatgaatgtgtacttaaaggatgaggttgagtcataccaaatagtgatttcgatagttcaaaatggtgaaattagcaattctacatgattcagtctaatcaatggataccgactgtttcccacacaagtctcctgttctcttaagcttactcactgacagcctttcactctccacaaatacattaaagatatggccatcaccaagccccctaggatgacaccagacctgagagtctgaagacctggatccaagttctgacttttccccctgacagctgtgtgaccttcgtgaagtcgccaaacctctctgagccccagtcattgctagtaagacctgcctttgagttggtatgatgttcaagttagataacaaaatgtttatacccattagaacagagaataaatagaactacatttcttgca

SEQ ID NO: 9930 - protein, 418 aa, Homo sapiens; identical to SEQ ID NO: 1466

SEQ ID NO: 9931 - DNA, 4092 bp, Homo sapiens
agctcccaagcaggtttgcgggttgcacagcgggcgatgcaatctgatttaggcttttaaagggattgcaatcaagtggggccccactagcctcaaccctgtacctcccctcccctccacccccagcagtctccaaaggcctccaacaaccccagagtgggggccatgtatccaaagaaactccaagctgtatacggatcacactggttttccaggagcaaaaacagaaacaggcctgaggctggtcaaaattgaacctcctcctgctctgagcagcctggggggcagactaagcagagggctgtgcagacccacataaagagcctactgtgtgccaggcacttcacccgaggcacttcacaagcatgcttgggaatgaaacttccaactctttgggatgcaggtgaaacagttcctggttcagagaggtgaagcggcctgcctgaggcagcacagctcttctttacagatgtgcttccccacctctaccctgtctcacggccccccatgccagcctgacggttgtgtctgcctcagtcatgctccatttttccatcgggaccatcaagagggtgtttgtgtctaaggctgactgggtaactttggatgagcggtctctccgctctgagcctgtttcctcatctgtcaaatgggctctaacccactctgatctcccagggcggcagtaagtcttcagcatcaggcattttggggtgactcagtaaatggtagatcttgctaccagtggaacagccactaaggattctgcagtgagagcagagggccagctaagtggtactctcccagagactgtctgactcacgccaccccctccaccttggacacaggacgctgtggtttctgagccaggtacaatgactcctttcggtaagtgcagtggaagctgtacactgcccaggcaaagcgtccgggcagcgtaggcgggcgactcagatcccagccagtggacttagcccctgtttgctcctccgataactggggtgaccttggttaatattcaccagcagcctcccccgttgcccctctggatccactgcttaaatacggacgaggacagggccctgtctcctcagcttcaggcaccaccactgacctgggacagtgaatcgacaatgccgtcttctgtctcgtggggcatcctcctgctggcaggcctgtgctgcctggtccctgtctccctggctgaggatccccagggagatgctgcccagaagacagatacatcccaccatgatcaggatcacccaaccttcaacaagatcacccccaacctggctgagttcgccttcagcctataccgccagctggcacaccagtccaacagcaccaatatcttcttctccccagtgagcatcgctacagcctttgcaatgctctccctggggaccaaggctgacactcacgatgaaatcctggagggcctgaatttcaacctcacggagattccggaggctcagatccatgaaggcttccaggaactcctccgtaccctcaaccagccagacagccagctccagctgaccaccggcaatggcctgttcctcagcgagggcctgaagctagtggataagtttttggaggatgttaaaaagttgtaccactcagaagccttcactgtcaacttcggggacaccgaagaggccaagaaacagatcaacgattacgtggagaagggtactcaagggaaaattgtggatttggtcaaggagcttgacagagacacagtttttgctctggtgaattacatcttctttaaaggcaaatgggagagaccctttgaagtcaaggacaccgaggaagaggacttccacgtggaccaggtgaccaccgtgaaggtgcctatgatgaagcgtttaggcatgtttaacatccagcactgtaagaagctgtccagctgggtgctgctgatgaaatacctgggcaatgccaccgccatcttcttcctgcctgatgaggggaaactacagcacctggaaaatgaactcacccacgatatcatcaccaagttcctggaaaatgaagacagaaggtctgccagcttacatttacccaaactgtccattactggaacctatgatctgaagagcgtcctgggtcaactgggcatcactaaggtcttcagcaatggggctgacctctccggggtcacagaggaggcacccctgaagctctccaaggccgtgcataaggctgtgctgaccatcgacgagaaagggactgaagctgctggggccatgtttttagaggccatacccatgtctatcccccccgaggtcaagttcaacaaaccctttgtcttcttaatgattgaacaaaataccaagtctcccctcttcatgggaaaagtggtgaatcccacccaaaaataactgcctctcgctcctcaacccctcccctccatccctggccccctccctggatgacattaaagaagggttgagctggtccctgcctgcatgtgactgtaaatccctcccatgttttctctgagtctccctttgcctgctgaggctgtatgtgggctccaggtaacagtgctgtcttcgggccccctgaactgtgttcatggagcatctggctgggtaggcacatgctgggcttgaatccaggggggactgaatcctcagcttacggacctgggcccatctgtttctggagggctccagtcttccttgtcctgtcttggagtccccaagaaggaatcacaggggaggaaccagataccagccatgaccccaggctccaccaagcatcttcatgtccccctgctcatcccccactcccccccacccagagttgctcatcctgccagggctggctgtgcccaccccaaggctgccctcctgggggccccagaactgcctgatcgtgccgtggcccagttttgtggcatctgcagcaacacaagagagaggacaatgtcctcctcttgacccgctgtcacctaaccagactcgggccctgcacctctcaggcacttctggaaaatgactgaggcagattcttcctgaagcccattctccatggggcaacaaggacacctattctgtccttgtccttccatcgctgccccagaaagcctcacatatctccgtttagaatcaggtcccttctccccagatgaagaggagggtctctgctttgttttctctatctcctcctcagacttgaccaggcccagcaggccccagaagaccattaccctatatcccttctcctccctagtcacatggccataggcctgctgatggctcaggaaggccattgcaaggactcctcagctatgggagaggaagcacatcacccattgacccccgcaacccctccctttcctcctctgagtcccgactggggccacatgcagcctgacttctttgtgcctgttgctgtccctgcagtcttcagagggccaccgcagctccagtgccacggcaggaggctgttcctgaatagcccctgtggtaagggccaggagagtccttccatcctccaaggccctgctaaaggacacagcagccaggaagtcccctgggcccctagctgaaggacagcctgctccctccgtctctaccaggaatggccttgtcctatggaaggcactgccccatcccaaactaatctaggaatcactgtctaaccactcactgtcatgaatgtgtacttaaaggatgaggttgagtcataccaaatagtgatttcgatagttcaaaatggtgaaattagcaattctacatgattcagtctaatcaatggataccgactgtttcccacacaagtctcctgttctcttaagcttactcactgacagcctttcactctccacaaatacattaaagatatggccatcaccaagccccctaggatgacaccagacctgagagtctgaagacctggatccaagttctgacttttccccctgacagctgtgtgaccttcgtgaagtcgccaaacctctctgagccccagtcattgctagtaagacctgcctttgagttggtatgatgttcaagttagataacaaaatgtttatacccattagaacagagaataaatagaactacatttcttgca

SEQ ID NO: 9932 - protein, 418 aa, Homo sapiens; identical to SEQ ID NO: 1466

SEQ ID NO: 9933 - DNA, 3284 bp, Homo sapiens
gccgggcaatgagcaaggctccttcctgtccaagctccccgcccctccccagcctactgcctccacccgaagtctacttcctgggtgggcaggaactgggcactgtgcccagggcatgcactgcctccacgcagcaaccctcagagtcctgagctgaaccaagaaggaggagggggtcgggcctccgaggaaggcctagccgctgctgctgccaggaattccaggttggaggggcggcaacctcctgccagccttcaggccactctcctgtgcctgccagaagagacagagcttgaggagagcttgaggagagcaggaaaggacaatgccgtcttctgtctcgtggggcatcctcctgctggcaggcctgtgctgcctggtccctgtctccctggctgaggatccccagggagatgctgcccagaagacagatacatcccaccatgatcaggatcacccaaccttcaacaagatcacccccaacctggctgagttcgccttcagcctataccgccagctggcacaccagtccaacagcaccaatatcttcttctccccagtgagcatcgctacagcctttgcaatgctctccctggggaccaaggctgacactcacgatgaaatcctggagggcctgaatttcaacctcacggagattccggaggctcagatccatgaaggcttccaggaactcctccgtaccctcaaccagccagacagccagctccagctgaccaccggcaatggcctgttcctcagcgagggcctgaagctagtggataagtttttggaggatgttaaaaagttgtaccactcagaagccttcactgtcaacttcggggacaccgaagaggccaagaaacagatcaacgattacgtggagaagggtactcaagggaaaattgtggatttggtcaaggagcttgacagagacacagtttttgctctggtgaattacatcttctttaaaggcaaatgggagagaccctttgaagtcaaggacaccgaggaagaggacttccacgtggaccaggtgaccaccgtgaaggtgcctatgatgaagcgtttaggcatgtttaacatccagcactgtaagaagctgtccagctgggtgctgctgatgaaatacctgggcaatgccaccgccatcttcttcctgcctgatgaggggaaactacagcacctggaaaatgaactcacccacgatatcatcaccaagttcctggaaaatgaagacagaaggtctgccagcttacatttacccaaactgtccattactggaacctatgatctgaagagcgtcctgggtcaactgggcatcactaaggtcttcagcaatggggctgacctctccggggtcacagaggaggcacccctgaagctctccaaggccgtgcataaggctgtgctgaccatcgacgagaaagggactgaagctgctggggccatgtttttagaggccatacccatgtctatcccccccgaggtcaagttcaacaaaccctttgtcttcttaatgattgaacaaaataccaagtctcccctcttcatgggaaaagtggtgaatcccacccaaaaataactgcctctcgctcctcaacccctcccctccatccctggccccctccctggatgacattaaagaagggttgagctggtccctgcctgcatgtgactgtaaatccctcccatgttttctctgagtctccctttgcctgctgaggctgtatgtgggctccaggtaacagtgctgtcttcgggccccctgaactgtgttcatggagcatctggctgggtaggcacatgctgggcttgaatccaggggggactgaatcctcagcttacggacctgggcccatctgtttctggagggctccagtcttccttgtcctgtcttggagtccccaagaaggaatcacaggggaggaaccagataccagccatgaccccaggctccaccaagcatcttcatgtccccctgctcatcccccactcccccccacccagagttgctcatcctgccagggctggctgtgcccaccccaaggctgccctcctgggggccccagaactgcctgatcgtgccgtggcccagttttgtggcatctgcagcaacacaagagagaggacaatgtcctcctcttgacccgctgtcacctaaccagactcgggccctgcacctctcaggcacttctggaaaatgactgaggcagattcttcctgaagcccattctccatggggcaacaaggacacctattctgtccttgtccttccatcgctgccccagaaagcctcacatatctccgtttagaatcaggtcccttctccccagatgaagaggagggtctctgctttgttttctctatctcctcctcagacttgaccaggcccagcaggccccagaagaccattaccctatatcccttctcctccctagtcacatggccataggcctgctgatggctcaggaaggccattgcaaggactcctcagctatgggagaggaagcacatcacccattgacccccgcaacccctccctttcctcctctgagtcccgactggggccacatgcagcctgacttctttgtgcctgttgctgtccctgcagtcttcagagggccaccgcagctccagtgccacggcaggaggctgttcctgaatagcccctgtggtaagggccaggagagtccttccatcctccaaggccctgctaaaggacacagcagccaggaagtcccctgggcccctagctgaaggacagcctgctccctccgtctctaccaggaatggccttgtcctatggaaggcactgccccatcccaaactaatctaggaatcactgtctaaccactcactgtcatgaatgtgtacttaaaggatgaggttgagtcataccaaatagtgatttcgatagttcaaaatggtgaaattagcaattctacatgattcagtctaatcaatggataccgactgtttcccacacaagtctcctgttctcttaagcttactcactgacagcctttcactctccacaaatacattaaagatatggccatcaccaagccccctaggatgacaccagacctgagagtctgaagacctggatccaagttctgacttttccccctgacagctgtgtgaccttcgtgaagtcgccaaacctctctgagccccagtcattgctagtaagacctgcctttgagttggtatgatgttcaagttagataacaaaatgtttatacccattagaacagagaataaatagaactacatttcttgca

SEQ ID NO: 9934 - protein, 418 aa, Homo sapiens; identical to SEQ ID NO: 1466

SEQ ID NO: 9935 - DNA, 3577 bp, Homo sapiens
gccgggcaatgagcaaggctccttcctgtccaagctccccgcccctccccagcctactgcctccacccgaagtctacttcctgggtgggcaggaactgggcactgtgcccagggcatgcactgcctccacgcagcaaccctcagagtcctgagctgaaccaagaaggaggagggggtcgggcctccgaggaaggcctagccgctgctgctgccaggaattccaggttggaggggcggcaacctcctgccagccttcaggccactctcctgtgcctgccagaagagacagagcttgaggagagcttgaggagagcaggaaagggcggcagtaagtcttcagcatcaggcattttggggtgactcagtaaatggtagatcttgctaccagtggaacagccactaaggattctgcagtgagagcagagggccagctaagtggtactctcccagagactgtctgactcacgccaccccctccaccttggacacaggacgctgtggtttctgagccagcctcccccgttgcccctctggatccactgcttaaatacggacgaggacagggccctgtctcctcagcttcaggcaccaccactgacctgggacagtgaatcgacaatgccgtcttctgtctcgtggggcatcctcctgctggcaggcctgtgctgcctggtccctgtctccctggctgaggatccccagggagatgctgcccagaagacagatacatcccaccatgatcaggatcacccaaccttcaacaagatcacccccaacctggctgagttcgccttcagcctataccgccagctggcacaccagtccaacagcaccaatatcttcttctccccagtgagcatcgctacagcctttgcaatgctctccctggggaccaaggctgacactcacgatgaaatcctggagggcctgaatttcaacctcacggagattccggaggctcagatccatgaaggcttccaggaactcctccgtaccctcaaccagccagacagccagctccagctgaccaccggcaatggcctgttcctcagcgagggcctgaagctagtggataagtttttggaggatgttaaaaagttgtaccactcagaagccttcactgtcaacttcggggacaccgaagaggccaagaaacagatcaacgattacgtggagaagggtactcaagggaaaattgtggatttggtcaaggagcttgacagagacacagtttttgctctggtgaattacatcttctttaaaggcaaatgggagagaccctttgaagtcaaggacaccgaggaagaggacttccacgtggaccaggtgaccaccgtgaaggtgcctatgatgaagcgtttaggcatgtttaacatccagcactgtaagaagctgtccagctgggtgctgctgatgaaatacctgggcaatgccaccgccatcttcttcctgcctgatgaggggaaactacagcacctggaaaatgaactcacccacgatatcatcaccaagttcctggaaaatgaagacagaaggtctgccagcttacatttacccaaactgtccattactggaacctatgatctgaagagcgtcctgggtcaactgggcatcactaaggtcttcagcaatggggctgacctctccggggtcacagaggaggcacccctgaagctctccaaggccgtgcataaggctgtgctgaccatcgacgagaaagggactgaagctgctggggccatgtttttagaggccatacccatgtctatcccccccgaggtcaagttcaacaaaccctttgtcttcttaatgattgaacaaaataccaagtctcccctcttcatgggaaaagtggtgaatcccacccaaaaataactgcctctcgctcctcaacccctcccctccatccctggccccctccctggatgacattaaagaagggttgagctggtccctgcctgcatgtgactgtaaatccctcccatgttttctctgagtctccctttgcctgctgaggctgtatgtgggctccaggtaacagtgctgtcttcgggccccctgaactgtgttcatggagcatctggctgggtaggcacatgctgggcttgaatccaggggggactgaatcctcagcttacggacctgggcccatctgtttctggagggctccagtcttccttgtcctgtcttggagtccccaagaaggaatcacaggggaggaaccagataccagccatgaccccaggctccaccaagcatcttcatgtccccctgctcatcccccactcccccccacccagagttgctcatcctgccagggctggctgtgcccaccccaaggctgccctcctgggggccccagaactgcctgatcgtgccgtggcccagttttgtggcatctgcagcaacacaagagagaggacaatgtcctcctcttgacccgctgtcacctaaccagactcgggccctgcacctctcaggcacttctggaaaatgactgaggcagattcttcctgaagcccattctccatggggcaacaaggacacctattctgtccttgtccttccatcgctgccccagaaagcctcacatatctccgtttagaatcaggtcccttctccccagatgaagaggagggtctctgctttgttttctctatctcctcctcagacttgaccaggcccagcaggccccagaagaccattaccctatatcccttctcctccctagtcacatggccataggcctgctgatggctcaggaaggccattgcaaggactcctcagctatgggagaggaagcacatcacccattgacccccgcaacccctccctttcctcctctgagtcccgactggggccacatgcagcctgacttctttgtgcctgttgctgtccctgcagtcttcagagggccaccgcagctccagtgccacggcaggaggctgttcctgaatagcccctgtggtaagggccaggagagtccttccatcctccaaggccctgctaaaggacacagcagccaggaagtcccctgggcccctagctgaaggacagcctgctccctccgtctctaccaggaatggccttgtcctatggaaggcactgccccatcccaaactaatctaggaatcactgtctaaccactcactgtcatgaatgtgtacttaaaggatgaggttgagtcataccaaatagtgatttcgatagttcaaaatggtgaaattagcaattctacatgattcagtctaatcaatggataccgactgtttcccacacaagtctcctgttctcttaagcttactcactgacagcctttcactctccacaaatacattaaagatatggccatcaccaagccccctaggatgacaccagacctgagagtctgaagacctggatccaagttctgacttttccccctgacagctgtgtgaccttcgtgaagtcgccaaacctctctgagccccagtcattgctagtaagacctgcctttgagttggtatgatgttcaagttagataacaaaatgtttatacccattagaacagagaataaatagaactacatttcttgca

SEQ ID NO: 9936 - protein, 418 aa, Homo sapiens; identical to SEQ ID NO: 1466

SEQ ID NO: 9937 - DNA, 1022 bp, Homo sapiens
aggcacttctggaaaatgactgaggcagattcttcctgaagcccattctccatggggcaacaaggacacctattctgtccttgtccttccatcgctgccccagaaagcctcacatatctccgtttagaatcaggtcccttctccccagatgaagaggagggtctctgctttgttttctctatctcctcctcagacttgaccaggcccagcaggccccagaagaccattaccctatatcccttctcctccctagtcacatggccataggcctgctgatggctcaggaaggccattgcaaggactcctcagctatgggagaggaagcacatcacccattgacccccgcaacccctccctttcctcctctgagtcccgactggggccacatgcagcctgacttctttgtgcctgttgctgtccctgcagtcttcagagggccaccgcagctccagtgccacggcaggaggctgttcctgaatagcccctgtggtaagggccaggagagtccttccatcctccaaggccctgctaaaggacacagcagccaggaagtcccctgggcccctagctgaaggacagcctgctccctccgtctctaccaggaatggccttgtcctatggaaggcactgccccatcccaaactaatctaggaatcactgtctaaccactcactgtcatgaatgtgtacttaaaggatgtcaatggataccgactgtttcccacacaagtctcctgttctcttaagcttactcactgacagcctttcactctccacaaatacattaaagatatggccatcaccaagccccctaggatgacaccagacctgagagtctgaagacctggatccaagttctgacttttccccctgacagctgtgtgaccttcgtgaagtcgccaaacctctctgagccccagtcattgctagtaagacctgcctttgagttggtatgatgttcaagttagataacaaaatgtttatacccattagaacagagaataaatagaactacatttcttg

SEQ ID NO: 9938 - protein, 40 aa, Homo sapiens [sequence omitted]

SEQ ID NO: 9939 - DNA, 1358 bp, Homo sapiens
gacaatgccgtcttctgtctcgtggggcatcctcctgctggcaggcctgtgctgcctggtccctgtctccctggctgaggatccccagggagatgctgcccagaagacagatacatcccaccatgatcaggatcacccaaccttcaacaagatcacccccaacctggctgagttcgccttcagcctataccgccagctggcacaccagtccaacagcaccaatatcttcttctccccagtgagcatcgctacagcctttgcaatgctctccctggggaccaaggctgacactcacgatgaaatcctggagggcctgaatttcaacctcacggagattccggaggctcagatccatgaaggcttccaggaactcctccgtaccctcaaccagccagacagccagctccagctgaccaccggcaatggcctgttcctcagcgagggcctgaagctagtggataagtttttggaggatgttaaaaagttgtaccactcagaagccttcactgtcaacttcggggacaccgaagaggccaagaaacagatcaacgattacgtggagaagggtactcaagggaaaattgtggatttggtcaaggagcttgacagagacacagtttttgctctggtgaattacatcttctttaaaggcaaatgggagagaccctttgaagtcaaggacaccgaggaagaggacttccacgtggaccaggtgaccaccgtgaaggtgcctatgatgaagcgtttaggcatgtttaacatccagcactgtaagaagctgtccagctgggtgctgctgatgaaatacctgggcaatgccaccgccatcttcttcctgcctgatgaggggaaactacagcacctggaaaatgaactcacccacgatatcatcaccaagttcctggaaaatgaagacagaaggtctgccagcttacatttacccaaactgtccattactggaacctatgatctgaagagcgtcctgggtcaactgggcatcactaaggtcttcagcaatggggctgacctctccggggtcacagaggaggcacccctgaagctctccaaggccgtgcataaggctgtgctgaccatcgacgagaaagggactgaagctgctggggccatgtttttagaggccatacccatgtctatcccccccgaggtcaagttcaacaaaccctttgtcttcttaatgattgaacaaaataccaagtctcccctcttcatgggaaaagtggtgaatcccacccaaaaataactgcctctcgctcctcaacccctcccctccatccctggccccctccctggatgacattaaagaagggttgagctggtccctgcctgcatgtgactgt

SEQ ID NO: 9940 - protein, 418 aa, Homo sapiens; identical to SEQ ID NO: 1466

SEQ ID NO: 9941 - DNA, 2487 bp, Homo sapiens
agctcccaagcaggtttgcgggttgcacagcgggcgatgcaatctgatttaggcttttaaagggattgcaatcaagtggggccccactagcctcaaccctgtacctcccctcccctccacccccagcagtctccaaaggcctccaacaaccccagagtgggggccatgtatccaaagaaactccaagctgtatacggatcacactggttttccaggagcaaaaacagaaacaggcctgaggctggtcaaaattgaacctcctcctgctctgagcagcctggggggcagactaagcagagggctgtgcagacccacataaagagcctactgtgtgccaggcacttcacccgaggcacttcacaagcatgcttgggaatgaaacttccaactctttgggatgcaggtgaaacagttcctggttcagagaggtgaagcggcctgcctgaggcagcacagctcttctttacagatgtgcttccccacctctaccctgtctcacggccccccatgccagcctgacggttgtgtctgcctcagtcatgctccatttttccatcgggaccatcaagagggtgtttgtgtctaaggctgactgggtaactttggatgagcggtctctccgctctgagcctgtttcctcatctgtcaaatgggctctaacccactctgatctcccagggcggcagtaagtcttcagcatcaggcattttggggtgactcagtaaatggtagatcttgctaccagtggaacagccactaaggattctgcagtgagagcagagggccagctaagtggtactctcccagagactgtctgactcacgccaccccctccaccttggacacaggacgctgtggtttctgagccaggtacaatgactcctttcggtaagtgcagtggaagctgtacactgcccaggcaaagcgtccgggcagcgtaggcgggcgactcagatcccagccagtggacttagcccctgtttgctcctccgataactggggtgaccttggttaatattcaccagcagcctcccccgttgcccctctggatccactgcttaaatacggacgaggacagggccctgtctcctcagcttcaggcaccaccactgacctgggacagtgaatcgacaatgccgtcttctgtctcgtggggcatcctcctgctggcaggcctgtgctgcctggtccctgtctccctggctgaggatccccagggagatgctgcccagaagacagatacatcccaccatgatcaggatcacccaaccttcaacaagatcacccccaacctggctgagttcgccttcagcctataccgccagctggcacaccagtccaacagcaccaatatcttcttctccccagtgagcatcgctacagcctttgcaatgctctccctggggaccaaggctgacactcacgatgaaatcctggagggcctgaatttcaacctcacggagattccggaggctcagatccatgaaggcttccaggaactcctccgtaccctcaaccagccagacagccagctccagctgaccaccggcaatggcctgttcctcagcgagggcctgaagctagtggataagtttttggaggatgttaaaaagttgtaccactcagaagccttcactgtcaacttcggggacaccgaagaggccaagaaacagatcaacgattacgtggagaagggtactcaagggaaaattgtggatttggtcaaggagcttgacagagacacagtttttgctctggtgaattacatcttctttaaaggcaaatgggagagaccctttgaagtcaaggacaccgaggaagaggacttccacgtggaccaggtgaccaccgtgaaggtgcctatgatgaagcgtttaggcatgtttaacatccagcactgtaagaagctgtccagctgggtgctgctgatgaaatacctgggcaatgccaccgccatcttcttcctgcctgatgaggggaaactacagcacctggaaaatgaactcacccacgatatcatcaccaagttcctggaaaatgaagacagaaggtctgccagcttacatttacccaaactgtccattactggaacctatgatctgaagagcgtcctgggtcaactgggcatcactaaggtcttcagcaatggggctgacctctccggggtcacagaggaggcacccctgaagctctccaaggccgtgcataaggctgtgctgaccatcgacgagaaagggactgaagctgctggggccatgtttttagaggccatacccatgtctatcccccccgaggtcaagttcaacaaaccctttgtcttcttaatgattgaacaaaataccaagtctcccctcttcatgggaaaagtggtgaatcccacccaaaaataactgcctctcgctcctcaacccctcccctccatccctggccccctccctggatgacattaaagaagggttgagctggtccctgcctgcatgtgactgt

SEQ ID NO: 9942 - protein, 418 aa, Homo sapiens; identical to SEQ ID NO: 1466

SEQ ID NO: 9943 - DNA, 1972 bp, Homo sapiens
gccgggcaatgagcaaggctccttcctgtccaagctccccgcccctccccagcctactgcctccacccgaagtctacttcctgggtgggcaggaactgggcactgtgcccagggcatgcactgcctccacgcagcaaccctcagagtcctgagctgaaccaagaaggaggagggggtcgggcctccgaggaaggcctagccgctgctgctgccaggaattccaggttggaggggcggcaacctcctgccagccttcaggccactctcctgtgcctgccagaagagacagagcttgaggagagcttgaggagagcaggaaagggcggcagtaagtcttcagcatcaggcattttggggtgactcagtaaatggtagatcttgctaccagtggaacagccactaaggattctgcagtgagagcagagggccagctaagtggtactctcccagagactgtctgactcacgccaccccctccaccttggacacaggacgctgtggtttctgagccagcctcccccgttgcccctctggatccactgcttaaatacggacgaggacagggccctgtctcctcagcttcaggcaccaccactgacctgggacagtgaatcgacaatgccgtcttctgtctcgtggggcatcctcctgctggcaggcctgtgctgcctggtccctgtctccctggctgaggatccccagggagatgctgcccagaagacagatacatcccaccatgatcaggatcacccaaccttcaacaagatcacccccaacctggctgagttcgccttcagcctataccgccagctggcacaccagtccaacagcaccaatatcttcttctccccagtgagcatcgctacagcctttgcaatgctctccctggggaccaaggctgacactcacgatgaaatcctggagggcctgaatttcaacctcacggagattccggaggctcagatccatgaaggcttccaggaactcctccgtaccctcaaccagccagacagccagctccagctgaccaccggcaatggcctgttcctcagcgagggcctgaagctagtggataagtttttggaggatgttaaaaagttgtaccactcagaagccttcactgtcaacttcggggacaccgaagaggccaagaaacagatcaacgattacgtggagaagggtactcaagggaaaattgtggatttggtcaaggagcttgacagagacacagtttttgctctggtgaattacatcttctttaaaggcaaatgggagagaccctttgaagtcaaggacaccgaggaagaggacttccacgtggaccaggtgaccaccgtgaaggtgcctatgatgaagcgtttaggcatgtttaacatccagcactgtaagaagctgtccagctgggtgctgctgatgaaatacctgggcaatgccaccgccatcttcttcctgcctgatgaggggaaactacagcacctggaaaatgaactcacccacgatatcatcaccaagttcctggaaaatgaagacagaaggtctgccagcttacatttacccaaactgtccattactggaacctatgatctgaagagcgtcctgggtcaactgggcatcactaaggtcttcagcaatggggctgacctctccggggtcacagaggaggcacccctgaagctctccaaggccgtgcataaggctgtgctgaccatcgacgagaaagggactgaagctgctggggccatgtttttagaggccatacccatgtctatcccccccgaggtcaagttcaacaaaccctttgtcttcttaatgattgaacaaaataccaagtctcccctcttcatgggaaaagtggtgaatcccacccaaaaataactgcctctcgctcctcaacccctcccctccatccctggccccctccctggatgacattaaagaagggttgagctggtccctgcctgcatgtgactgt

SEQ ID NO: 9944 - protein, 418 aa, Homo sapiens; identical to SEQ ID NO: 1466

SEQ ID NO: 9945 - DNA, 1679 bp, Homo sapiens
gccgggcaatgagcaaggctccttcctgtccaagctccccgcccctccccagcctactgcctccacccgaagtctacttcctgggtgggcaggaactgggcactgtgcccagggcatgcactgcctccacgcagcaaccctcagagtcctgagctgaaccaagaaggaggagggggtcgggcctccgaggaaggcctagccgctgctgctgccaggaattccaggttggaggggcggcaacctcctgccagccttcaggccactctcctgtgcctgccagaagagacagagcttgaggagagcttgaggagagcaggaaaggacaatgccgtcttctgtctcgtggggcatcctcctgctggcaggcctgtgctgcctggtccctgtctccctggctgaggatccccagggagatgctgcccagaagacagatacatcccaccatgatcaggatcacccaaccttcaacaagatcacccccaacctggctgagttcgccttcagcctataccgccagctggcacaccagtccaacagcaccaatatcttcttctccccagtgagcatcgctacagcctttgcaatgctctccctggggaccaaggctgacactcacgatgaaatcctggagggcctgaatttcaacctcacggagattccggaggctcagatccatgaaggcttccaggaactcctccgtaccctcaaccagccagacagccagctccagctgaccaccggcaatggcctgttcctcagcgagggcctgaagctagtggataagtttttggaggatgttaaaaagttgtaccactcagaagccttcactgtcaacttcggggacaccgaagaggccaagaaacagatcaacgattacgtggagaagggtactcaagggaaaattgtggatttggtcaaggagcttgacagagacacagtttttgctctggtgaattacatcttctttaaaggcaaatgggagagaccctttgaagtcaaggacaccgaggaagaggacttccacgtggaccaggtgaccaccgtgaaggtgcctatgatgaagcgtttaggcatgtttaacatccagcactgtaagaagctgtccagctgggtgctgctgatgaaatacctgggcaatgccaccgccatcttcttcctgcctgatgaggggaaactacagcacctggaaaatgaactcacccacgatatcatcaccaagttcctggaaaatgaagacagaaggtctgccagcttacatttacccaaactgtccattactggaacctatgatctgaagagcgtcctgggtcaactgggcatcactaaggtcttcagcaatggggctgacctctccggggtcacagaggaggcacccctgaagctctccaaggccgtgcataaggctgtgctgaccatcgacgagaaagggactgaagctgctggggccatgtttttagaggccatacccatgtctatcccccccgaggtcaagttcaacaaaccctttgtcttcttaatgattgaacaaaataccaagtctcccctcttcatgggaaaagtggtgaatcccacccaaaaataactgcctctcgctcctcaacccctcccctccatccctggccccctccctggatgacattaaagaagggttgagctggtccctgcctgcatgtgactgt

SEQ ID NO: 9946 - protein, 418 aa, Homo sapiens; identical to SEQ ID NO: 1466

SEQ ID NO: 9947 - DNA, 790 bp, Homo sapiens
gacaatgccgtcttctgtctcgtggggcatcctcctgctggcaggcctgtgctgcctggtccctgtctccctggctgaggatccccagggagatgctgcccagaagacagatacatcccaccatgatcaggatcacccaaccttcaacaagatcacccccaacctggctgagttcgccttcagcctataccgccagctggcacaccagtccaacagcaccaatatcttcttctccccagtgagcatcgctacagcctttgcaatgctctccctggggaccaaggctgacactcacgatgaaatcctggagggcctgaatttcaacctcacggagattccggaggctcagatccatgaaggcttccaggaactcctccgtaccctcaaccagccagacagccagctccagctgaccaccggcaatggcctgttcctcagcgagggcctgaagctagtggataagtttttggaggatgttaaaaagttgtaccactcagaagccttcactgtcaacttcggggacaccgaagaggccaagaaacagatcaacgattacgtggagaagggtactcaagggaaaattgtggatttggtcaaggagcttgacagagacacagtttttgctctggtgaattacatcttttcttaatgattgaacaaaataccaagtctcccctcttcatgggaaaagtggtgaatcccacccaaaaataactgcctctcgctcctcaacccctcccctccatccctggccccctccctggatgacattaaagaagggttgagctgg

SEQ ID NO: 9948 - protein, 214 aa, Homo sapiens
MPSSVSWGILLLAGLCCLVPVSLAEDPQGDAAQKTDTSHHDQDHPTFNKITPNLAEFAFSLYRQLAHQSNSTNIFFSPVSIATAFAMLSLGTKADTHDEILEGLNFNLTEIPEAQIHEGFQELLRTLNQPDSQLQLTTGNGLFLSEGLKLVDKFLEDVKKLYHSEAFTVNFGDTEEAKKQINDYVEKGTQGKIVDLVKELDRDTVFALVNYIFS

SEQ ID NO: 9949 - DNA, 2203 bp, Homo sapiens
cactgtggaagctttgttcttttgctctttgcaataaatcttgctactgctcactctttgggtccacgctgcttttatgagctgtaacactcaccgcgaagatctgcagcttcactcctgagcccagcaagaccacgagcccaccgggaggaatgaacaactccagacacgctaccttaagagctgtaccactcaccgcgaaggtctgcagcttcactcctgagccagcgagaccacgaacccaccagaaggaagaaactccgaacacatctgaacatcagaagggacagactccagacacgccaccttaagagctgtaacactcaccgcgagggtccacggcttcattcttgaagtcagtgagaccaagaacccaccaattccggacacagtgctgagaatcatgccttgaaatctagcagctctgttaaaaactgagcaaggtgtacttcggggttgtgttgagaaggttggtgttcagctaaatcaggagggaaggccaaggaaaatcaggcttggcacctgtcaacagcttgttttcatttcctttccaatttaagaatgtgtttaacattctatcccagacaatgtgatggtcatgaagtctctgtcagagaggaaagagggagttaatctataatgaagatcaacagtgaagaggaaaggggtcttccctggaacgcttcagtcatatacgacattttacacaacaataatggacctgtgtaaggaggtatgtgtgggagaagattccagaaggtcttgagacactccagatgaaggttggtgtggggctgtgctgctggagcaccagagagtgaaaagaggttatctccctctgtgccaggccagagtgcagtggtgcaatcacggctcactgtagtctcaacctcctgggctcaagagatcctcccacttcagcctcccaagcagctaagactacagttattttattcttatgagcttgtgggctccatctaccaacctctgggcaaatgctcatctgacttccatagacacacagcaagcagacaaccacacaaagaggaagagggagaatatttaccagccatggaacatctgctctgtgcttatatctcatatgcattatctctaattatcaaaagaagacatgtccttaaccttggcacaacaaatctctaaatcgattgagacctgtctcagatacttcttggtttacaagatggaggctgaaattaaagagaaagatcctcactcaactcacagaggagcagaatgggaagaggacttagtgagaattccctgaacacaggagaaaaccgaagcccagagagtggatggccaagtccaaggtcacacagccaagtgcatccgagcagcgcaggatccaggtttcctgccccagtgctctttctgcagcccatgccacctgttttcatgctatctcagttcaccttccagctacacacctgcaatcagaaacagaaagtctgagagtgtgtgtggagccaaagaggggacagcagtggttagaagcaaggcacaagtcatacctacattcaaggagaggggaccatgcaaaggataaactgcagagagacaacagatttacatcccagacacattcacactgggccaagagcagctgccattgcagattcgagtcacgtccttttttccttccttctccttcttggagttacaacagaagctggggaggtgagagtgcagaaaggacgtggatgaagcagagaggcacgtgcctgtctcattcgcctctggatctgctgcatccaggactgtgccagcacaaagtgggagcccgataaatatttattgaagaaatgaaaggtgacaaaaggcagaaggagggagaccccaaaaagaggtaaatttggtatcttagcaagtgggtgactaccactgtctgggggaaagctgatacacgaggacttgacaataattacagcagtaacaatcgctactattttgttttgagatgaattttagtttctgaaattgtccaaagcacttttatcaatagaaacttgttacacatccctccaacagggagaagcagcacaggaagctgccccctcaaacactaaaggctcctggagctattcacagtgctggggaacaaccagaggaggaggaggacagagggagagaatactttttttaaaaatcccaaacaaaaccaaattctatacatgtatat

SEQ ID NO: 9950 - protein, 163 aa, Homo sapiens; identical to SEQ ID NO: 1482

SEQ ID NO: 9951 - DNA, 2810 bp, Homo sapiens
cacgctgcttttatgagctgtaacactcaccgcgaagatctgcagcttcactcctgagcccagcaagaccacgagcccaccgggaggaatgaacaactccagacacgctaccttaagagctgtaccactcaccgcgaaggtctgcagcttcactcctgagccagcgagaccacgaacccaccagaaggaagaaactccgaacacatctgaacatcagaagggacagactccagacacgccaccttaagagctgtaacactcaccgcgagggtccacggcttcattcttgaagtcagtgagaccaagaacccaccaattccggacacagtgctgagaatcatgccttgaaatctagcagctctgttaaaaactgagcaaggtgtacttcggggttgtgttgagaaggttggtgttcagctaaatcaggagggaaggccaaggaaaatcaggcttggcacctgtcaacaggtgggacccaatagccaagcaaatggtcctgcaaactgtactacccaacgttcacagcaaggattccaacttctcaccagggcatggaaaatttgccttcatgtcaaccaccaccttagcccttgactacccaacggactcttcccaagtcaacagccacttcctccctggggcttaacaggcattccttgaagcctgccccgggcagttagtccttcccttttgtgtgaactctcggctgttttcgttgtctgcacacagagcagtggtctagggagcgaagggttttggaatggaccttttcctttcttagcttgctgtagggattgtgcttcagctaagtaaagtggaaaaacagaagtacaaaagcaacagccccagatctaagggcaccgtagctctggaatctggattttattccagattcaaccctcagcagggagttgaagtggtcagccctgtgctttacaaggctgattgggcagcacccatagtagaattgtcaatataaagtaattgaaaggatcagaatccagggttttcgttgtttttaagtttttaagttttaaaaacaaagttgtttttgttcgtttttaagtttacttctctttaatcggtctcactttattgaccaggctggtttcgaactcctgggcttaagtgatttctcctgtctcagcttctcaaagtgctgggattacaggcgtgagccgctgcacccagcccagaatccagttttaaagagtttattcaagccaaaagctgggaatggccatctgagaaacacagactctaggaaaatggggccagggccctgaagttaaaagttaaagtcttgcttacataggcagaaagcaaagacatttagtaaccttgtagaacattttcttgtataacttttcttgttttaactttcttgtttaacattttctatgcaaggctggtttatgagttacaacctataattaattataggttgttcccctgcctccaccttgttttcttttctctacagcttgttttcatttcctttccaatttaagaatgtgtttaacattctatcccagacaatgtgatggtcatgaagtctctgtcagagaggaaagagggagttaatctataatgaagatcaacagtgaagaggaaaggggtcttccctggaacgcttcagtcatatacgacattttacacaacaataatggacctgtgtaaggaggtatgtgtgggagaagattccagaaggtcttgagacactccagatgaaggttggtgtggggctgtgctgctggagcaccagagagtgaaaagaggttatctccctctgtgccaggccagagtgcagtggtgcaatcacggctcactgtagtctcaacctcctgggctcaagagatcctcccacttcagcctcccaagcagctaagactacagacatgtccttaaccttggcacaacaaatctctaaatcgattgagacctgtctcagatacttcttggtttacaagatggaggctgaaattaaagagaaagatcctcactcaactcacagaggagcagaatgggaagaggacttagtgagaattccctgaacacaggagaaaaccgaagcccagagagtggatggccaagtccaaggtcacacagccaagtgcatccgagcagcgcaggatccaggtttcctgccccagtgctctttctgcagcccatgccacctgttttcatgctatctcagttcaccttccagctacacacctgcaatcagaaacagaaagtctgagagtgtgtgtggagccaaagaggggacagcagtggttagaagcaaggcacaagtcatacctacattcaaggagaggggaccatgcaaaggataaactgcagagagacaacagatttacatcccagacacattcacactgggccaagagcagctgccattgcagattcgagtcacgtccttttttccttccttctccttcttggagttacaacagaagctggggaggtgagagtgcagaaaggacgtggatgaagcagagaggcacgtgcctgtctcattcgcctctggatctgctgcatccaggactgtgccagcacaaagtgggagcccgataaatatttattgaagaaatgaaaggtgacaaaaggcagaaggagggagaccccaaaaagagcagcacaggaagctgccccctcaaacactaaaggctcctggagctattcacagtgctggggaacaaccagaggaggaggaggacagagggagagaatactttttttaaaaatcccaaacaaaaccaaattctatacatgtatatctcgagtgagtaaatgtgtaacactcagca

SEQ ID NO: 9952 - protein, 163 aa, Homo sapiens; identical to SEQ ID NO: 1482

SEQ ID NO: 9953 - DNA, 3923 bp, Homo sapiens
cacgctgcttttatgagctgtaacactcaccgcgaagatctgcagcttcactcctgagcccagcaagaccacgagcccaccgggaggaatgaacaactccagacacgctaccttaagagctgtaccactcaccgcgaaggtctgcagcttcactcctgagccagcgagaccacgaacccaccagaaggaagaaactccgaacacatctgaacatcagaagggacagactccagacacgccaccttaagagctgtaacactcaccgcgagggtccacggcttcattcttgaagtcagtgagaccaagaacccaccaattccggacacagtgctgagaatcatgccttgaaatctagcagctctgttaaaaactgagcaaggtgtacttcggggttgtgttgagaaggttggtgttcagctaaatcaggagggaaggccaaggaaaatcaggcttggcacctgtcaacaggtgggacccaatagccaagcaaatggtcctgcaaactgtactacccaacgttcacagcaaggattccaacttctcaccagggcatggaaaatttgccttcatgtcaaccaccaccttagcccttgactacccaacggactcttcccaagtcaacagccacttcctccctggggcttaacaggcattccttgaagcctgccccgggcagttagtccttcccttttgtgtgaactctcggctgttttcgttgtctgcacacagagcagtggtctagggagcgaagggttttggaatggaccttttcctttcttagcttgctgtagggattgtgcttcagctaagtaaagtggaaaaacagaagtacaaaagcaacagccccagatctaagggcaccgtagctctggaatctggattttattccagattcaaccctcagcagggagttgaagtggtcagccctgtgctttacaaggctgattgggcagcacccatagtagaattgtcaatataaagtaattgaaaggatcagaatccagggttttcgttgtttttaagtttttaagttttaaaaacaaagttgtttttgttcgtttttaagtttacttctctttaatcggtctcactttattgaccaggctggtttcgaactcctgggcttaagtgatttctcctgtctcagcttctcaaagtgctgggattacaggcgtgagccgctgcacccagcccagaatccagttttaaagagtttattcaagccaaaagctgggaatggccatctgagaaacacagactctaggaaaatggggccagggccctgaagttaaaagttaaagtcttgcttacataggcagaaagcaaagacatttagtaaccttgtagaacattttcttgtataacttttcttgttttaactttcttgtttaacattttctatgcaaggctggtttatgagttacaacctataattaattataggttgttcccctgcctccaccttgttttcttttctctacagcttgttttcatttcctttccaatttaagaatgtgtttaacattctatcccagacaatgtgatggtcatgaagtctctgtcagagaggaaagagggagttaatctataatgaagatcaacagtgaagaggaaaggggtcttccctggaacgcttcagtcatatacgacattttacacaacaataatggacctgtgtaaggaggtatgtgtgggagaagattccagaaggtcttgagacactccagatgaaggttggtgtggggctgtgctgctggagcaccagagagtgaaaagaggttatctccctctgtgccaggccagagtgcagtggtgcaatcacggctcactgtagtctcaacctcctgggctcaagagatcctcccacttcagcctcccaagcagctaagactacagttattttattcttatgagcttgtgggctccatctaccaacctctgggcaaatgctcatctgacttccatagacacacagcaagcagacaaccacacaaagaggaagagggagaatatttaccagccatggaacatctgctctgtgcttatatctcatatgcattatctctaattatcaaaagaaggttagaagcaaggcacaagtcatacctacattcaaggagaggggaccatgcaaaggataaactgcagagagacaacagatttacatcccagacacattcacactgggccaagagcagctgccattgcagattcgagtcacgtccttttttccttccttctccttcttggagttacaacagaagctggggaggtgagagtgcagaaaggacgtggatgaagcagagaggcacgtgcctgtctcattcgcctctggatctgctgcatccaggactgtgccagcacaaagtgggagcccgataaatatttattgaagaaatgaaaggtgacaaaaggcagaaggagggagaccccaaaaagagagatgggatcccactatattgcacaggctggtctcaaactcctgagctcaagcgatcctcctgccttggcctcccacggtgctgagactacaggtgtgagccaccactcccagcctgatttatattttataaagaggcaacgatggagtacacagctgagcaatctcttgcatttctggaccttgagcatcaggaagcttagggagggtgaaaactcagaagaaagctcagagttgagacctttgattttttgcccagagagtccagctaacacactttataacccaaaaggccttacaaatatttcagagcagaggcagcatttttgcactggataaacaaaggtacggtaatttcttcatagtttattttcattacaagtaattcttttcctgaagaaaaatttatatttcagatttatttcccctctcaaaggggaggggagttataatattctgtttccatagcaccattcctcaagatcaaacccaggcaggcatttttacagcacacacttccatatgtcattgctaatcctcgcaaccttgaggaaactgaggtgcaaaggggttgaggaatgtgttcaccatcccaaagccaacgaagtgccagaacccaaatccaagcttggctgtctcatccccaaggacgtactctttatgccgttccttatgacttttcatgcagcaggtgcaaggcagcaagaatttggctcttctgacatttatcaggcacctggtatgtgccaggcctactgtaaaccccaagatgacatggtccatgtctatccattcagcatcagagagactgttatcaggacttgaggcctgagacacagccctgaatcagatgcaggcctctggtgtttgcaaaggatgcgtgagtatgtgtatgtgtatgcgtgcattgtgtgtaggggtgtgtgtatgttgggggttgggggcagaaaatgctccctgaactgttggtattaaggcagatctttgatggagggactggggtgtggagacttgaaccctagtttcaaagtggggacctcgaacactagtatggccagcagacaggctggagttgctgaattgtcagctaggtctttaatccactccccttctctaaatcagggtggaattggactcagggctggttcagggctgaggtttccgggggatgaatgattccagacagtgggaaggggtgatggatgatgaacctggcaagtcacaggactatggacttggctgtatgttgcatgtatgtgtaagatctgagttgagacctttgatttttgcccagaaagtccagctaacatactatataagccagtgagaccagccagtgtctgttcattgcctctgccttgcccctatgcctgcccgcctcctatagcaggtccctatagcataatgaaaatgcgaacaaccttttctctggacactggggaatctagtctggtggataaagatggatggctgttaaacgatc

SEQ ID NO: 9954 - protein, 119 aa, Homo sapiens; identical to SEQ ID NO: 1480

SEQ ID NO: 9955 - DNA, 3780 bp, Homo sapiens; identical to SEQ ID NO: 1471

SEQ ID NO: 9956 - protein, 141 aa, Homo sapiens; identical to SEQ ID NO: 1472

SEQ ID NO: 9957 - DNA, 3663 bp, Homo sapiens; identical to SEQ ID NO: 1477

SEQ ID NO: 9958 - protein, 105 aa, Homo sapiens; identical to SEQ ID NO: 1478

SEQ ID NO: 9959 - DNA, 3398 bp, Homo sapiens; identical to SEQ ID NO: 1475

SEQ ID NO: 9960 - protein, 141 aa, Homo sapiens; identical to SEQ ID NO: 1472

SEQ ID NO: 9961 - DNA, 4232 bp, Homo sapiens; identical to SEQ ID NO: 1473

SEQ ID NO: 9962 - protein, 141 aa, Homo sapiens; identical to SEQ ID NO: 1472

SEQ ID NO: 9963 - DNA, 3132 bp, Homo sapiens
acatgtccttaaccttggcacaacaaatctctaaatcgattgagacctgtctcagatacttcttggtttacaagatggaggctgaaattaaagagaaagatcctcactcaactcacagaggagcagaatgggaagaggacttagtgagaattccctgaacacaggagaaaaccgaagcccagagagtggatggccaagtccaaggtcacacagccaagtgcatccgagcagcgcaggatccaggtttcctgccccagtgctctttctgcagcccatgccacctgttttcatgctatctcagttcaccttccagctacacacctgcaatcagaaacagaaagtctgagagtgtgtgtggagccaaagaggggacagcagtggtgaggccagtttcatgtcttgtgatttattttctccctttctttttggactttaatcttaagtggacagcaatttggaacagtgtcagcaccttgttggattgtgctgtttgggagaggtgacacagagtattttaaaagagcaggttaagaacttttcacaaggaatcaattgagagaaaataaaatagaaacagactgtcccacatttgggctgagcaccaaacacatttttttttttttttttgagactgagtcttgctctgtcactcaggctggaatgcagtggcgcgatctcggctcactgcagccttcacctcccgggttcaagtgattcttctgcctcagcctcccaagtagctgggattacaggtgcccaccaccatgccaggctaatttttgtatttttagtagagacgaggtttcaccatgttggccaggctggtcttgaactcctgaccaagtgatccacctgcttcggcctcccaaagtgctgggattacaggcacgagccaccgcacctggcctcaaacaagctttttaattgcattcagaagtgcaccaactaggcacagacctctggcatggagacagaatgggaggttcttggtgtctggcctggtcttgcagaaatcagggagttgtggggaccaggcagccactgtgcatcagataggagtttcagcagcaggcaacagaaagcctgccaatgtagctgaaataagaagggcttatttttatccctgaacagaagcttccagcactggttcatcagatcagggcactgagctggcatccccatttatacagttttcctttccttcacctttgtaagatgcctggcacagctctgagcatcaaatatctgtgccatgtgggagcacacgaggggacaagtggggaatagggtctcctctgtcctctgtccccaggctggcttctctcgtggtagaaggacccccacagcaccaggcctcataactaccctgctggtaaactgcaggtgctgtcacggcttcctgccttcgtatatgaaatgttccttggcagctggactgctgtttgtttaccgcacgcacagctctgctgcctcttggttacaccagtgagctattgctccatgacaagccacaccgaaatgtagcaagcacttattgttgcccacatgtgtcaagtcagttgagtgtttctgccaaccggggcctggcttggcccaccttggctgagcttgctctggtgctagggtcagctagacaggtcggcaggagaccagctgctctagaagagcctggacaggatgaattggttctccttccacgtgcatcttgcatccctccagccaaggatttgaacccaggtctcgtctgactccaaatgcaccaagaggatggagcccagagtgacacagaggaagaggcccctggatggatgcatggggaaggttagaagcaaggcacaagtcatacctacattcaaggagaggggaccatgcaaaggataaactgcagagagacaacagatttacatcccagacacattcacactgggccaagagcagctgccattgcagattcgagtcacgtccttttttccttccttctccttcttggagttacaacagaagctggggaggtgagagtgcagaaaggacgtggatgaagcagagaggcacgtgcctgtctcattcgcctctggatctgctgcatccaggactgtgccagcacaaagtgggagcccgataaatatttattgaagaaatgaaaggtgacaaaaggcagaaggagggagaccccaaaaagagtatgaacccagcatcacagtgcacttgtggcagatggcagtgcatacccgggagctactctcctccggccagatgcccttctcccagctgcccgccgtgtggcagctctaccccgggaggaagtaccgagcagcggattccagtttctgggaaatagcagaccatggccagattgactctatggagcagctggtcctaacatatcagccggagaggaaagactgacactgggagtggctggccctgctggccctgcctcttctggcctggtgtctcctcatgccccctcagtgaggatcttcatgtacctgctcttctgtttgcacacccagcatagcctccttgcaggcagaaggcagtagggcccctgcacactcagtttctctcgttttccttagttatcagtcctgtcctgtcccactcaggtctgtacttagggcagctggcctggatgggcttcactggggccctgtctgtgtgctgagccagtttcccctgctggctgcaagctgtgggttctttctcctctgtgcccctcatgctgatcttctagatgccactcccaaatccccttcatacccaccaggatgtgtgcccagccaggcctccagcacccccagtgcagctcgtgattggaaactcaccatcggcaggcagtggttcggtttaagagatggcattagagggagcccagtctggatgtggacttggatgccctgtgggtatcagttctgctgacactttggcccgaaatagatccagtgctgagcaagcaatgtacaccagagcctcagtgagcccatctgcacagtggggagcatggagggatgggtttggcctgtgcttctgcttattcagtccttcagctcacggaagggatgctagtccgtgaaggtgacctcacagtactggttaattaaactttattgctcactgtccacttttgtgctg

SEQ ID NO: 9964 - protein, 105 aa, Homo sapiens; identical to SEQ ID NO: 1478

SEQ ID NO: 9965 - DNA, 3587 bp, Homo sapiens
acatgtccttaaccttggcacaacaaatctctaaatcgattgagacctgtctcagatacttcttggtttacaagatggaggctgaaattaaagagaaagatcctcactcaactcacagaggagcagaatgggaagaggacttagtgagaattccctgaacacaggagaaaaccgaagcccagagagtggatggccaagtccaaggtcacacagccaagtgcatccgagcagcgcaggatccaggtttcctgccccagtgctctttctgcagcccatgccacctgttttcatgctatctcagttcaccttccagctacacacctgcaatcagaaacagaaagtctgagagtgtgtgtggagccaaagaggggacagcagtggtgaggccagtttcatgtcttgtgatttattttctccctttctttttggactttaatcttaagtggacagcaatttggaacagtgtcagcaccttgttggattgtgctgtttgggagaggtgacacagagtattttaaaagagcaggttaagaacttttcacaaggaatcaattgagagaaaataaaatagaaacagactgtcccacatttgggctgagcaccaaacacatttttttttttttttttgagactgagtcttgctctgtcactcaggctggaatgcagtggcgcgatctcggctcactgcagccttcacctcccgggttcaagtgattcttctgcctcagcctcccaagtagctgggattacaggtgcccaccaccatgccaggctaatttttgtatttttagtagagacgaggtttcaccatgttggccaggctggtcttgaactcctgaccaagtgatccacctgcttcggcctcccaaagtgctgggattacaggcacgagccaccgcacctggcctcaaacaagctttttaattgcattcagaagtgcaccaactaggcacagacctctggcatggagacagaatgggaggttcttggtgtctggcctggtcttgcagaaatcagggagttgtggggaccaggcagccactgtgcatcagataggagtttcagcagcaggcaacagaaagcctgccaatgtagctgaaataagaagggcttatttttatccctgaacagaagcttccagcactggttcatcagatcagggcactgagctggcatccccatttatacagttttcctttccttcacctttgtaagatgcctggcacagctctgagcatcaaatatctgtgccatgtgggagcacacgaggggacaagtggggaatagggtctcctctgtcctctgtccccaggctggcttctctcgtggtagaaggacccccacagcaccaggcctcataactaccctgctggtaaactgcaggtgctgtcacggcttcctgccttcgtatatgaaatgttccttggcagctggactgctgtttgtttaccgcacgcacagctctgctgcctcttggttacaccagtgagctattgctccatgacaagccacaccgaaatgtagcaagcacttattgttgcccacatgtgtcaagtcagttgagtgtttctgccaaccggggcctggcttggcccaccttggctgagcttgctctggtgctagggtcagctagacaggtcggcaggagaccagctgctctagaagagcctggacaggatgaattggttctccttccacgtgcatcttgcatccctccagccaaggatttgaacccaggtctcgtctgactccaaatgcaccaagaggatggagcccagagtgacacagaggaagaggcccctggatggatgcatggggaagatcacgggaattacaagtgacatcctgaagtatgatcacaaatgtttcaaattaagccttcctgctaagtttccagaggtgtgtggctcggacgaagtgtttccagaccctgatctactgcatgtcctgcctgttgctggttctttgcagcagtccattgaccaatgctgtctacagcttgagagcctctgcaggccagggctgctctgtgcacatcctacgttactattcaaactgcacagcagcatgaaaaacaggcccttcttttctctcatttacacatatgtgaagaagacacagcaagtgagaaaacgtgaccgaaagccacgcggacaggtggccgcagggccaaacccaacttccgtgatgtgatctggctacagtttggagcccacatatttcaatagttatccccaggcctggcacgtcaaagaggctccagaaatgtttgctgagttagaagcaaggcacaagtcatacctacattcaaggagaggggaccatgcaaaggataaactgcagagagacaacagatttacatcccagacacattcacactgggccaagagcagctgccattgcagattcgagtcacgtccttttttccttccttctccttcttggagttacaacagaagctggggaggtgagagtgcagaaaggacgtggatgaagcagagaggcacgtgcctgtctcattcgcctctggatctgctgcatccaggactgtgccagcacaaagtgggagcccgataaatatttattgaagaaatgaaaggtgacaaaaggcagaaggagggagaccccaaaaagagtatgaacccagcatcacagtgcacttgtggcagatggcagtgcatacccgggagctactctcctccggccagatgcccttctcccagctgcccgccgtgtggcagctctaccccgggaggaagtaccgagcagcggattccagtttctgggaaatagcagaccatggccagattgactctatggagcagctggtcctaacatatcagccggagaggaaagactgacactgggagtggctggccctgctggccctgcctcttctggcctggtgtctcctcatgccccctcagtgaggatcttcatgtacctgctcttctgtttgcacacccagcatagcctccttgcaggcagaaggcagtagggcccctgcacactcagtttctctcgttttccttagttatcagtcctgtcctgtcccactcaggtctgtacttagggcagctggcctggatgggcttcactggggccctgtctgtgtgctgagccagtttcccctgctggctgcaagctgtgggttctttctcctctgtgcccctcatgctgatcttctagatgccactcccaaatccccttcatacccaccaggatgtgtgcccagccaggcctccagcacccccagtgcagctcgtgattggaaactcaccatcggcaggcagtggttcggtttaagagatggcattagagggagcccagtctggatgtggacttggatgccctgtgggtatcagttctgctgacactttggcccgaaatagatccagtgctgagcaagcaatgtacaccagagcctcagtgagcccatctgcacagtggggagcatggagggatgggtttggcctgtgcttctgcttattcagtccttcagctcacggaagggatgctagtccgtgaaggtgacctcacagtactggttaattaaactttattgctcactgtccacttttgtgctg

SEQ ID NO: 9966 - protein, 141 aa, Homo sapiens; identical to SEQ ID NO: 1472

SEQ ID NO: 9967 - DNA, 3520 bp, Homo sapiens
acatgtccttaaccttggcacaacaaatctctaaatcgattgagacctgtctcagatacttcttggtttacaagatggaggctgaaattaaagagaaagatcctcactcaactcacagaggagcagaatgggaagaggacttagtgagaattccctgaacacaggagaaaaccgaagcccagagagtggatggccaagtccaaggtcacacagccaagtgcatccgagcagcgcaggatccaggtttcctgccccagtgctctttctgcagcccatgccacctgttttcatgctatctcagttcaccttccagctacacacctgcaatcagaaacagaaagtctgagagtgtgtgtggagccaaagaggggacagcagtggtgaggccagtttcatgtcttgtgatttattttctccctttctttttggactttaatcttaagtggacagcaatttggaacagtgtcagcaccttgttggattgtgctgtttgggagaggtgacacagagtattttaaaagagcaggttaagaacttttcacaaggaatcaattgagagaaaataaaatagaaacagactgtcccacatttgggctgagcaccaaacacatttttttttttttttttgagactgagtcttgctctgtcactcaggctggaatgcagtggcgcgatctcggctcactgcagccttcacctcccgggttcaagtgattcttctgcctcagcctcccaagtagctgggattacaggtgcccaccaccatgccaggctaatttttgtatttttagtagagacgaggtttcaccatgttggccaggctggtcttgaactcctgaccaagtgatccacctgcttcggcctcccaaagtgctgggattacaggcacgagccaccgcacctggcctcaaacaagctttttaattgcattcagaagtgcaccaactaggcacagacctctggcatggagacagaatgggaggttcttggtgtctggcctggtcttgcagaaatcagggagttgtggggaccaggcagccactgtgcatcagataggagtttcagcagcaggcaacagaaagcctgccaatgtagctgaaataagaagggcttatttttatccctgaacagaagcttccagcactggttcatcagatcagggcactgagctggcatccccatttatacagttttcctttccttcacctttgtaagatgcctggcacagctctgagcatcaaatatctgtgccatgtgggagcacacgaggggacaagtggggaatagggtctcctctgtcctctgtccccaggctggcttctctcgtggtagaaggacccccacagcaccaggcctcataactaccctgctggtaaactgcaggtgctgtcacggcttcctgccttcgtatatgaaatgttccttggcagctggactgctgtttgtttaccgcacgcacagctctgctgcctcttggttacaccagtgagctattgctccatgacaagccacaccgaaatgtagcaagcacttattgttgcccacatgtgtcaagtcagttgagtgtttctgccaaccggggcctggcttggcccaccttggctgagcttgctctggtgctagggtcagctagacaggtcggcaggagaccagctgctctagaagagcctggacaggatgaattggttctccttccacgtgcatcttgcatccctccagccaaggatttgaacccaggtctcgtctgactccaaatgcaccaagaggatggagcccagagtgacacagaggaagaggcccctggatggatgcatggggaagatcacgggaattacaagtgacatcctgaagtatgatcacaaatgtttcaaattaagccttcctgctaagtttccagaggtgtgtggctcggacgaagtgtttccagaccctgatctactgcatgtcctgcctgttgctggttctttgcagcagtccattgaccaatgctgtctacagcttgagagcctctgcaggccagggctgctctgtgcacatcctacgttactattcaaactgcacagcagcatgaaaaacaggcccttcttttctctcatttacacatatgtgaagaagacacagcaagtgagaaaacgtgaccgaaagccacgcggacaggtggccgcagggccaaacccaacttccgtgatgtgatctggctacagtttggagcccacatatttcaatagttatccccaggcctggcacgtcaaagaggctccagaaatgtttgctgaagagacaacagatttacatcccagacacattcacactgggccaagagcagctgccattgcagattcgagtcacgtccttttttccttccttctccttcttggagttacaacagaagctggggaggtgagagtgcagaaaggacgtggatgaagcagagaggcacgtgcctgtctcattcgcctctggatctgctgcatccaggactgtgccagcacaaagtgggagcccgataaatatttattgaagaaatgaaaggtgacaaaaggcagaaggagggagaccccaaaaagagtatgaacccagcatcacagtgcacttgtggcagatggcagtgcatacccgggagctactctcctccggccagatgcccttctcccagctgcccgccgtgtggcagctctaccccgggaggaagtaccgagcagcggattccagtttctgggaaatagcagaccatggccagattgactctatggagcagctggtcctaacatatcagccggagaggaaagactgacactgggagtggctggccctgctggccctgcctcttctggcctggtgtctcctcatgccccctcagtgaggatcttcatgtacctgctcttctgtttgcacacccagcatagcctccttgcaggcagaaggcagtagggcccctgcacactcagtttctctcgttttccttagttatcagtcctgtcctgtcccactcaggtctgtacttagggcagctggcctggatgggcttcactggggccctgtctgtgtgctgagccagtttcccctgctggctgcaagctgtgggttctttctcctctgtgcccctcatgctgatcttctagatgccactcccaaatccccttcatacccaccaggatgtgtgcccagccaggcctccagcacccccagtgcagctcgtgattggaaactcaccatcggcaggcagtggttcggtttaagagatggcattagagggagcccagtctggatgtggacttggatgccctgtgggtatcagttctgctgacactttggcccgaaatagatccagtgctgagcaagcaatgtacaccagagcctcagtgagcccatctgcacagtggggagcatggagggatgggtttggcctgtgcttctgcttattcagtccttcagctcacggaagggatgctagtccgtgaaggtgacctcacagtactggttaattaaactttattgctcactgtccacttttgtgctg

SEQ ID NO: 9968 - protein, 141 aa, Homo sapiens; identical to SEQ ID NO: 1472

SEQ ID NO: 9969 - DNA, 3228 bp, Homo sapiens
acatgtccttaaccttggcacaacaaatctctaaatcgattgagacctgtctcagatacttcttggtttacaagatggaggctgaaattaaagagaaagatcctcactcaactcacagaggagcagaatgggaagaggacttagtgagaattccctgaacacaggagaaaaccgaagcccagagagtggatggccaagtccaaggtcacacagccaagtgcatccgagcagcgcaggatccaggtttcctgccccagtgctctttctgcagcccatgccacctgttttcatgctatctcagttcaccttccagctacacacctgcaatcagaaacagaaagtctgagagtgtgtgtggagccaaagaggggacagcagtggtgaggccagtttcatgtcttgtgatttattttctccctttctttttggactttaatcttaagtggacagcaatttggaacagtgtcagcaccttgttggattgtgctgtttgggagaggtgacacagagtattttaaaagagcaggttaagaacttttcacaaggaatcaattgagagaaaataaaatagaaacagactgtcccacatttgggctgagcaccaaacacatttttttttttttttttgagactgagtcttgctctgtcactcaggctggaatgcagtggcgcgatctcggctcactgcagccttcacctcccgggttcaagtgattcttctgcctcagcctcccaagtagctgggattacaggtgcccaccaccatgccaggctaatttttgtatttttagtagagacgaggtttcaccatgttggccaggctggtcttgaactcctgaccaagtgatccacctgcttcggcctcccaaagtgctgggattacaggcacgagccaccgcacctggcctcaaacaagctttttaattgcattcagaagtgcaccaactaggcacagacctctggcatggagacagaatgggaggttcttggtgtctggcctggtcttgcagaaatcagggagttgtggggaccaggcagccactgtgcatcagataggagtttcagcagcaggcaacagaaagcctgccaatgtagctgaaataagaagggcttatttttatccctgaacagaagcttccagcactggttcatcagatcagggcactgagctggcatccccatttatacagttttcctttccttcacctttgtaagatgcctggcacagctctgagcatcaaatatctgtgccatgtgggagcacacgaggggacaagtggggaatagggtctcctctgtcctctgtccccaggctggcttctctcgtggtagaaggacccccacagcaccaggcctcataactaccctgctggtaaactgcaggtgctgtcacggcttcctgccttcgtatatgaaatgttccttggcagctggactgctgtttgtttaccgcacgcacagctctgctgcctcttggttacaccagtgagctattgctccatgacaagccacaccgaaatgtagcaagcacttattgttgcccacatgtgtcaagtcagttgagtgtttctgccaaccggggcctggcttggcccaccttggctgagcttgctctggtgctagggtcagctagacaggtcggcaggagaccagctgctctagaagagcctggacaggatgaattggttctccttccacgtgcatcttgcatccctccagccaaggatttgaacccaggtctcgtctgactccaaatgcaccaagaggatggagcccagagtgacacagaggaagaggcccctggatggatgcatggggaaggttagaagcaaggcacaagtcatacctacattcaaggagaggggaccatgcaaaggataaactgcagagagacaacagatttacatcccagacacattcacactgggccaagagcagctgccattgcagattcgagtcacgtccttttttccttccttctccttcttggagttacaacagaagctggggaggtgagagtgcagaaaggacgtggatgaagcagagaggcacgtgcctgtctcattcgcctctggatctgctgcatccaggactgtgccagcacaaagtgggagcccgataaatatttattgaagaaatgaaaggtgacaaaaggcagaaggagggagaccccaaaaagaggagagacaaagtttaatcatgtgggccaggctggttttgaactcctgacctcaagtgatctgcccaccttggcctcccaaagtgctgggattacagtatgaacccagcatcacagtgcacttgtggcagatggcagtgcatacccgggagctactctcctccggccagatgcccttctcccagctgcccgccgtgtggcagctctaccccgggaggaagtaccgagcagcggattccagtttctgggaaatagcagaccatggccagattgactctatggagcagctggtcctaacatatcagccggagaggaaagactgacactgggagtggctggccctgctggccctgcctcttctggcctggtgtctcctcatgccccctcagtgaggatcttcatgtacctgctcttctgtttgcacacccagcatagcctccttgcaggcagaaggcagtagggcccctgcacactcagtttctctcgttttccttagttatcagtcctgtcctgtcccactcaggtctgtacttagggcagctggcctggatgggcttcactggggccctgtctgtgtgctgagccagtttcccctgctggctgcaagctgtgggttctttctcctctgtgcccctcatgctgatcttctagatgccactcccaaatccccttcatacccaccaggatgtgtgcccagccaggcctccagcacccccagtgcagctcgtgattggaaactcaccatcggcaggcagtggttcggtttaagagatggcattagagggagcccagtctggatgtggacttggatgccctgtgggtatcagttctgctgacactttggcccgaaatagatccagtgctgagcaagcaatgtacaccagagcctcagtgagcccatctgcacagtggggagcatggagggatgggtttggcctgtgcttctgcttattcagtccttcagctcacggaagggatgctagtccgtgaaggtgacctcacagtactggttaattaaactttattgctcactgtccacttttgtgctg

SEQ ID NO: 9970 - protein, 105 aa, Homo sapiens; identical to SEQ ID NO: 1478

SEQ ID NO: 9971 - DNA, 605 bp, Homo sapiens
agatggaggctgaaattaaagagaaagatcctcactcaactcatgctatctcagttcaccttccagctacacacctgcaatcagaaacagaaagtctgagagtgtgtgtgcagagagacaacagatttacatcccagacacattcacactgggccaagagcagctgccattgcagattcgagtcacgtccttttttccttccttctccttcttggagttacaacagaagctggggaggtgagagtgcagaaggagggagaccccaaaaagaggtaaatttggtatcttagcaagtgggtgactaccactgtctgggggaaagctgatacacgaggacttgacaataattacagcagtaacaatcgctactattttgttttgagatgaattttagtttctgaaattgtccaaagcacttttatcaatagaaacttgttacacatccctccaacagggagaagcagcacaggaagctgccccctcaaacactaaaggctcctggagctattcacagtgctggggaacaaccagaggaggaggaggacagagggagagaatactttttttaaaaatcccaaacaaaaccaaattctatacatgtatat

SEQ ID NO: 9972 - protein, 95 aa, Homo sapiens
MEAEIKEKDPHSTHAISVHLPATHLQSETESLRVCVQRDNRFTSQTHSHWAKSSCHCRFESRPFFLPSPSWSYNRSWGGESAEGGRPQKEVNLVS

SEQ ID NO: 9973 - DNA, 2078 bp, Homo sapiens
ctcccaaagtgctgggattacaggcgtgagccaccacgcccggtcacctttgtcctgttttctacaggttagaagcaaggcacaagtcatacctacattcaaggagaggggaccatgcaaaggataaactgcagagagacaacagatttacatcccagacacattcacactgggccaagagcagctgccattgcagattcgagtcacgtccttttttccttccttctccttcttggagttacaacagaagctggggaggtgagagtgcagaaaggacgtggatgaagcagagaggcacgtgcctgtctcattcgcctctggatctgctgcatccaggactgtgccagcacaaagtgggagcccgataaatatttattgaagaaatgaaaggtgacaaaaggcagaaggagggagaccccaaaaagagaccccaggctccagaagcagatgaggagacaaacagaagagcagaagaatggcagaatggcacagcagagagaagaaaaggaacatctgaatgttgagaggaatttggctgggggcggttggagaggagattagccactggacagccaaactccaggggaagatcatcttcccactccatcccccttccagctccccatccatcctgctgagagccacctccaccactcagtgaaaccgctgcattcatccttcaagtttatgtgtgacctgattcttcctggacattggacaaagacctaggtccagtgaactgtctaacacttaagtcatccacggacagcaaggctaacagaacgctgtaacatgtgcccacttggactctgggagttgcagacacccacccataggtgctgccatgggtccggagcccaaaaagtgcttgccctggctcctgcacctgcccgtctgcatgctccccctccggtaaggggtttgaggatgtggcggctgaacataagagctatgcccctgtcacacatcatgggacaggggtcagggaactctcccatttcactttcaaatattccaggtcccctttttgttcgggagccagagtctaatggagacagagatagaaaccctgaaataggatccaggcaatataaacctacacgctgtaagccaagtcagagtgaggctgatgtgataacaaaagtctgaatacaaggtgggagacaattattctgactgaaagggaggcaagagttctgccataggcttgatgctgtgtgcccctggcttcctaactcatttgcaaatggaaaatactattccattgtaggaaccttctttttccatgtgtctggggaaggagaaagaatggctgggctgaatgaatttatcccttggtcctcttccaacaaagctcagctatgaaagataaatccagctctccccaccccctctcagtggagctggggagaaatcaaaagcccctctgccaataatgagaccaaagtttgcaagggcaggacgagcccgtgctaacagagaaagtgttgtttcctcaatttggttttagactgtcttgtcctatgggggagaaaagatctgcccttgggagaggtgccaactttatagatctattaataaaagaactggcaggcttacagttcttgccaatgaggaaacttgaatgagagaagccaggctcaaccttggccaacagactggagcccatcaccctaacttcaccccgcttctccttacccaaccgtcaaaggctaggcagcacccacccagcagcttccacctggctgaagcctgcacctgcttcagaccaagggttagatggaaatttggcatgggaagagagggctcacctgtgggcaggatagactctatccaagaaggagaactgaaaaatgaaaacctatgagacaaggggtgatcctgaaggcaggcaggagaaagggctggagggagaggcactggggaatttttcctggtgaatactgaagttactagatgttttgtcttgcaaaactcaagggaaaactctcaaactctaatgtttgtctattctgtgtccaaactgtccttttgaaacggacccacctttcagtaaagaaacttgcattggcctgccc

SEQ ID NO: 9974 - protein, 56 aa, Homo sapiens
MQRINCRETTDLHPRHIHTGPRAAAIADSSHVLFSFLLLLGVTTEAGEVRVQKGRG

SEQ ID NO: 9975 - DNA, 2290 bp, Homo sapiens
ctcccaaagtgctgggattacaggcgtgagccaccacgcccggtcacctttgtcctgttttctacaggttagaagcaaggcacaagtcatacctacattcaaggagaggggaccatgcaaaggataaactgcagagagacaacagatttacatcccagacacattcacactgggccaagagcagctgccattgcagattcgagtcacgtccttttttccttccttctccttcttggagttacaacagaagctggggaggtgagagtgcagaaaggacgtggatgaagcagagaggcacgtgcctgtctcattcgcctctggatctgctgcatccaggactgtgccagcacaaagtgggagcccgataaatatttattgaagaaatgaaaggtgacaaaaggcagaaggagggagaccccaaaaagagaccccaggctccagaagcagatgaggagacaaacagaagagcagaagaatggcagaatggcacagcagagagaagaaaaggaacatctgaatgttgagaggaatttggctgggggcggttggagaggagattagccactggacagccaaactccaggggaagatcatcttcccactccatcccccttccagctccccatccatcctgctgagagccacctccaccactcagtgaaaccgctgcattcatccttcaagtttatgtgtgacctgattcttcctggacattggacaaagacctaggtccagtgaactgtctaacacttaagtcatccacggacagcaaggctaacagaacgctgtaacatgtgcccacttggactctgggagttgcagacacccacccataggtgctgccatgggtccggagcccaaaaagtgcttgccctggctcctgcacctgcccgtctgcatgctccccctccggtaaggggtttgaggatgtggcggctgaacataagagctatgcccctgtcacacatcatgggacaggggtcagggaactctcccatttcactttcaaatattccaggtcccctttttgttcgggagccagagtctaatggagacagagatagaaaccctgaaataggatccaggcaatataaacctacacgctgtaagccaagtcagagtgaggctgatgtgataacaaaagtctgaatacaaggtgggagacaattattctgactgaaagggaggcaagagttctgccataggcttgatgctgtgtgcccctggcttcctaactcatttgcaaatggaaaatactattccattgtaggaaccttctttttccatgtgtctggggaaggagaaagaatggctgggctgaatgaatttatcccttggtcctcttccaacaaagctcagctatgaaagataaatccagctctccccaccccctctcagtggagctggggagaaatcaaaagcccctctgccaataatgagaccaaagtttgcaagggcaggacgagcccgtgctaacagagaaagtgttgtttcctcaatttggttttagactgtcttgtcctatgggggagaaaagatctgcccttgggagaggtgccaactttatagatctattaataaaagaactggcaggcttacagttcttgccaatgaggaaacttgaatgagagaagccaggctcaaccttggccaacagactggagcccatcaccctaacttcaccccgcttctccttacccaaccgtcaaaggctaggcagcacccacccagcagcttccacctggctgaagcctgcacctgcttcagaccaagggttagatggaaatttggcatgggaagagagggctcacctgtgggcaggatagactctatccaagaaggagaactgaaaaatgaaaacctatgagacaaggggtgatcctgaaggcaggcaggagaaagggctggagggagaggcactggggaatttttcctggtgaatactgaagttactagatgttttgtcttgcaaaactcaagggaaaactctcaaactctaatgtttgtctattctgtgtccaaactgtccttttgaaacggacccacctttcagtaaagaaacttgcattggcctgcccagcctggtgtgttagttctgtggaaactgactggctagggtggccacgggaggaagagcctggttctccctcaccagctccttgtgaagaagggacctggtcaataaggcaaacgacaccacttgccaacatttgatattgccaagtgcttttgtttggcactactatagattttaaaaatgtatctcacttttaaaatttgcattttcttg

SEQ ID NO: 9976 - protein, 56 aa, Homo sapiens; identical to SEQ ID NO: 9974

SEQ ID NO: 9977 - DNA, 1164 bp, Homo sapiens
tggaaagctacacgtgtgagcctagaggcgggtcccggttgcagacttgccatggcctccgaagcttctgtgcgtctaggggtgccccctggccgtctgtggatccagaggcctggcatctacgaagatgaggaggggagaacctgggtgactgtggtcgtgcggttcaatccctcgcgtagggaatgggccagggcctcccagggcagcagatatgaacccagcatcacagtgcacttgtggcagatggcagtgcatacccgggagctactctcctccggccagatgcccttctcccagctgcccgccgtgtggcagctctaccccgggaggaagtaccgagcagcggattccagtttctgggaaatagcagaccatggccagattgactctatggagcagctggtcctaacatatcagccggagaggaaagactgacactgggagtggctggccctgctggccctgcctcttctggcctggtgtctcctcatgccccctcagtgaggatcttcatgtacctgctcttctgtttgcacacccagcatagcctccttgcaggcagaaggcagtagggcccctgcacactcagtttctctcgttttccttagttatcagtcctgtcctgtcccactcaggtctgtacttagggcagctggcctggatgggcttcactggggccctgtctgtgtgctgagccagtttcccctgctggctgcaagctgtgggttctttctcctctgtgcccctcatgctgatcttctagatgccactcccaaatccccttcatacccaccaggatgtgtgcccagccaggcctccagcacccccagtgcagctcgtgattggaaactcaccatcggcaggcagtggttcggtttaagagatggcattagagggagcccagtctggatgtggacttggatgccctgtgggtatcagttctgctgacactttggcccgaaatagatccagtgctgagcaagcaatgtacaccagagcctcagtgagcccatctgcacagtggggagcatggagggatgggtttggcctgtgcttctgcttattcagtccttcagctcacggaagggatgctagtccgtgaaggtgacctcacagtactggttaattaaactttattgctcactgtccacttttgtgctg

SEQ ID NO: 9978 - protein, 128 aa, Homo sapiens; identical to SEQ ID NO: 1484

SEQ ID NO: 9979 - DNA, 1628 bp, Homo sapiens
acacgtgtgagcctagaggcgggtcccggttgcagacttgccatggcctccgaagcttctgtgcgtctaggggtgccccctggccgtctgtggatccagaggcctggcatctacgaagatgaggaggggagaacctgggtgactgtggtcgtgcggttcaatccctcgcgtagggaatgggccagggcctcccagggcagcagatatgaacccagcatcacagtgcacttgtggcagatggcagtgcatacccgggagctactctcctccggccagatgcccttctcccagctgcccgccgtgtggcagctctaccccgggaggaagtaccgagcagcggattccagtttctgggaaatagcagaccatggccagattgactctatggagcagctggtcctaacatatcagccggagaggaaagactgacactgggagtggctggtatgttggggccctgtgcgtctcagtgtagggatcagacgaaagtgagaagacctctcctcttttcagaaagacggcgtggcctcctcctccctgctgtttgctgagatttttcttacatagccacctgtcacctctgttccccagccccttggatgtgatggtacacagtgggtgggcccccataataagttcctaaagcatgggatctcatcgaataagactcatgaatctagtgatctcgggtccctagatttaaccatggcactgaggtgccgtgtgacggtggccttggaggacccagcactgacccatagagggctcctctcagatgggcagcagcttggagcaggccaggcagggcctgggccattggaggggctggcactggacttgcctttgaccccagcagcttggatggggtgccgggctcccccatagttcactgactgtctcctttggtcttctcgcaggccctgctggccctgcctcttctggcctggtgtctcctcatgccccctcagtgaggatcttcatgtacctgctcttctgtttgcacacccagcatagcctccttgcaggcagaaggcagtagggcccctgcacactcagtttctctcgttttccttagttatcagtcctgtcctgtcccactcaggtctgtacttagggcagctggcctggatgggcttcactggggccctgtctgtgtgctgagccagtttcccctgctggctgcaagctgtgggttctttctcctctgtgcccctcatgctgatcttctagatgccactcccaaatccccttcatacccaccaggatgtgtgcccagccaggcctccagcacccccagtgcagctcgtgattggaaactcaccatcggcaggcagtggttcggtttaagagatggcattagagggagcccagtctggatgtggacttggatgccctgtgggtatcagttctgctgacactttggcccgaaatagatccagtgctgagcaagcaatgtacaccagagcctcagtgagcccatctgcacagtggggagcatggagggatgggtttggcctgtgcttctgcttattcagtccttcagctcacggaagggatgctagtccgtgaaggtgacctcacagtactggttaattaaactttattgctcactgtccacttttgtgctg

SEQ ID NO: 9980 - protein, 128 aa, Homo sapiens; identical to SEQ ID NO: 1484

SEQ ID NO: 9981 - DNA, 356 bp, Homo sapiens
tcaaacaaaacaaagcaaaacaaaaaaaacagttaagattttttttttttttaaatgattcagtggaaatagaatggattcttcaaataacttagccacgggtgggataagggacctacttatatgaacccagcatcacagtgcacttgtggcagatggcagtgcatacccgggagctactctcctccggccagatgcccttctcccagctgcccgccgtgtggcagctctaccccgggaggaagtaccgagcagcggattccagtttctgggaaatagcagaccatggccagattgactctatggagcagctggtcctaacatatcagccggagaggaaagactgacactgggag

SEQ ID NO: 9982 - protein, 63 aa, Homo sapiens [sequence omitted]

SEQ ID NO: 9983 - DNA, 1398 bp, Homo sapiens
gccgtcctcccgccccgccgcttggtggcggccgcatgctgcccggatataaagggtcggccccacatcccagggaccagcgagcggccttgagaggctctggctcttgcttcttaggcggcccgaggacgccatggccgagtgcccgacactcggggaggcagtcaccgaccacccggaccgcctgtgggcctgggagaagttcgtgtatttggacgagaagcagcacgcctggctgcccttaaccatcgagataaaggataggttacagttacgggtgctcttgcgtcgggaagacgtcgtcctggggaggcctatgacccccacccagataggcccaagcctgctgcctatcatgtggcagctctaccctgatggacgataccgatcctcagactccagtttctggcgcttagtgtaccacatcaagattgacggcgtggaggacatgcttctcgagctgctgccagatgactgatgtatggtcttggcagcacctgtctcctttcaccccagggcctgagcctggccagcctacaatggggatgttgtgtttctgttcaccttcgtttactatgcctgtgtcttctccaccacgctggggtctgggaggaatggacagacagaggatgagctctacccagggcctgcaggacctgcctgtagcccactctgctcgccttagcactaccactcctgccaaggaggattccatttggcagagcttcttccaggtgcccagctatacctgtgcctcggcttttctcagctggatgatggtcttcagcctctttctgtcccttctgtccctcacagcactagtatttcatgttgcacacccactcagctccgtgaacttgtgagaacacagccgattcacctgagcaggacctctgaaaccctggaccagtggtctcacatggtgctacgcctgcatgtaaacacgcctgcaaacgctgcctgccggtaaacacgcctgcaaacgctgcctgcccgtaaacacgcctgcaaacgctgcctgcccacacaggttcacgtgcagctcaaggaaaggcctgaaaggagcccttatctgtgctcaggactcagaagcctctgggtcagtggtccacatcccgggacgcagcaggaggccaggccggcgagccctgtggatgagccctcagaacccttggcttgcccacgtggaaaagggatagaggttgggtttccccccttttatagatggtcacgcacctgggtgttacaaagttgtatgtggcatgaatactttttgtaatgattgattaaatgcaagatagtttatctaacttcgtgcggaatcagcttctatccttgacttagattctggtggagagaagtgagaataggcagcccccaaataaaaaatattcatgg

SEQ ID NO: 9984 - protein, 130 aa, Homo sapiens
MTDVWSWQHLSPFTPGPEPGQPTMGMLCFCSPSFTMPVSSPPRWGLGGMDRQRMSSTQGLQDLPVAHSARLSTTTPAKEDSIWQSFFQVPSYTCASAFLSWMMVFSLFLSLLSLTALVFHVAHPLSSVNL

SEQ ID NO: 9985 - DNA, 1081 bp, Homo sapiens
gaaggctggtgggaggaggggcagtctccaagagcccctgaaatcctcacacctgggttcctacctgctgtttccagctaggggaaggcgcaggagtgaggaatggagggagtggagggctctggccgatcaatgccttctctctctctctgcctctcagattgacggcgtggaggacatgcttctcgagctgctgccagatgactgatgtatggtcttggcagcacctgtctcctttcaccccagggcctgagcctggccagcctacaatggggatgttgtgtttctgttcaccttcgtttactatgcctgtgtcttctccaccacgctggggtctgggaggaatggacagacagaggatgagctctacccagggcctgcaggacctgcctgtagcccactctgctcgccttagcactaccactcctgccaaggaggattccatttggcagagcttcttccaggtgcccagctatacctgtgcctcggcttttctcagctggatgatggtcttcagcctctttctgtcccttctgtccctcacagcactagtatttcatgttgcacacccactcagctccgtgaacttgtgagaacacagccgattcacctgagcaggacctctgaaaccctggaccagtggtctcacatggtgctacgcctgcatgtaaacacgcctgcaaacgctgcctgccggtaaacacgcctgcaaacgctgcctgcccgtaaacacgcctgcaaacgctgcctgcccacacaggttcacgtgcagctcaaggaaaggcctgaaaggagcccttatctgtgctcaggactcagaagcctctgggtcagtggtccacatcccgggacgcagcaggaggccaggccggcgagccctgtggatgagccctcagaacccttggcttgcccacgtggaaaagggatagaggttgggtttccccccttttatagatggtcacgcacctgggtgttacaaagttgtatgtggcatgaatactttttgtaatgattgattaaatgcaagatagtttatctaacttcgtgcggaatcagcttctatccttgacttagattctgg

SEQ ID NO: 9986 - protein, 130 aa, Homo sapiens; identical to SEQ ID NO: 9984

SEQ ID NO: 9987 - DNA, 1141 bp, Homo sapiens
cgatcctcctgcctctgccttccaaagcactggaattacaagtataaaggataggttacagttacgggtgctcttgcgtcgggaagacgtcgtcctggggaggcctatgacccccacccagataggcccaagcctgctgcctatcatgtggcagctctaccctgatggacgataccgatcctcagactccagtttctggcgcttagtgtaccacatcaagattgacggcgtggaggacatgcttctcgagctgctgccagatgactgatgtatggtcttggcagcacctgtctcctttcaccccagggcctgagcctggccagcctacaatggggatgttgtgtttctgttcaccttcgtttactatgcctgtgtcttctccaccacgctggggtctgggaggaatggacagacagaggatgagctctacccagggcctgcaggacctgcctgtagcccactctgctcgccttagcactaccactcctgccaaggaggattccatttggcagagcttcttccaggtgcccagctatacctgtgcctcggcttttctcagctggatgatggtcttcagcctctttctgtcccttctgtccctcacagcactagtatttcatgttgcacacccactcagctccgtgaacttgtgagaacacagccgattcacctgagcaggacctctgaaaccctggaccagtggtctcacatggtgctacgcctgcatgtaaacacgcctgcaaacgctgcctgccggtaaacacgcctgcaaacgctgcctgcccgtaaacacgcctgcaaacgctgcctgcccacacaggttcacgtgcagctcaaggaaaggcctgaaaggagcccttatctgtgctcaggactcagaagcctctgggtcagtggtccacatcccgggacgcagcaggaggccaggccggcgagccctgtggatgagccctcagaacccttggcttgcccacgtggaaaagggatagaggttgggtttccccccttttatagatggtcacgcacctgggtgttacaaagttgtatgtggcatgaatactttttgtaatgattgattaaatgcaagatagtttatctaacttcgtgcggaatcagcttctatccttgacttagattctgg

SEQ ID NO: 9988 - protein, 130 aa, Homo sapiens; identical to SEQ ID NO: 9984

SEQ ID NO: 9989 - DNA, 1503 bp, Homo sapiens
gggaccagcgagcggccttgagaggctctggctcttgcttcttaggcggcccgaggacgccatggccgagtgcccgacactcggggaggcagtcaccgaccacccggaccgcctgtgggcctgggagaagttcgtgtatttggacgagaagcagcacgcctggctgcccttaaccatcgagatacagggtctcgctctgtgacccaggctggtcttaaactcctggcctcaagcgatcctcctgcctctgccttccaaagcactggaattacaagtgtgagccgctgcaacccgccagaaaaaagtgtgcctttcatggccctgtctgggtggctagacacgtgtgtgtgctggtggtcctggcccagccagagtccctgagaggagcatgcatggcctaaggaaataaaggataggttacagttacgggtgctcttgcgtcgggaagacgtcgtcctggggaggcctatgacccccacccagataggcccaagcctgctgcctatcatgtggcagctctaccctgatggacgataccgatcctcagactccagtttctggcgcttagtgtaccacatcaagattgacggcgtggaggacatgcttctcgagctgctgccagatgactgatgtatggtcttggcagcacctgtctcctttcaccccagggcctgagcctggccagcctacaatggggatgttgtgtttctgttcaccttcgtttactatgcctgtgtcttctccaccacgctggggtctgggaggaatggacagacagaggatgagctctacccagggcctgcaggacctgcctgtagcccactctgctcgccttagcactaccactcctgccaaggaggattccatttggcagagcttcttccaggtgcccagctatacctgtgcctcggcttttctcagctggatgatggtcttcagcctctttctgtcccttctgtccctcacagcactagtatttcatgttgcacacccactcagctccgtgaacttgtgagaacacagccgattcacctgagcaggacctctgaaaccctggaccagtggtctcacatggtgctacgcctgcatgtaaacacgcctgcaaacgctgcctgccggtaaacacgcctgcaaacgctgcctgcccgtaaacacgcctgcaaacgctgcctgcccacacaggttcacgtgcagctcaaggaaaggcctgaaaggagcccttatctgtgctcaggactcagaagcctctgggtcagtggtccacatcccgggacgcagcaggaggccaggccggcgagccctgtggatgagccctcagaacccttggcttgcccacgtggaaaagggatagaggttgggtttccccccttttatagatggtcacgcacctgggtgttacaaagttgtatgtggcatgaatactttttgtaatgattgattaaatgcaagatagtttatctaacttcgtgcggaatcagcttctatccttgacttagattctgg

SEQ ID NO: 9990 - protein, 130 aa, Homo sapiens; identical to SEQ ID NO: 9984

SEQ ID NO: 9991 - DNA, 756 bp, Homo sapiens
ggcagcacctgtctcctttcaccccagggcctgagcctggccagcctacaatggggatgaatggacagacagaggatgagctctacccagggcctgcaggacctgcctgtagcccactctgctcgccttagcactaccactcctgccaaggaggattccatttggcagagcttcttccaggtgcccagctatacctgtgcctcggcttttctcagctggatgatggtcttcagcctctttctgtcccttctgtccctcacagcactagtatttcatgttgcacacccactcagctccgtgaacttgtgagaacacagccgattcacctgagcaggacctctgaaaccctggaccagtggtctcacatggtgctacgcctgcatgtaaacacgcctgcaaacgctgcctgccggtaaacacgcctgcaaacgctgcctgcccgtaaacacgcctgcaaacgctgcctgcccacacaggttcacgtgcagctcaaggaaaggcctgaaaggagcccttatctgtgctcaggactcagaagcctctgggtcagtggtccacatcccgggacgcagcaggaggccaggccggcgagccctgtggatgagccctcagaacccttggcttgcccacgtggaaaagggatagaggttgggtttccccccttttatagatggtcacgcacctgggtgttacaaagttgtatgtggcatgaatactttttgtaatgattgattaaatgcaagatagtttatctaa

SEQ ID NO: 9992 - protein, 82 aa, Homo sapiens [sequence omitted]

SEQ ID NO: 9993 - DNA, 896 bp, Homo sapiens
cagcgagcggccttgagaggctctggctcttgcttcttaggcggcccgaggacgccatggccgagtgcccgacactcggggaggcagtcaccgaccacccggaccgcctgtgggcctgggagaagttcgtgtatttggacgagaagcagcacgcctggctgcccttaaccatcgagataaaggataggttacagttacgggtgctcttgcgtcgggaagacgtcgtcctggggaggcctatgacccccacccagataggcccaagcctgctgcctatcatgtggcagctctaccctgatggacgataccgatcctcagactccagtttctggcgcttagtgtaccacatcaagattgacggcgtggaggacatgcttctcgagctgctgccagatgactgatcactagtatttcatgttgcacacccactcagctccgtgaacttgtgagaacacagccgattcacctgagcaggacctctgaaaccctggaccagtggtctcacatggtgctacgcctgcatgtaaacacgcctgcaaacgctgcctgccggtaaacacgcctgcaaacgctgcctgcccgtaaacacgcctgcaaacgctgcctgcccacacaggttcacgtgcagctcaaggaaaggcctgaaaggagcccttatctgtgctcaggactcagaagcctctgggtcagtggtccacatcccgggacgcagcaggaggccaggccggcgagccctgtggatgagccctcagaacccttggcttgcccacgtggaaaagggatagaggttgggtttccccccttttatagatggtcacgcacctgggtgttacaaagttgtatgtggcatgaatactttttgtaatgattgattaaatgcaagatagtttatctaa

SEQ ID NO: 9994 - protein, 114 aa, Homo sapiens; identical to SEQ ID NO: 1488

SEQ ID NO: 9995 - DNA, 1240 bp, Homo sapiens
gccgtcctcccgccccgccgcttggtggcggccgcatgctgcccggatataaagggtcggccccacatcccagggaccagcgagcggccttgagaggctctggctcttgcttcttaggcggcccgaggacgccatggccgagtgcccgacactcggggaggcagtcaccgaccacccggaccgcctgtgggcctgggagaagttcgtgtatttggacgagaagcagcacgcctggctgcccttaaccatcgagataaaggataggttacagttacgggtgctcttgcgtcgggaagacgtcgtcctggggaggcctatgacccccacccagataggcccaagcctgctgcctatcatgtggcagctctaccctgatggacgataccgatcctcagactccagtttctggcgcttagtgtaccacatcaagattgacggcgtggaggacatgcttctcgagctgctgccagatgactgatgtatggtcttggcagcacctgtctcctttcaccccagggcctgagcctggccagcctacaatggggatgttgtgtttctgttcaccttcgtttactatgcctgtgtcttctccaccacgctggggtctgggaggaatggacagacagaggatgagctctacccagggcctgcaggacctgcctgtagcccactctatacctgtgcctcggcttttctcagctggatgatggtcttcagcctctttctgtcccttctgtccctcacagcactagtatttcatgttgcacacccactcagctccgtgaacttgtgagaacacagccgattcacctgagcaggacctctgaaaccctggaccagtggtctcacatggtgctacgcctgcatgtaaacacgcctgcaaacgctgcctgccggtaaacacgcctgcaaacgctgcctgcccgtaaacacgcctgcaaacgctgcctgcccacacaggttcacgtgcagctcaaggaaaggcctgaaaggagcccttatctgtgctcaggactcagaagcctctgggtcagtggtccacatcccgggacgcagcaggaggccaggccggcgagccctgtggatgagccctcagaacccttggcttgcccacgtggaaaagggatagaggttgggtttccccccttttatagatggtcacgcacctgggtgttacaaagttgtatgtggcatgaatactttttgtaatgattgattaaatgcaagatagtttatctaa

SEQ ID NO: 9996 - protein, 114 aa, Homo sapiens; identical to SEQ ID NO: 1488

SEQ ID NO: 9997 - DNA, 1038 bp, Homo sapiens
gaaggctggtgggaggaggggcagtctccaagagcccctgaaatcctcacacctgggttcctacctgctgtttccagctaggggaaggcgcaggagtgaggaatggagggagtggagggctctggccgatcaatgccttctctctctctctgcctctcagattgacggcgtggaggacatgcttctcgagctgctgccagatgactgatgtatggtcttggcagcacctgtctcctttcaccccagggcctgagcctggccagcctacaatggggatgttgtgtttctgttcaccttcgtttactatgcctgtgtcttctccaccacgctggggtctgggaggaatggacagacagaggatgagctctacccagggcctgcaggacctgcctgtagcccactctgctcgccttagcactaccactcctgccaaggaggattccatttggcagagcttcttccaggtgcccagctatacctgtgcctcggcttttctcagctggatgatggtcttcagcctctttctgtcccttctgtccctcacagcactagtatttcatgttgcacacccactcagctccgtgaacttgtgagaacacagccgattcacctgagcaggacctctgaaaccctggaccagtggtctcacatggtgctacgcctgcatgtaaacacgcctgcaaacgctgcctgccggtaaacacgcctgcaaacgctgcctgcccgtaaacacgcctgcaaacgctgcctgcccacacaggttcacgtgcagctcaaggaaaggcctgaaaggagcccttatctgtgctcaggactcagaagcctctgggtcagtggtccacatcccgggacgcagcaggaggccaggccggcgagccctgtggatgagccctcagaacccttggcttgcccacgtggaaaagggatagaggttgggtttccccccttttatagatggtcacgcacctgggtgttacaaagttgtatgtggcatgaatactttttgtaatgattgattaaatgcaagatagtttatct

SEQ ID NO: 9998 - protein, 130 aa, Homo sapiens; identical to SEQ ID NO: 9984

SEQ ID NO: 9999 - DNA, 1098 bp, Homo sapiens
cgatcctcctgcctctgccttccaaagcactggaattacaagtataaaggataggttacagttacgggtgctcttgcgtcgggaagacgtcgtcctggggaggcctatgacccccacccagataggcccaagcctgctgcctatcatgtggcagctctaccctgatggacgataccgatcctcagactccagtttctggcgcttagtgtaccacatcaagattgacggcgtggaggacatgcttctcgagctgctgccagatgactgatgtatggtcttggcagcacctgtctcctttcaccccagggcctgagcctggccagcctacaatggggatgttgtgtttctgttcaccttcgtttactatgcctgtgtcttctccaccacgctggggtctgggaggaatggacagacagaggatgagctctacccagggcctgcaggacctgcctgtagcccactctgctcgccttagcactaccactcctgccaaggaggattccatttggcagagcttcttccaggtgcccagctatacctgtgcctcggcttttctcagctggatgatggtcttcagcctctttctgtcccttctgtccctcacagcactagtatttcatgttgcacacccactcagctccgtgaacttgtgagaacacagccgattcacctgagcaggacctctgaaaccctggaccagtggtctcacatggtgctacgcctgcatgtaaacacgcctgcaaacgctgcctgccggtaaacacgcctgcaaacgctgcctgcccgtaaacacgcctgcaaacgctgcctgcccacacaggttcacgtgcagctcaaggaaaggcctgaaaggagcccttatctgtgctcaggactcagaagcctctgggtcagtggtccacatcccgggacgcagcaggaggccaggccggcgagccctgtggatgagccctcagaacccttggcttgcccacgtggaaaagggatagaggttgggtttccccccttttatagatggtcacgcacctgggtgttacaaagttgtatgtggcatgaatactttttgtaatgattgattaaatgcaagatagtttatct

SEQ ID NO: 10000 - protein, 130 aa, Homo sapiens; identical to SEQ ID NO: 9984

SEQ ID NO: 10001 - DNA, 1460 bp, Homo sapiens
gggaccagcgagcggccttgagaggctctggctcttgcttcttaggcggcccgaggacgccatggccgagtgcccgacactcggggaggcagtcaccgaccacccggaccgcctgtgggcctgggagaagttcgtgtatttggacgagaagcagcacgcctggctgcccttaaccatcgagatacagggtctcgctctgtgacccaggctggtcttaaactcctggcctcaagcgatcctcctgcctctgccttccaaagcactggaattacaagtgtgagccgctgcaacccgccagaaaaaagtgtgcctttcatggccctgtctgggtggctagacacgtgtgtgtgctggtggtcctggcccagccagagtccctgagaggagcatgcatggcctaaggaaataaaggataggttacagttacgggtgctcttgcgtcgggaagacgtcgtcctggggaggcctatgacccccacccagataggcccaagcctgctgcctatcatgtggcagctctaccctgatggacgataccgatcctcagactccagtttctggcgcttagtgtaccacatcaagattgacggcgtggaggacatgcttctcgagctgctgccagatgactgatgtatggtcttggcagcacctgtctcctttcaccccagggcctgagcctggccagcctacaatggggatgttgtgtttctgttcaccttcgtttactatgcctgtgtcttctccaccacgctggggtctgggaggaatggacagacagaggatgagctctacccagggcctgcaggacctgcctgtagcccactctgctcgccttagcactaccactcctgccaaggaggattccatttggcagagcttcttccaggtgcccagctatacctgtgcctcggcttttctcagctggatgatggtcttcagcctctttctgtcccttctgtccctcacagcactagtatttcatgttgcacacccactcagctccgtgaacttgtgagaacacagccgattcacctgagcaggacctctgaaaccctggaccagtggtctcacatggtgctacgcctgcatgtaaacacgcctgcaaacgctgcctgccggtaaacacgcctgcaaacgctgcctgcccgtaaacacgcctgcaaacgctgcctgcccacacaggttcacgtgcagctcaaggaaaggcctgaaaggagcccttatctgtgctcaggactcagaagcctctgggtcagtggtccacatcccgggacgcagcaggaggccaggccggcgagccctgtggatgagccctcagaacccttggcttgcccacgtggaaaagggatagaggttgggtttccccccttttatagatggtcacgcacctgggtgttacaaagttgtatgtggcatgaatactttttgtaatgattgattaaatgcaagatagtttatct

SEQ ID NO: 10002 - protein, 130 aa, Homo sapiens; identical to SEQ ID NO: 9984

SEQ ID NO: 10003 - DNA, 1308 bp, Homo sapiens
gccgtcctcccgccccgccgcttggtggcggccgcatgctgcccggatataaagggtcggccccacatcccagggaccagcgagcggccttgagaggctctggctcttgcttcttaggcggcccgaggacgccatggccgagtgcccgacactcggggaggcagtcaccgaccacccggaccgcctgtgggcctgggagaagttcgtgtatttggacgagaagcagcacgcctggctgcccttaaccatcgagataaaggataggttacagttacgggtgctcttgcgtcgggaagacgtcgtcctggggaggcctatgacccccacccagataggcccaagcctgctgcctatcatgtggcagctctaccctgatggacgataccgatcctcagactccagtttctggcgcttagtgtaccacatcaagattgacggcgtggaggacatgcttctcgagctgctgccagatgactgatgtatggtcttggcagcacctgtctcctttcaccccagggcctgagcctggccagcctacaatggggatgttgtgtttctgttcaccttcgtttactatgcctgtgtcttctccaccacgctggggtctgggaggaatggacagacagaggatgagctctacccagggcctgcaggacctgcctgtagcccactctgctcgccttagcactaccactcctgccaaggaggattccatttggcagagcttcttccaggtgcccagctatacctgtgcctcggcttttctcagctggatgatggtcttcagcctctttctgtcccttctgtccctcacagcactagtatttcatgttgcacacccactcagctccgtgaacttgtgagaacacagccgattcacctgagcaggacctctgaaaccctggaccagtggtctcacatggtgctacgcctgcatgtaaacacgcctgcaaacgctgcctgccggtaaacacgcctgcaaacgctgcctgcccgtaaacacgcctgcaaacgctgcctgcccacacaggttcacgtgcagctcaaggaaaggcctgaaaggagcccttatctgtgctcaggactcagaagcctctgggtcagtggtccacatcccgggacgcagcaggaggccaggccggcgagccctgtggatgagccctcagaacccttggcttgcccacgtggaaaagggatagaggttgggtttccccccttttatagatggtcacgcacctgggtgttacaaagttgtatgtggcatgaatactttttgtaatgattgattaaatgcaagatagtttatct

SEQ ID NO: 10004 - protein, 130 aa, Homo sapiens; identical to SEQ ID NO: 9984

SEQ ID NO: 10005 - DNA, 714 bp, Homo sapiens
gggaccagcgagcggccttgagaggctctggctcttgcttcttaggcggcccgaggacgccatggccgagtgcccgacactcggggaggcagtcaccgaccacccggaccgcctgtgggcctgggagaagttcgtgtatttggacgagaagcagcacgcctggctgcccttaaccatcgagataaaggataggttacagttacgggtgctcttgcgtcgggaagacgtcgtcctggggaggcctatgacccccacccagataggcccaagcctgctgcctatcatgtggcagctctaccctgatggacgataccgatcctcagactccagtttctggcgcttagtgtaccacatcaagattgacggcgtggaggacatgcttctcgagctgctgccagatgactgatgtatggtgagctccactggagcctgacccctcttagtccacagtggctgtatcagaaagaaagaccaccccttctccatgaaggcagtgctaacccctccccgactgctgccatctgagggtccctagggatgggagaggcttcctggaggcactcatgtctcccttaccacttcgggagccaagggctttgtaggcagccccctttatcgcagctgctcatatctataaagtacttcacaagtttcagctggcactttcatttaccattgcttttttttttttttgagatgagtctggctctgtgg

SEQ ID NO: 10006 - protein, 114 aa, Homo sapiens; identical to SEQ ID NO: 1488

SEQ ID NO: 10007 - DNA, 2779 bp, Homo sapiens
agtcatctggcagcagctcgagaagcatgtcctccacgccgtcaatctgagaggcagagagagagagaaggcattgatcggccagagccctccactccctccattcctcactcctgcgccttcccctagctggaaacagcaggtaggaacccaggtgtgaggatttcaggggctcttggagactgcccctcctcccaccagccttcagcctgtgactgcccaccagagatgtcttcctgcggctagctggtggctgggaggaagtggaggctggaatgcaatggtgtgatcttggctcactgcgacctccacctcctgggttcaagcgattctcctgcttctgcctcccgagtagctgggattacagacaaagaattcaagactaaactgggcatggtgacacgcacctgtagtctcagctacttgggaggctgaggcaggagaatcacatgaacctggcaggcggaggttgcagtgagccgagattgtgccactgcactccagcctggccacagagcgagactccgtctcaaaaaaaaaaaaaaaagaaaaaaagaaaaaagaagaagtcaagactaagaagagtgaagtatgaagtaattcacccacagacacccagctagtgagtggcagacctggaagacaaactagttctgtttggcatcagaatctatgctgtcagccacctcaccacattcatgtgacatccaacaaagtggtgccttcacctgctactaagtcttgctagggctagttccagagccaagactatgaagtggacaatgatctatgaagcgctaagtgaacagatgtcatgtaaatagcttggatctctacgtgcatgtgtgcattgtatatgtttaccaaagaccttgttacagtgtttttaggcatggctcactttataaaggtcatcacagttggccaagctatctggtatttattactcatttgatactcacacctgctcaatgatgctggtatcattactctccataatgattttcctatcattttacagatggggttcagaaagatcaggtggtagatccatagtcacactctagttaattgataggactgagaattcaatgcatgcccactgccttctcttacaagtcttggggtatttgagtgtaattcaataatgacaaccccttcactgtccaaaaggggtgaatgaaacatcaagctgtcacaaaggctaggttggagggcatggcttatatccttgggtaagtaggcttactaaacttaaaccctaaagttgaactgacttaactaccccgtcccagcagctggagtgggacaggacactgggtctatatggagaggggtctgcccagattagctttaggacgtggagaagcagagaactcatgttcctacaaacaggttcactctcaagataaagacaaggaaccaaactcagcctgcctgcttcattttttcatatttgccaatcagataagtcacttccgcccccagagagatttaataaaggagcagagaaagacttctaataaaattccctccatatggaaggaaaaggagacatcgggagttacgttaatcatgctcatttcttaacagtgcaaatatcaagagttagaaattagagttcctggctgggtgcggtgcctcactcctgtaatcctagcactttggaaggccaaggcaggtggattgccggagctcaggagttcgagaccagcctgggcaacacggtgaaaccttgtctctactaaaatacaaaaaaatagccaggcgtggcagcgtgcacctgtaatcccagctactcaggaggctaaggcaggagaattgcttgaacaagggagccagaggttgcagtgagctgagattgcaccactgcactccagcctgggtgacagagcgagactctgtctccaaaaaaaaaaaacaaaacagaaataagagttcccacatgacagcaagaatcactgaaaatgctggacccactgtcaatgctgtattgttgcaaagaaaatgtttatcttgcctaactttaaagtcacacatgcctgggaacttccaactagaacacagctggcaaagcagacaccctctccctgcagcctcgttgaaaatgacctcctttacatttcctcattgagaatctgcccagtgaggactgtggcagaagagagtcagggagaattttctagctgattagggttagaaaatgaagacgagggctctcttgtaatcagcaggaagctatgatagaaaagaatgccttttaaatttgaagtgcaaaactagaaaatagaaaattattaggggggtttgatatgaagtttcggaattcttttcaagactgtgtgttttgaagttaagattttaaataatgtaggaaggtacagtctatactgatgggttcaggatatgctaacccaaaatatggcaccttggtgtttgagaaaatggcggaagcaggaaggtcattctcaccatccacctccctttccccctcctgaagcaggtcttctttgaaaggcccctccctgtaaccagaagaaaggaacattcttacctttgaagtcacagggtcacagagaagaatctgaacaggacttactaaattcttccagtttgtcaccatttgctcataccatctttgtccagttatatttctccaaagctatccactcttcatcaaacttagcataaaaattgtaaaaccttacacatttcttcaggtcttccttttccttaggaagcctcccatgtcacatgaaacttaaataaaataaatctg

SEQ ID NO: 10008 - protein, 36 aa, Homo sapiens
MQWCDLGSLRPPPPGFKRFSCFCLPSSWDYRQRIQD

SEQ ID NO: 10009 - DNA, 2652 bp, Homo sapiens
agtcatctggcagcagctcgagaagcatgtcctccacgccgtcaatctgagaggcagagagagagagaaggcattgatcggccagagccctccactccctccattcctcactcctgcgccttcccctagctggaaacagcaggctggaatgcaatggtgtgatcttggctcactgcgacctccacctcctgggttcaagcgattctcctgcttctgcctcccgagtagctgggattacagacaaagaattcaagactaaactgggcatggtgacacgcacctgtagtctcagctacttgggaggctgaggcaggagaatcacatgaacctggcaggcggaggttgcagtgagccgagattgtgccactgcactccagcctggccacagagcgagactccgtctcaaaaaaaaaaaaaaaagaaaaaaagaaaaaagaagaagtcaagactaagaagagtgaagtatgaagtaattcacccacagacacccagctagtgagtggcagacctggaagacaaactagttctgtttggcatcagaatctatgctgtcagccacctcaccacattcatgtgacatccaacaaagtggtgccttcacctgctactaagtcttgctagggctagttccagagccaagactatgaagtggacaatgatctatgaagcgctaagtgaacagatgtcatgtaaatagcttggatctctacgtgcatgtgtgcattgtatatgtttaccaaagaccttgttacagtgtttttaggcatggctcactttataaaggtcatcacagttggccaagctatctggtatttattactcatttgatactcacacctgctcaatgatgctggtatcattactctccataatgattttcctatcattttacagatggggttcagaaagatcaggtggtagatccatagtcacactctagttaattgataggactgagaattcaatgcatgcccactgccttctcttacaagtcttggggtatttgagtgtaattcaataatgacaaccccttcactgtccaaaaggggtgaatgaaacatcaagctgtcacaaaggctaggttggagggcatggcttatatccttgggtaagtaggcttactaaacttaaaccctaaagttgaactgacttaactaccccgtcccagcagctggagtgggacaggacactgggtctatatggagaggggtctgcccagattagctttaggacgtggagaagcagagaactcatgttcctacaaacaggttcactctcaagataaagacaaggaaccaaactcagcctgcctgcttcattttttcatatttgccaatcagataagtcacttccgcccccagagagatttaataaaggagcagagaaagacttctaataaaattccctccatatggaaggaaaaggagacatcgggagttacgttaatcatgctcatttcttaacagtgcaaatatcaagagttagaaattagagttcctggctgggtgcggtgcctcactcctgtaatcctagcactttggaaggccaaggcaggtggattgccggagctcaggagttcgagaccagcctgggcaacacggtgaaaccttgtctctactaaaatacaaaaaaatagccaggcgtggcagcgtgcacctgtaatcccagctactcaggaggctaaggcaggagaattgcttgaacaagggagccagaggttgcagtgagctgagattgcaccactgcactccagcctgggtgacagagcgagactctgtctccaaaaaaaaaaaacaaaacagaaataagagttcccacatgacagcaagaatcactgaaaatgctggacccactgtcaatgctgtattgttgcaaagaaaatgtttatcttgcctaactttaaagtcacacatgcctgggaacttccaactagaacacagctggcaaagcagacaccctctccctgcagcctcgttgaaaatgacctcctttacatttcctcattgagaatctgcccagtgaggactgtggcagaagagagtcagggagaattttctagctgattagggttagaaaatgaagacgagggctctcttgtaatcagcaggaagctatgatagaaaagaatgccttttaaatttgaagtgcaaaactagaaaatagaaaattattaggggggtttgatatgaagtttcggaattcttttcaagactgtgtgttttgaagttaagattttaaataatgtaggaaggtacagtctatactgatgggttcaggatatgctaacccaaaatatggcaccttggtgtttgagaaaatggcggaagcaggaaggtcattctcaccatccacctccctttccccctcctgaagcaggtcttctttgaaaggcccctccctgtaaccagaagaaaggaacattcttacctttgaagtcacagggtcacagagaagaatctgaacaggacttactaaattcttccagtttgtcaccatttgctcataccatctttgtccagttatatttctccaaagctatccactcttcatcaaacttagcataaaaattgtaaaaccttacacatttcttcaggtcttccttttccttaggaagcctcccatgtcacatgaaacttaaataaaataaatctg

SEQ ID NO: 10010 - protein, 36 aa, Homo sapiens; identical to SEQ ID NO: 10008

SEQ ID NO: 10011 - DNA, 614 bp, Homo sapiens
gccttgagaggctctggctcttgcttcttaggcggcccgaggacgccatggccgagtgcccgacactcggggaggcagtcaccgaccacccggaccgcctgtgggcctgggagaagttcgtgtatttggacgagaagcagcacgcctggctgcccttaaccatcgagatacagggtctcgctctgtgacccaggctggtcttaaactcctggcctcaagcgatcctcctgcctctgccttccaaagcactggaattacaagtgtgagccgctgcaacccgccagaaaaaagtgtgcctttcatggccctgtctgggtggctagacacgtgtgtgtgctggtggtcctggcccagccagagtccctgagaggagcatgcatggcctaaggaagtgagcttcagggaacagtgatgaccatcatttcacactcggacccctgcccagatgggtggatggctggcaggagggattccggttttctgcgcctggagaagccctggcaagcggaacctgaaagtatgccctgtccttttcttctcctcagataaaggataggttacagttacgggtgctcttgcgtcgggaagacgtcgtcctggggaggcctatgacc

SEQ ID NO: 10012 - protein, 46 aa, Homo sapiens
MAECPTLGEAVTDHPDRLWAWEKFVYLDEKQHAWLPLTIEIQGLAL

SEQ ID NO: 10013 - DNA, 275 bp, Homo sapiens
ccgggctctgagtgctcttgcccgtccggccccagccgcggcccgggaatctacgtcacccgaaaagcgactataaacgccggcgcctccgtccccagccgcggctcgggaatccacccgaagagtggctataaacgtccgcgcctccattgcgctctcctcttcacttaggacactggtcctcccacgcctgacaccgacgtcgccaggaccgcggggttgggggaacttggctgtcccacgtctttcaaataaagctgttttgtctaactcac

SEQ ID NO: 10014 - protein, 65 aa, Homo sapiens
TPAPPSPAAARESTRRVAINVRASIALSSSLRTLVLPRLTPTSPGPRGWGNLAVPRLSNKAVLSN

SEQ ID NO: 10015 - DNA, 815 bp, Homo sapiens
gtggagctgctgtctagacgcagatcatgggtggcgggtatgatctcaacctcttcgccagccctcctgacagcaacttcgtgtgctccgtctgccatggggttctcaagaggccagcaaggttgccatgcagccacatcttctgcaaaaagtgcatcctccggtggctagccagacaaaagacctgtccgtgctgtaggaaagaggtgaaaaggaaaaaggttgtccacatgaataaactccggaaaaccattggccgcctggaagtcaagtgcaagaacgccgacgctggctgcatagtgacatgccccctggcccatcgcaaggggcaccaggactcatgcccctttgagctaacggcctgccccaacgagggctgcacctcgcaggtgccgcgtgggaccctggcagagcaccggcagcattgccagcaagggtcccagcagcgctgccccctgggctgcggggccaccctggacccggccgagcgtgctcgccacaactgctaccgggagctgcacaacgcctggagcgtgcgccaggagcgccgtcggcccctgctgctgtccctcctgcggcgtgtgcgctggctggaccaagccaccagtgtcgttcgtagagagctggcggagctcagcaacttcctggaggaagacaccgctctgctggagggtgccccacaggaggaggccgaggctgccccagaaggcaacgttggggctgaggtggtgggggagcccagggccaacataccttgtaaataggtaaataaaagcagacccccggcctgcctgcctctgtgcctgcggccctca

SEQ ID NO: 10016 - protein, 245 aa, Homo sapiens; identical to SEQ ID NO: 1546

SEQ ID NO: 10017 - DNA, 2546 bp, Homo sapiens
atcgcagcgcgccgggagtgtggcgttctgtgaagagttcggtgctaacctccctcacgcggcggtggctgccgggaccctagcaggtttcagctggagcggcggcggcggcaacatggcagagaccgcggccggagtgggccgcttcaagaccaactatgctgtggagcgcaaaattgagcctttctacaagggcggaaaagcacagctggaccagactggccagcacctcttctgcgtctgtggcaccagagtcaacattctggaagtggcctcgggggccgtgctgcggagtctggagcaggaggaccaggaggacatcactgcctttgacctcagccctgacaacgaggtgctggtgacagccagtcgggcattgctgctggctcagtgggcctggcaagagggcagcgttacccgcctgtggaaggcgatacacacggcccccgtggccaccatggccttcgaccccacctccactctgctagccacaggtggctgtgatggggccgtgcgcgtctgggacatcgtgcggcactacgggacacaccacttccgaggctcgcccggtgtcgtgcacctagtggccttccacccggaccctacacgcctgctgctcttctcctcggccacggatgccgccatccgcgtgtggtcactgcaggaccggtcatgcctggctgtgctgactgcccactacagcgccgtcacctcactggccttcagcgccgacggccacaccatgctcagctccggccgtgacaagatatgtatcatctgggaccttcagagctgccaggccacgaggaccgtgcctgtgtttgagagcgtggaggctgctgtgctgttgccagaggagccagtgtcccagctgggtgtgaagtccccagggctgtactttctgacagctggcgaccaaggcactctgcgcgtgtgggaggcagcttctgggcagtgtgtgtacacgcaggcccagccgccgggccctgggcaggagctgacccactgcaccctggcacacaccgccggcgtggtcctcaccgccaccgccgaccacaacctgttgctctacgaggctcgctccctgcggctgcagaaacagttcgctggctacagtgaggaggttttggatgtccggtttcttgggcccgaggactcccacgttgtcgtggcctccaatagcccctgcctaaaagtgtttgagctgcagacgtcagcctgccagatcctccacggccacacggatatcgtcctggccctggatgtgttccggaaggggtggctctttgccagctgtgccaaggatcagagcgtccgtatctggagaatgaacaaggctggccaggtgatgtgcgtggctcagggttccggtcacacacacagtgtgggcaccgtctgctgctctaggctgaaggagtccttcctggtgacaggcagccaggactgcactgtgaagctgtggcctcttcccaaagccttgctgtccaagaacacagccccagacaacggccctatcctcctgcaggcccagaccactcagcgctgccatgataaggacatcaacagcgtggctattgcccccaacgacaagctgctggccacaggctcacaggaccgcacggccaagctctgggccctgccacagtgccagctgctgggtgtcttctcaggccaccggcgtggcctctggtgcgtccagttctctcccatggaccaggtgctggccacggcctcagctgatggcaccatcaagctctgggcactccaggacttcagctgtctcaagacatttgaggggcacgatgcttctgtgctgaaggtggcctttgtgagccgtggcacgcagctgctgtccagcggttcggatggcctcgtgaagctctggaccatcaagaacaacgagtgtgtgcggacgctggatgcccacgaggacaaggtctgggggctgcactgcagccggctggacgaccacgccctcactggggccagtgactcccgagtcatcctctggaaggatgtgaccgaggcggagcaggcagaggagcaggccaggcaagaggagcaggtggtcaggcagcaagagctggacaacctgctgcatgagaagcggtacctgcgggcgctgggcctggccatctccctggatcggccccacaccgtgctgactgtcatccaggccatccggagggaccctgaggcctgcgagaagctggaagccaccatgctccgactgcggcgcgaccagaaagaggccctgctgcgcttctgcgtcacgtggaacaccaactcgcggcactgccacgaggcccaggccgtgctgggtgtgctcttgaggcgagaggcccccgaggagctgctggcctacgaaggcgtgcgggcagcgcttgaggccctgctgccctacactgagcggcactttcagcggctcagcaggaccctccaggccgccgctttcttggacttcctgtggcacaacatgaagctccctgtgccggccgccgcccccaccccctgggaaacccataaaggcgcactgccctagccgg

SEQ ID NO: 10018 - protein, 808 aa, Homo sapiens; identical to SEQ ID NO: 1548

SEQ ID NO: 10019 - DNA, 2607 bp, Homo sapiens
atcgcagcgcgccgggagtgtggcgttctgtgaagagttcggtgctaacctccctcacgcggcggtggctgccgggaccctagcaggtttcagctggagcggcggcggcggcaacatggcagagaccgcggccggagtgggccgcttcaagaccaactatgctgtggagcgcaaaattgagcctttctacaagggcggaaaagcacagctggaccagactggccagcacctcttctgcgtctgtggcaccagagtcaacattctggaagtggcctcgggggccgtgctgcggagtctggagcaggaggaccaggaggacatcactgcctttgacctcagccctgacaacgaggtgctggtgacagccagtcgggcattgctgctggctcagtgggcctggcaagagggcagcgttacccgcctgtggaaggcgatacacacggcccccgtggccaccatggccttcgaccccacctccactctgctagccacaggtggctgtgatggggccgtgcgcgtctgggacatcgtgcggcactacgggacacaccacttccgaggctcgcccggtgtcgtgcacctagtggccttccacccggaccctacacgcctgctgctcttctcctcggccacggatgccgccatccgcgtgtggtcactgcaggaccggtcatgcctggctgtgctgactgcccactacagcgccgtcacctcactggccttcagcgccgacggccacaccatgctcagctccggccgtgacaagatatgtatcatctgggaccttcagagctgccaggccacgaggaccgtgcctgtgtttgagagcgtggaggctgctgtgctgttgccagaggagccagtgtcccagctgggtgtgaagtccccagggctgtactttctgacagctggcgaccaaggcactctgcgcgtgtgggaggcagcttctgggcagtgtgtgtacacgcaggcccagccgccgggccctgggcaggagctgacccactgcaccctggcacacaccgccggcgtggtcctcaccgccaccgccgaccacaacctgttgctctacgaggctcgctccctgcggctgcagaaacagttcgctggctacagtgaggaggttttggatgtccggtttcttgggcccgaggactcccacgttgtcgtggcctccaatagcccctgcctaaaagtgtttgagctgcagacgtcagcctgccagatcctccacggccacacggatatcgtcctggccctggatgtgttccggaaggggtggctctttgccagctgtgccaaggatcagagcgtccgtatctggagaatgaacaaggctggccaggtgatgtgcgtggctcagggttccggtcacacacacagtgtgggcaccgtctgctgctctaggctgaaggagtccttcctggtgacaggcagccaggactgcactgtgaagctgtggcctcttcccaaagccttgctgtccaagaacacagccccagacaacggccctatcctcctgcaggcccagaccactcagcgctgccatgataaggacatcaacagcgtggctattgcccccaacgacaagctgctggccacaggctcacaggaccgcacggccaagctctgggccctgccacagtgccagctgctgggtgtcttctcaggccaccggcgtggcctctggtgcgtccagttctctcccatggaccaggtgctggccacggcctcagctgatggcaccatcaagctctgggcactccaggacttcagctgtctcaagacatttgaggggcacgatgcttctgtgctgaaggtggcctttgtgagccgtggcacgcagctgctgtccagcggttcggatggcctcgtgaagctctggaccatcaagaacaacgagtgtgtgcggacgctggatgcccacgaggacaaggtctgggggctgcactgcagccggctggacgaccacgccctcactggggccagtgactcccgagtcatcctctggaaggatgtgaccgaggcggagcaggcagaggagcaggccaggcaagaggagcaggtggtcaggcagcaagagctggacaacctgctgcatgagaagcggtacctgcgggcgctgggcctggccatctccctggatcggccccacaccgtgctgactgtcatccaggccatccggagggaccctgaggcctgcgagaagctggaagccaccatgctccgactgcggcgcgaccagaaagaggccctgctgcgcttctgcgtcacgtggaacaccaactcgcggcactgccacgaggcccaggccgtgctgggtgtgctcttgaggcgagaggcccccgaggagctgctggcctacgaaggcgtgcgggcagcgcttgaggccctgctgccctacactgagcggcactttcagcggctcagcaggaccctccaggccgccgctttcttggacttcctgtggcacaacatgaagctccctgtgccggccgccgcccccaccccctgggaaacccataaaggcgcactgccctagccggtccggcctctctccagtccatcctgaacccctggaaaacccataaaggccgctctcctggc

SEQ ID NO: 10020 - protein, 808 aa, Homo sapiens; identical to SEQ ID NO: 1548

SEQ ID NO: 10021 - DNA, 3286 bp, Homo sapiens
atcgcagcgcgccgggagtgtggcgttctgtgaagagttcggtgctaacctccctcacgcggcggtggctgccgggaccctagcaggtttcagctggagcggcggcggcggcaacatggcagagaccgcggccggagtgggccgcttcaagaccaactatgctgtggagcgcaaaattgagcctttctacaagggcggaaaagcacagctggaccagactggccagcacctcttctgcgtctgtggcaccagagtcaacattctggaagtggcctcgggggccgtgctgcggagtctggagcaggaggaccaggaggacatcactgcctttgacctcagccctgacaacgaggtgctggtgacagccagtcgggcattgctgctggctcagtgggcctggcaagagggcagcgttacccgcctgtggaaggcgatacacacggcccccgtggccaccatggccttcgaccccacctccactctgctagccacaggtggctgtgatggggccgtgcgcgtctgggacatcgtgcggcactacgggacacaccacttccgaggctcgcccggtgtcgtgcacctagtggccttccacccggaccctacacgcctgctgctcttctcctcggccacggatgccgccatccgcgtgtggtcactgcaggaccggtcatgcctggctgtgctgactgcccactacagcgccgtcacctcactggccttcagcgccgacggccacaccatgctcagctccggccgtgacaagatatgtatcatctgggaccttcagagctgccaggccacgaggaccgtgcctgtgtttgagagcgtggaggctgctgtgctgttgccagaggagccagtgtcccagctgggtgtgaagtccccagggctgtactttctgacagctggcgaccaaggcactctgcgcgtgtgggaggcagcttctgggcagtgtgtgtacacgcaggcccagccgccgggccctgggcaggagctgacccactgcaccctggcacacaccgccggcgtggtcctcaccgccaccgccgaccacaacctgttgctctacgaggctcgctccctgcggctgcagaaacagttcgctggctacagtgaggaggttttggatgtccggtttcttgggcccgaggactcccacgttgtcgtggcctccaatagcccctgcctaaaagtgtttgagctgcagacgtcagcctgccagatcctccacggccacacggatatcgtcctggccctggatgtgttccggaaggggtggctctttgccagctgtgccaaggatcagagcgtccgtatctggagaatgaacaaggctggccaggtgatgtgcgtggctcagggttccggtcacacacacagtgtgggcaccgtctgctgctctaggctgaaggagtccttcctggtgacaggcagccaggactgcactgtgaagctgtggcctcttcccaaagccttgctgtccaagaacacagccccagacaacggccctatcctcctgcaggcccagaccactcagcgctgccatgataaggacatcaacagcgtggctattgcccccaacgacaagctgctggccacaggctcacaggaccgcacggccaagctctgggccctgccacagtgccagctgctgggtgtcttctcaggccaccggcgtggcctctggtgcgtccagttctctcccatggaccaggtgctggccacggcctcagctgatggcaccatcaagctctgggcactccaggacttcagctgtctcaagacatttgaggggcacgatgcttctgtgctgaaggtggcctttgtgagccgtggcacgcagctgctgtccagcggttcggatggcctcgtgaagctctggaccatcaagaacaacgagtgtgtgcggacgctggatgcccacgaggacaaggtctgggggctgcactgcagccggctggacgaccacgccctcactggggccagtgactcccgagtcatcctctggaaggatgtgaccgaggcggagcaggcagaggagcaggccaggcaagaggagcaggtggtcaggcagcaagagctggacaacctgctgcatgagaagcggtacctgcgggcgctgggcctggccatctccctggatcggccccacaccgtgctgactgtcatccaggccatccggagggaccctgaggcctgcgagaagctggaagccaccatgctccgactgcggcgcgaccagaaagaggccctgctgcgcttctgcgtcacgtggaacaccaactcgcggcactgccacgaggcccaggccgtgctgggtgtgctcttgaggcgagaggcccccgaggagctgctggcctacgaaggcgtgcgggcagcgcttgaggccctgctgccctacactgagcggcactttcagcggctcagcaggaccctccaggccgccgctttcttggacttcctgtggcacaacatgaagctccctgtgccggccgccgcccccaccccctgggaaacccataaaggcgcactgccctagccggtccggcctctctccagtccatcctgaacccctggaaaacccataaaggccgctctcctggccggctctgtctctctggactgcagtccagccccccaccctggccaacaccctacctagccagccagaagggcactggagctgatggtctcggccctgccacgcccatcccgcaccctggcctggcagagatccagcccgcggctccgcacgcttagacggtgggggtcatgcagaacaagctttactcagaggaacagcaaatggccccctcccatccctgctggccagggagatccgccctccccgctcctccccagccctgggatggcgcggtccatcccctcatcgggatcctcgcgctcactgctccgtcgtggggtgcggcacagagtccacgcaccctcgagggcggccctggcgccgtgggcgccgctccagggccctgcgtgtgacggtgcagcagcggctctggatggcgcccggcgaaggtcgggtgggcacggtggggggaggggcggtggcctgggagggttcagggaagccccgggcctcacccgccgggtcgtctcctccacggaaccccgtcccgctcaggagagcgcccagcccttccggccgcagcagcaccgcggggagtaggcccgcccggtcgccgtacctgcgaggggcggggtgtggttagggccccgcccgcctcggctagcctgccctgcccacgcccgctcccgcgtacctgca

SEQ ID NO: 10022 - protein, 808 aa, Homo sapiens; identical to SEQ ID NO: 1548

SEQ ID NO: 10023 - DNA, 2586 bp, Homo sapiens
agcgcgccgggagtgtggcgttctgtgaagagttcggtgctaacctccctcacgcggcggtggctgccgggaccctagcaggtttcagctggagcggcggcggcggcaacatggcagagaccgcggccggagtgggccgcttcaagaccaagtgagcccggagagcgccgtcacctcactggccttcagcgccgacggccacaccatgctcagctccggccgtgacaagatatgtatcatctgggaccttcagagctgccaggccacgaggaccgtgcctgtgtttgagagcgtggaggctgctgtgctgttgccagaggagccagtgtcccagctgggtgtgaagtccccagggctgtactttctgacagctggcgaccaaggcactctgcgcgtgtgggaggcagcttctgggcagtgtgtgtacacgcaggcccagccgccgggccctgggcaggagctgacccactgcaccctggcacacaccgccggcgtggtcctcaccgccaccgccgaccacaacctgttgctctacgaggctcgctccctgcggctgcagaaacagttcgctggctacagtgaggaggttttggatgtccggtttcttgggcccgaggactcccacgttgtcgtggcctccaatagcccctgcctaaaagtgtttgagctgcagacgtcagcctgccagatcctccacggccacacgggtgagtggggccagcccacctgacaccctgggagccgcctcggtcccttgcttgcttcccttcccccgtcttgctgtgtgacctatacctccccacaacatctcagatatcgtcctggccctggatgtgttccggaaggggtggctctttgccagctgtgccaaggtgaggcaccctgagaggtaggggcaggggcaccaggcggggaggccacgcagtaggcccatggaccagcctctctcctcaactccctgtccccaggatcagagcgtccgtatctggagaatgaacaaggctggccaggtgatgtgcgtggctcagggttccggtcacacacacagtgtgggcaccgtctgctgctctaggtagtgagtcggggctgggcccaggggtgtcagggaggtggaggcccaggcctgccagcagggctgccgctcagggagctggggaggcagtggcagctttggcttgctctgaggctccagcccaaagatgtggaacagaacaggacaggagagtccctaggtgcctcggggtcagtcctcaccacccggtgctgcgggtggacaatgtagacagggcttgatcctacaggtgcctgggggtgacccaggccaacccgcatcctgggacaggccccgtggtctggaccgtgggctcccagcctggccctgtggggagctggccatcagggctggctggggctcagctgtgtctcctcctctcctgttgggtcacaggctgaaggagtccttcctggtgacaggcagccaggactgcactgtgaagctgtggcctcttcccaaagccttgctgtccaagaacacagccccagacaacggccctatcctcctgcaggcccagaccactcagcgctgccatgataaggacatcaacagcgtggctattgcccccaacgacaagctgctggccacaggctcacaggaccgcacggccaagctctgggccctgccacagtgccagctgctgggtgtcttctcaggccaccggcgtggcctctggtgcgtccagttctctcccatggaccaggtgctggccacggcctcagctgatggcaccatcaagctctgggcactccaggacttcagctgtctcaagacatttgaggggcacgatgcttctgtgctgaaggtggcctttgtgagccgtggcacgcagctgctgtccagcggttcggatggcctcgtgaagctctggaccatcaagaacaacgagtgtgtgcggacgctggatgcccacgaggacaaggtctgggggctgcactgcagccggctggacgaccacgccctcactggggccagtgactcccgagtcatcctctggaaggatgtgaccgaggcggagcaggcagaggagcaggccaggcaagaggagcaggtggtcaggcagcaagagctggacaacctgctgcatgagaagcggtacctgcgggcgctgggcctggccatctccctggatcggccccacaccgtgctgactgtcatccaggccatccggagggaccctgaggcctgcgagaagctggaagccaccatgctccgactgcggcgcgaccagaaagaggccctgctgcgcttctgcgtcacgtggaacaccaactcgcggcactgccacgaggcccaggccgtgctgggtgtgctcttgaggcgagaggcccccgaggagctgctggcctacgaaggcgtgcgggcagcgcttgaggccctgctgccctacactgagcggcactttcagcggctcagcaggaccctccaggccgccgctttcttggacttcctgtggcacaacatgaagctccctgtgccggccgccgcccccaccccctgggaaacccataaaggcgcactgccctagccgg

SEQ ID NO: 10024 - protein, 277 aa, Homo sapiens
MDQVLATASADGTIKLWALQDFSCLKTFEGHDASVLKVAFVSRGTQLLSSGSDGLVKLWTIKNNECVRTLDAHEDKVWGLHCSRLDDHALTGASDSRVILWKDVTEAEQAEEQARQEEQVVRQQELDNLLHEKRYLRALGLAISLDRPHTVLTVIQAIRRDPEACEKLEATMLRLRRDQKEALLRFCVTWNTNSRHCHEAQAVLGVLLRREAPEELLAYEGVRAALEALLPYTERHFQRLSRTLQAAAFLDFLWHNMKLPVPAAAPTPWETHKGALP

SEQ ID NO: 10025 - DNA, 2647 bp, Homo sapiens
agcgcgccgggagtgtggcgttctgtgaagagttcggtgctaacctccctcacgcggcggtggctgccgggaccctagcaggtttcagctggagcggcggcggcggcaacatggcagagaccgcggccggagtgggccgcttcaagaccaagtgagcccggagagcgccgtcacctcactggccttcagcgccgacggccacaccatgctcagctccggccgtgacaagatatgtatcatctgggaccttcagagctgccaggccacgaggaccgtgcctgtgtttgagagcgtggaggctgctgtgctgttgccagaggagccagtgtcccagctgggtgtgaagtccccagggctgtactttctgacagctggcgaccaaggcactctgcgcgtgtgggaggcagcttctgggcagtgtgtgtacacgcaggcccagccgccgggccctgggcaggagctgacccactgcaccctggcacacaccgccggcgtggtcctcaccgccaccgccgaccacaacctgttgctctacgaggctcgctccctgcggctgcagaaacagttcgctggctacagtgaggaggttttggatgtccggtttcttgggcccgaggactcccacgttgtcgtggcctccaatagcccctgcctaaaagtgtttgagctgcagacgtcagcctgccagatcctccacggccacacgggtgagtggggccagcccacctgacaccctgggagccgcctcggtcccttgcttgcttcccttcccccgtcttgctgtgtgacctatacctccccacaacatctcagatatcgtcctggccctggatgtgttccggaaggggtggctctttgccagctgtgccaaggtgaggcaccctgagaggtaggggcaggggcaccaggcggggaggccacgcagtaggcccatggaccagcctctctcctcaactccctgtccccaggatcagagcgtccgtatctggagaatgaacaaggctggccaggtgatgtgcgtggctcagggttccggtcacacacacagtgtgggcaccgtctgctgctctaggtagtgagtcggggctgggcccaggggtgtcagggaggtggaggcccaggcctgccagcagggctgccgctcagggagctggggaggcagtggcagctttggcttgctctgaggctccagcccaaagatgtggaacagaacaggacaggagagtccctaggtgcctcggggtcagtcctcaccacccggtgctgcgggtggacaatgtagacagggcttgatcctacaggtgcctgggggtgacccaggccaacccgcatcctgggacaggccccgtggtctggaccgtgggctcccagcctggccctgtggggagctggccatcagggctggctggggctcagctgtgtctcctcctctcctgttgggtcacaggctgaaggagtccttcctggtgacaggcagccaggactgcactgtgaagctgtggcctcttcccaaagccttgctgtccaagaacacagccccagacaacggccctatcctcctgcaggcccagaccactcagcgctgccatgataaggacatcaacagcgtggctattgcccccaacgacaagctgctggccacaggctcacaggaccgcacggccaagctctgggccctgccacagtgccagctgctgggtgtcttctcaggccaccggcgtggcctctggtgcgtccagttctctcccatggaccaggtgctggccacggcctcagctgatggcaccatcaagctctgggcactccaggacttcagctgtctcaagacatttgaggggcacgatgcttctgtgctgaaggtggcctttgtgagccgtggcacgcagctgctgtccagcggttcggatggcctcgtgaagctctggaccatcaagaacaacgagtgtgtgcggacgctggatgcccacgaggacaaggtctgggggctgcactgcagccggctggacgaccacgccctcactggggccagtgactcccgagtcatcctctggaaggatgtgaccgaggcggagcaggcagaggagcaggccaggcaagaggagcaggtggtcaggcagcaagagctggacaacctgctgcatgagaagcggtacctgcgggcgctgggcctggccatctccctggatcggccccacaccgtgctgactgtcatccaggccatccggagggaccctgaggcctgcgagaagctggaagccaccatgctccgactgcggcgcgaccagaaagaggccctgctgcgcttctgcgtcacgtggaacaccaactcgcggcactgccacgaggcccaggccgtgctgggtgtgctcttgaggcgagaggcccccgaggagctgctggcctacgaaggcgtgcgggcagcgcttgaggccctgctgccctacactgagcggcactttcagcggctcagcaggaccctccaggccgccgctttcttggacttcctgtggcacaacatgaagctccctgtgccggccgccgcccccaccccctgggaaacccataaaggcgcactgccctagccggtccggcctctctccagtccatcctgaacccctggaaaacccataaaggccgctctcctggc

SEQ ID NO: 10026 - protein, 277 aa, Homo sapiens; identical to SEQ ID NO: 10024

SEQ ID NO: 10027 - DNA, 3326 bp, Homo sapiens
agcgcgccgggagtgtggcgttctgtgaagagttcggtgctaacctccctcacgcggcggtggctgccgggaccctagcaggtttcagctggagcggcggcggcggcaacatggcagagaccgcggccggagtgggccgcttcaagaccaagtgagcccggagagcgccgtcacctcactggccttcagcgccgacggccacaccatgctcagctccggccgtgacaagatatgtatcatctgggaccttcagagctgccaggccacgaggaccgtgcctgtgtttgagagcgtggaggctgctgtgctgttgccagaggagccagtgtcccagctgggtgtgaagtccccagggctgtactttctgacagctggcgaccaaggcactctgcgcgtgtgggaggcagcttctgggcagtgtgtgtacacgcaggcccagccgccgggccctgggcaggagctgacccactgcaccctggcacacaccgccggcgtggtcctcaccgccaccgccgaccacaacctgttgctctacgaggctcgctccctgcggctgcagaaacagttcgctggctacagtgaggaggttttggatgtccggtttcttgggcccgaggactcccacgttgtcgtggcctccaatagcccctgcctaaaagtgtttgagctgcagacgtcagcctgccagatcctccacggccacacgggtgagtggggccagcccacctgacaccctgggagccgcctcggtcccttgcttgcttcccttcccccgtcttgctgtgtgacctatacctccccacaacatctcagatatcgtcctggccctggatgtgttccggaaggggtggctctttgccagctgtgccaaggtgaggcaccctgagaggtaggggcaggggcaccaggcggggaggccacgcagtaggcccatggaccagcctctctcctcaactccctgtccccaggatcagagcgtccgtatctggagaatgaacaaggctggccaggtgatgtgcgtggctcagggttccggtcacacacacagtgtgggcaccgtctgctgctctaggtagtgagtcggggctgggcccaggggtgtcagggaggtggaggcccaggcctgccagcagggctgccgctcagggagctggggaggcagtggcagctttggcttgctctgaggctccagcccaaagatgtggaacagaacaggacaggagagtccctaggtgcctcggggtcagtcctcaccacccggtgctgcgggtggacaatgtagacagggcttgatcctacaggtgcctgggggtgacccaggccaacccgcatcctgggacaggccccgtggtctggaccgtgggctcccagcctggccctgtggggagctggccatcagggctggctggggctcagctgtgtctcctcctctcctgttgggtcacaggctgaaggagtccttcctggtgacaggcagccaggactgcactgtgaagctgtggcctcttcccaaagccttgctgtccaagaacacagccccagacaacggccctatcctcctgcaggcccagaccactcagcgctgccatgataaggacatcaacagcgtggctattgcccccaacgacaagctgctggccacaggctcacaggaccgcacggccaagctctgggccctgccacagtgccagctgctgggtgtcttctcaggccaccggcgtggcctctggtgcgtccagttctctcccatggaccaggtgctggccacggcctcagctgatggcaccatcaagctctgggcactccaggacttcagctgtctcaagacatttgaggggcacgatgcttctgtgctgaaggtggcctttgtgagccgtggcacgcagctgctgtccagcggttcggatggcctcgtgaagctctggaccatcaagaacaacgagtgtgtgcggacgctggatgcccacgaggacaaggtctgggggctgcactgcagccggctggacgaccacgccctcactggggccagtgactcccgagtcatcctctggaaggatgtgaccgaggcggagcaggcagaggagcaggccaggcaagaggagcaggtggtcaggcagcaagagctggacaacctgctgcatgagaagcggtacctgcgggcgctgggcctggccatctccctggatcggccccacaccgtgctgactgtcatccaggccatccggagggaccctgaggcctgcgagaagctggaagccaccatgctccgactgcggcgcgaccagaaagaggccctgctgcgcttctgcgtcacgtggaacaccaactcgcggcactgccacgaggcccaggccgtgctgggtgtgctcttgaggcgagaggcccccgaggagctgctggcctacgaaggcgtgcgggcagcgcttgaggccctgctgccctacactgagcggcactttcagcggctcagcaggaccctccaggccgccgctttcttggacttcctgtggcacaacatgaagctccctgtgccggccgccgcccccaccccctgggaaacccataaaggcgcactgccctagccggtccggcctctctccagtccatcctgaacccctggaaaacccataaaggccgctctcctggccggctctgtctctctggactgcagtccagccccccaccctggccaacaccctacctagccagccagaagggcactggagctgatggtctcggccctgccacgcccatcccgcaccctggcctggcagagatccagcccgcggctccgcacgcttagacggtgggggtcatgcagaacaagctttactcagaggaacagcaaatggccccctcccatccctgctggccagggagatccgccctccccgctcctccccagccctgggatggcgcggtccatcccctcatcgggatcctcgcgctcactgctccgtcgtggggtgcggcacagagtccacgcaccctcgagggcggccctggcgccgtgggcgccgctccagggccctgcgtgtgacggtgcagcagcggctctggatggcgcccggcgaaggtcgggtgggcacggtggggggaggggcggtggcctgggagggttcagggaagccccgggcctcacccgccgggtcgtctcctccacggaaccccgtcccgctcaggagagcgcccagcccttccggccgcagcagcaccgcggggagtaggcccgcccggtcgccgtacctgcgaggggcggggtgtggttagggccccgcccgcctcggctagcctgccctgcccacgcccgctcccgcgtacctgca

SEQ ID NO: 10028 - protein, 277 aa, Homo sapiens; identical to SEQ ID NO: 10024

SEQ ID NO: 10029 - DNA, 1105 bp, Homo sapiens
gcgcgccgggagtgtggcgttctgtgaagagttcggtgctaacctccctcacgcggcggtggctgccgggaccctagcaggtttcagctggagcggcggcggcggcaacatggcagagaccgcggccggagtgggccgcttcaagaccaactatgctgtggagcgcaaaattgagcctttctacaagggcggaaaagcacagctggaccagactggccagcacctcttctgcgtctgtggcaccagagtcaacattctggaagtggcctcgggggccgtgctgcggagtctggagcaggaggaccaggaggacatcactgcctttgacctcagccctgacaacgaggtgctggtgacagccagtcgggcattgctgctggctcagtgggcctggcaagagggcagcgttacccgcctgtggaaggcgatacacacggcccccgtggccaccatggccttcgaccccacctccactctgctagccacaggtggctgtgatggggccgtgcgcgtctgggacatcgtgcggcactacgggacacaccacttccgaggctcgcccggtgtcgtgcacctagtggccttccacccggaccctacacgcctgctgctcttctcctcggccacggatgccgccatccgcgtgtggtcactgcaggaccggtcatgcctggctgtgctgactgcccactacagcgccgtcacctcactggccttcagcgccgacggccacaccatgctcagctccggccgtgacaagatatgtatcatctgggaccttcagagctgccaggccacgaggaccgtgcctgtgtttgagagcgtggaggctgctgtgctgttgccagaggagccagtgtcccagctgggtgtgaagtccccagggctgtactttctgacagctggcgaccaaggtgtgttgggccgggacatgggcaggcggtaggggctggggaaggcctcttctgggcagtgtgtgtacacgcaggcccagccgccgggccctgggcaggagctgacccactgcaccctggcacacaccgccggcgtggtcctcaccgccaccgccgaccacaacctgttgctctacgaggctcgctccctg

SEQ ID NO: 10030 - protein, 278 aa, Homo sapiens
MAETAAGVGRFKTNYAVERKIEPFYKGGKAQLDQTGQHLFCVCGTRVNILEVASGAVLRSLEQEDQEDITAFDLSPDNEVLVTASRALLLAQWAWQEGSVTRLWKAIHTAPVATMAFDPTSTLLATGGCDGAVRVWDIVRHYGTHHFRGSPGVVHLVAFHPDPTRLLLFSSATDAAIRVWSLQDRSCLAVLTAHYSAVTSLAFSADGHTMLSSGRDKICIIWDLQSCQATRTVPVFESVEAAVLLPEEPVSQLGVKSPGLYFLTAGDQGVLGRDMGRR

SEQ ID NO: 10031 - DNA, 849 bp, Homo sapiens
cgggagtgtggcgttctgtgaagagttcggtgctaacctccctcacgcggcggtggctgccgggaccctagcaggtttcagctggagcggcggcggcggcaacatggcagagaccgcggccggagtgggccgcttcaagaccaactatgctgtggagcgcaaaattgagcctttctacaagggcggaaaagcacagctggaccagactggccagcacctcttctgcgtctgtggcaccagagtcaacattctggaagtggcctcgggggccgtgctgcggagtctggagcaggaggaccaggaggacatcactgcctttgacctcagccctgacaacgaggtgctggtgacagccagtcgggcattgctgctggctcagtgggcctggcaagagggcagcgttacccgcctgtggaaggcgatacacacggcccccgtggccaccatggccttcgaccccacctccactctgctagccacaggtggctgtgatggggccgtgcgcgtctgggacatcgtgcggcactacgggacacaccacttccgaggctcgcccggtgtcgtgcacctagtggccttccacccggaccctacacgcctgctgctcttctcctcggccacggatgccgccatccgcgtgtggtcactgcaggaccggtcatgcctggctgtgctgactgcccactacagcgccgtcacctcactggccttcagcgccgacggccacaccatgctcagctccggccgtgacaagatatgtatcatctgggaccttcagagctgccaggccacgaggaccgtgcctgtgtttgaggtggggatgcctggaggccagggctggttgagttg

SEQ ID NO: 10032 - protein, 247 aa, Homo sapiens
MAETAAGVGRFKTNYAVERKIEPFYKGGKAQLDQTGQHLFCVCGTRVNILEVASGAVLRSLEQEDQEDITAFDLSPDNEVLVTASRALLLAQWAWQEGSVTRLWKAIHTAPVATMAFDPTSTLLATGGCDGAVRVWDIVRHYGTHHFRGSPGVVHLVAFHPDPTRLLLFSSATDAAIRVWSLQDRSCLAVLTAHYSAVTSLAFSADGHTMLSSGRDKICIIWDLQSCQATRTVPVFEVGMPGGQGWL

SEQ ID NO: 10033 - DNA, 2599 bp, Homo sapiens
gttcggtgctaacctccctcacgcggcggtggctgccgggaccctagcaggtttcagctggagcggcggcggcggcaacatggcagagaccgcggccggagtgggccgcttcaagaccaactatgctgtggagcgcaaaattgagcctttctacaagggcggaaaagcacaggtaccagcctggggaagggcagtggggcgggcagccagaggccgcggggggtgctgaatgttgcctggctgagacctctctgtccccagctggaccagactggccagcacctcttctgcgtctgtggcaccagagtcaacattctggaagtggcctcgggggccgtgctgcggagtctggagcaggaggaccaggaggacatcactgcctttgacctcagccctgacaacgaggtgctggtgacagccagtcgggcattgctgctggctcagtgggcctggcaagagggcagcgttacccgcctgtggaaggcgatacacacggcccccgtggccaccatggccttcgaccccacctccactctgctagccacaggtggctgtgatggggccgtgcgcgtctgggacatcgtgcggcactacgggacacaccacttccgaggctcgcccggtgtcgtgcacctagtggccttccacccggaccctacacgcctgctgctcttctcctcggccacggatgccgccatccgcgtgtggtcactgcaggaccggtcatgcctggctgtgctgactgcccactacagcgccgtcacctcactggccttcagcgccgacggccacaccatgctcagctccggccgtgacaagatatgtatcatctgggaccttcagagctgccaggccacgaggaccgtgcctgtgtttgagagcgtggaggctgctgtgctgttgccagaggagccagtgtcccagctgggtgtgaagtccccagggctgtactttctgacagctggcgaccaaggcactctgcgcgtgtgggaggcagcttctgggcagtgtgtgtacacgcaggcccagccgccgggccctgggcaggagctgacccactgcaccctggcacacaccgccggcgtggtcctcaccgccaccgccgaccacaacctgttgctctacgaggctcgctccctgcggctgcagaaacagttcgctggctacagtgaggaggttttggatgtccggtttcttgggcccgaggactcccacgttgtcgtggcctccaatagcccctgcctaaaagtgtttgagctgcagacgtcagcctgccagatcctccacggccacacggatatcgtcctggccctggatgtgttccggaaggggtggctctttgccagctgtgccaaggatcagagcgtccgtatctggagaatgaacaaggctggccaggtgatgtgcgtggctcagggttccggtcacacacacagtgtgggcaccgtctgctgctctaggctgaaggagtccttcctggtgacaggcagccaggactgcactgtgaagctgtggcctcttcccaaagccttgctgtccaagaacacagccccagacaacggccctatcctcctgcaggcccagaccactcagcgctgccatgataaggacatcaacagcgtggctattgcccccaacgacaagctgctggccacaggctcacaggaccgcacggccaagctctgggccctgccacagtgccagctgctgggtgtcttctcaggccaccggcgtggcctctggtgcgtccagttctctcccatggaccaggtgctggccacggcctcagctgatggcaccatcaagctctgggcactccaggacttcagctgtctcaagacatttgaggggcacgatgcttctgtgctgaaggtggcctttgtgagccgtggcacgcagctgctgtccagcggttcggatggcctcgtgaagctctggaccatcaagaacaacgagtgtgtgcggacgctggatgcccacgaggacaaggtctgggggctgcactgcagccggctggacgaccacgccctcactggggccagtgactcccgagtcatcctctggaaggatgtgaccgaggcggagcaggcagaggagcaggccaggcaagaggagcaggtggtcaggcagcaagagctggacaacctgctgcatgagaagcggtacctgcgggcgctgggcctggccatctccctggatcggccccacaccgtgctgactgtcatccaggccatccggagggaccctgaggcctgcgagaagctggaagccaccatgctccgactgcggcgcgaccagaaagaggccctgctgcgcttctgcgtcacgtggaacaccaactcgcggcactgccacgaggcccaggccgtgctgggtgtgctcttgaggcgagaggcccccgaggagctgctggcctacgaaggcgtgcgggcagcgcttgaggccctgctgccctacactgagcggcactttcagcggctcagcaggaccctccaggccgccgctttcttggacttcctgtggcacaacatgaagctccctgtgccggccgccgcccccaccccctgggaaacccataaaggcgcactgccctagccgg

SEQ ID NO: 10034 - protein, 694 aa, Homo sapiens
MAFDPTSTLLATGGCDGAVRVWDIVRHYGTHHFRGSPGVVHLVAFHPDPTRLLLFSSATDAAIRVWSLQDRSCLAVLTAHYSAVTSLAFSADGHTMLSSGRDKICIIWDLQSCQATRTVPVFESVEAAVLLPEEPVSQLGVKSPGLYFLTAGDQGTLRVWEAASGQCVYTQAQPPGPGQELTHCTLAHTAGVVLTATADHNLLLYEARSLRLQKQFAGYSEEVLDVRFLGPEDSHVVVASNSPCLKVFELQTSACQILHGHTDIVLALDVFRKGWLFASCAKDQSVRIWRMNKAGQVMCVAQGSGHTHSVGTVCCSRLKESFLVTGSQDCTVKLWPLPKALLSKNTAPDNGPILLQAQTTQRCHDKDINSVAIAPNDKLLATGSQDRTAKLWALPQCQLLGVFSGHRRGLWCVQFSPMDQVLATASADGTIKLWALQDFSCLKTFEGHDASVLKVAFVSRGTQLLSSGSDGLVKLWTIKNNECVRTLDAHEDKVWGLHCSRLDDHALTGASDSRVILWKDVTEAEQAEEQARQEEQVVRQQELDNLLHEKRYLRALGLAISLDRPHTVLTVIQAIRRDPEACEKLEATMLRLRRDQKEALLRFCVTWNTNSRHCHEAQAVLGVLLRREAPEELLAYEGVRAALEALLPYTERHFQRLSRTLQAAAFLDFLWHNMKLPVPAAAPTPWETHKGALP

SEQ ID NO: 10035 - DNA, 1587 bp, Homo sapiens
cagatggaggtctcaacatgttgcccagactggtctcgaactcctgagctcaagcaatccccctgcctcggcctcccaaagtacttggattacagctctgcctggaagtcccccaatccctgtgctcctgcccccagatcgtgggcttgggggacagcaagaaagctgcaaaggactcagctggggcggctccacaaggaccccacaggcttgaggtgttgccaggattctatcccagggggttttctgggtcccccagagccctctcaagcacggggaggcagaagggtcctcgcccatttcaggaatctgcagcctggaagccacagccatggcaggcccccgatacccagtttcagtgcaaggggcagccctggtgcagatcaagaggctccaaacgtttgccttctctgtgcgctggtcagacggcagcgacaccttcgtgcgcaggagttgggacgaattcaggcagctcaagaagaccctcaaggagaccttcccggtggaggcgggcctgctgcggagatctgaccgcgttctcccaaagcttctcgatgcaccactgttgggacgcgtggggcgcacgagccgcggcctggcgcgcctgcagctgttggaaacctattctcggaggctgctggcgactgcagagcgcgtggcacggagcccgacgatcactggcttcttcgcaccgcaacccctggacctggagcccgcgctgccacccggcagccgggtgatcctgcccaccccagaggagcagcctctttctcgcgctgcgggccgcctctccatccacagtctggaggctcagagcctgcgctgcctgcagcccttctgtacccaggacacgcgggataggccttttcaggcgcaggcccaggagagcctggacgtgctgctgcggcacccctcaggctggtggctggtggagaacgaagaccggcagaccgcctggtttccagcgccctacctggaggaggcggccccgggccaaggccgggagggaggcccgtccctagggagcagcggtccccagttctgtgcttcccgcgcctacgagagcagccgcgcagatgagctgtccgtgcccgcgggggcgcgcgtgcgcgtgttggaaacgtcagaccgcggctggtggctatgcaggtacggcgaccgggcgggcctactccccgcggtgctgctgcggccggaagggctgggcgctctcctgagcgggacggggttccgtggaggagacgacccggcgggtgaggcccggggcttccctgaaccctcccaggccaccgcccctccccccaccgtgcccacccgaccttcgccgggcgccatccagagccgctgctgcaccgtcacacgcagggccctggagcggcgcccacggcgccagggccgccctcgagggtgcgtggactctgtgccgcaccccacgacggagcagtgagcgcgaggatcccgatgaggggatggaccgcgccatcccagggctggggaggagcggggagggcggatctccctggccagcagggatgggagggggccatttgctgttcctctgagtaaagcttgttctgcatgaccccc

SEQ ID NO: 10036 - protein, 371 aa, Homo sapiens; identical to SEQ ID NO: 1552

SEQ ID NO: 10037 - DNA, 590 bp, Homo sapiens
tgtggccccgcggtgactccaaacacccactcccaccaggtccccagttctgtgcttcccgcgcctacgagagcagccgcgcagatgagctgtccgtgcccgcgggggcgcgcgtgcgcgtgttggaaacgtcagaccgcggctggtggctatgcaggtacggcgaccgggcgggcctactccccgcggtgctgctgcggccggaagggctgggcgctctcctgagcgggacggggttccgtggaggagacgacccggcgggtgaggcccggggcttccctgaaccctcccaggccaccgcccctccccccaccgtgcccacccgaccttcgccgggcgccatccagagccgctgctgcaccgtcacacgcagggccctggagcggcgcccacggcgccagggccgccctcgagggtgcgtggactctgtgccgcaccccacgacggagcagtgagcgcgaggatcccgatgaggggatggaccgcgccatcccagggctggggaggagcggggagggcggatctccctggccagcagggatgggagggggccatttgctgttcctctgagtaaagcttgttctgcatga

SEQ ID NO: 10038 - protein, 46 aa, Homo sapiens
MSCPCPRGRACACWKRQTAAGGYAGTATGRAYSPRCCCGRKGWALS

SEQ ID NO: 10039 - DNA, 887 bp, Homo sapiens
cttctcctccctcctcctgtggccagaggcaggcaggagggccccaggcagcagtcccgcctacccttcgccccttcttcagtcttgcacgcctccagggctggaaagctcattcttcttcttcctcccagcagctctgcctggaagtcccccaatccctgtgctcctgcccccagatcgtgggcttgggggacagcaagaaagctgcaaaggactcagctggggcggctccacaaggaccccacaggcttgaggtgttgccaggattctatcccagggggttttctgggtcccccagagccctctcaagcacggggaggcagaagggtcctcgcccatttcaggaatctgcagcctggaagccacagccatggcaggcccccgatacccagtttcagtgcaaggggcagccctggtgcagatcaagaggctccaaacgtttgccttctctgtgcgctggtcagacggcagcgacaccttcgtgcgcaggagttgggacgaattcaggcagctcaagaagaccctcaaggagaccttcccggtggaggcgggcctgctgcggagatctgaccgcgttctcccaaagcttctcgatgcaccactgttgggacgcgtggggcgcacgagccgcggcctggcgcgcctgcagctgttggaaacctattctcggaggctgctggcgactgcagagcgcgtggcacggagcccgacgatcactggcttcttcgcaccgcaacccctggacctggagcccgcgctgccacccggcagccgggtgatcctgcccaccccagaggagcagcctctttctcgcgctgcgggccgcctctccatccacagtctggaggctcagagcctgcgctgcctgcagcccttctgtacccagg

SEQ ID NO: 10040 - protein, 171 aa, Homo sapiens
MAGPRYPVSVQGAALVQIKRLQTFAFSVRWSDGSDTFVRRSWDEFRQLKKTLKETFPVEAGLLRRSDRVLPKLLDAPLLGRVGRTSRGLARLQLLETYSRRLLATAERVARSPTITGFFAPQPLDLEPALPPGSRVILPTPEEQPLSRAAGRLSIHSLEAQSLRCLQPFCT

SEQ ID NO: 10041 - DNA, 1054 bp, Homo sapiens
aagctcattcttcttcttcctcccagcagctctgcctggaagtcccccaatccctgtgctcctgcccccagatcgtgggcttgggggacagcaagaaagctgcaaaggactcagctggggcggctccacaaggaccccacaggcttgaggtgttgccaggattctatcccagggggttttctgggtcccccagagccctctcaagcacggggaggcagaagggtcctcgcccatttcaggaatctgcagcctggaagccacagccatggcaggcccccgatacccagtttcagtgcaaggggcagccctggtgcagatcaagaggctccaaacgtttgccttctctgtgcgctggtcagacggcagcgacaccttcgtgcgcaggagttgggacgaattcaggcagctcaaggtgagtgaccctgggccaccctgatgccgcggtggcggcttccccacgcggctgcctcccactggactgcctcccatcagtgactcccactggaggcccttcgtccctgctgaagctcccagcccctgccatccgggtgagggaccccgccctctcaagggtgcacagtgggctctggaagaccaatgccctggttcccgccctcagaagaccctcaaggagaccttcccggtggaggcgggcctgctgcggagatctgaccgcgttctcccaaagcttctcggtcaggccagcctgggtacgggagcggggaaggcggtggcttgcctgggggcgccagggaccagtgaagcccaaagcggcgtatcacagtacgtttttgtggtgccttaagatgcaccactgttgggacgcgtggggcgcacgagccgcggcctggcgcgcctgcagctgttggaaacctattctcggaggctgctggcgactgcagagcgcgtggcacggagcccgacgatcactggcttcttcgcaccgcaacccctggacctggagcccgcgctgccacccggcaggtgcctgactcgccccaaactcccagcatgcagcggcgtttggagctgggagaggtccagggtggggggg

SEQ ID NO: 10042 - protein, 56 aa, Homo sapiens
MAGPRYPVSVQGAALVQIKRLQTFAFSVRWSDGSDTFVRRSWDEFRQLKVSDPGPP

SEQ ID NO: 10043 - DNA, 825 bp, Homo sapiens
ggcccggcccccgcgagcacggcgcgcgcctccggctcctgtggccgcgcgctggcctggaggctgacctggaggctcatctggaggccgagctgacccggcaggccttgcgcgggcaacatggcggcgcccggcgagcggggccgcttccacggcgggaacctcttcttcctgccggggggcgcgcgctccgagatgatggacgacctggcgaccgacgcgcggggccggggcgcggggcggagagacgcggccgcctcggcctcgacgccagcccaggcgccgacctccgattctcctgtcgccgaggacgcctcccggaggcggccgtgccgggcctgcgtcgacttcaagacgtggatgcggacgcagcagaagcgggacaccaagtttagggaggactgcccgccggatcgcgaggaactgggccgccacagctgggctgtcctccacaccctggccgcctactaccccgacctgcccaccccagaacagcagcaagacatggcccagttcatacatttattttctaagttttacccctgtgaggagtgtgctgaagacctaagaaaaaggctgtgcaggaaccacccagacacccgcacccgggcatgcttcacacagtggctgtgccacctgcacaatgaagtgaaccgcaagctgggcaagcctgacttcgactgctcaaaagtggatgagcgctggcgcgacggctggaaggatggctcctgtgactagagggtggtcagccagagctcatgggacagctagccaggcatggttggataggggcagggcactcattaaagtgcatcacagccagag

SEQ ID NO: 10044 - protein, 205 aa, Homo sapiens; identical to SEQ ID NO: 1556

SEQ ID NO: 10045 - DNA, 2463 bp, Homo sapiens
ggcccggcccccgcgagcacggcgcgcgcctccggctcctgtggccgcgcgctggcctggaggctgacctggaggctcatctggaggccgagctgacccggcaggccttgcgcgggcaacatggcggcgcccggcgagcggggccgcttccacggcgggaacctcttcttcctgccggggggcgcgcgctccgagatgatggacgacctggcgaccgacgcgcggggccggggcgcggggcggagagacgcggccgcctcggcctcgacgccagcccaggcgccgacctccgattctcctgtcgccgaggacgcctcccggaggcggccgtgccgggcctgcgtcgacttcaagacgtggatgcggacgcagcagaagcgggacaccaagtttagggaggactgcccgccggatcgcgaggaactgggccgccacagctgggctgtcctccacaccctggccgcctactaccccgacctgcccaccccagaacagcagcaagacatggcccagttcatacatttattttctaagttttacccctgtgaggagtgtgctgaagacctaagaaaaaggctgtgcaggaaccacccagacacccgcacccgggcatgcttcacacagtggctgtgccacctgcacaatgaagtgaaccgcaagctgggcaagcctgacttcgactgctcaaaagtggatgagcgctggcgcgacggctggaaggatggctcctgtgactagagggtggtcagccagagctcatgggacagctagccaggcatggttggataggggcagggcactcattaaagtgcatcacagccagagcctgttgtgtctcagttgggtggtccccaggacactgcctgtggggacctgccctgcccctcttaggtttggagcagaagtggaggtgcccacagcaggtacccactggccccctcctcagtggagaccccaaggagctgcagctgaactgcaggggagggaaggaggagcagcctgggctgccccttgacattcaggatgtagcttcctgcccaccgcataccctggcgcctcactcctcacacgggaagacagcgggcctggctgggcatccctgtgcctgtccctggcggccaggccattgccttcccactatgcagccagggatgcccctgccccccatggctctgtgctgctcactttagggggctcaattctccactctgctcagtccctacagggaaagctcaggtcgggtctttctgagggtccaccagccatcctaccctctccctgcctggcacatgcctgccagcgttgtgtcatgcctgtccacaggggattcgtggggctcacttcatcagagtttgaagcccaaatgaaacgctgaagtgactgagaacctggcttcagtatattttctgctggggcttaataaagcagtagacagggcttgttccatccctctgtgctcagctgcatttcctgctggggtcctggttcctcaggagagagagaccacagggtgagagtgagccaggaacagcaaggacgttgattggttggggcaggggggccagagtagctgatgtaggagtactgggaggccagacggcacgaggtctccaaggccccagcaaagccatggcttctacccctagttcccctgacaggaagttcttggcgggtttggagccaggggatggcatggagtgatgtggctttgaagggtcctctggctgctgagctgggatgaggcaggtaagggtggaacaggaggggtggggaggaagccggggcagtcaccgagtgaccaccaagaggaagacccaccccacggcggggacagatgcggggtacgttaaagggagagccagagaactcatggggtgaggatggagtccgaggagactgctgggagccgccgtgtgggtcagagatggagaaggctgagtgcagcaaggtggggggtgactgggacccagcctttgggcctccccagccagagcagcccagcaacagtgtgtcctgtggtcataaaactccagggacctctatcctccaggagtctcagcctttccctgggcgcaggcccaccttggcatggccgcctcaggcctccatggagggagctgctatgtccccaccagattggccccgtgcggctgctggcttctgtagaggctgcccagaggggccaggtggcacaaataagagaggggagatggggggcagccaggagaggaggtgtcccttcctcgcccagacacagcgcgcttctctctggcctttcccgaggcctgtgagtgcctcaggaagcagctgggccctctgggaaggctgtgttcagcttaggaacataccgcctgtatctgctgtccctcccctgcccccctgccccccccaccgccttccctttttccctgtcttccttaaagtttcactcctgaataaaacttcactttgccttagaatctg

SEQ ID NO: 10046 - protein, 205 aa, Homo sapiens; identical to SEQ ID NO: 1556

SEQ ID NO: 10047 - DNA, 1045 bp, Homo sapiens
gctggcctggaggctgacctggaggctcatctggaggccgagctgacccggcaggccttgcgcgggcaacatggcggcgcccggcgagcggggccgcttccacggcgggaacctcttcttcctgccggggggcgcgcgctccgagatgatggacgacctggcgaccgacgcgcggggccggggcgcggggcggagagacgcggccgcctcggcctcgacgccagcccaggcgccgacctccgattctcctgtcgccgaggacgcctcccggaggcggccgtgccgggcctgcgtcgacttcaagacgtggatgcggacgcagcagaaggtgcagttccctgcccgatttctcccagccccgcgcagcccctgtccccgcccccgcccaggtaccccggcagagcttcccagggttgcctgtccctgaaccttgccccccgggtaggcccggccttacagccttcatccgcgcgtgggttggatcgtctgcaggactttggccggagtccagtgggccaccggctgggccgtacagtggggagctttgggcgcctttgttcggagaatgaactcactctcggtcggcctgcttccgcagcgggacaccaagtttagggaggactgcccgccggatcgcgaggaactgggccgccacagctgggctgtcctccacaccctggccgcctactaccccgacctgcccaccccagaacagcagcaagacatggcccagttcatacatttattttctaagttttacccctgtgaggagtgtgctgaagacctaagaaaaaggctgtgcaggaaccacccagacacccgcacccgggcatgcttcacacagtggctgtgccacctgcacaatgaagtgaaccgcaagctgggcaagcctgacttcgactgctcaaaagtggatgagcgctggcgcgacggctggaaggatggctcctgtgactagagggtggtcagccagagctcatgggacagctagccaggcatggttggataggggcagggcactcattaaagtgcatcacagccagag

SEQ ID NO: 10048 - protein, 130 aa, Homo sapiens
MNSLSVGLLPQRDTKFREDCPPDREELGRHSWAVLHTLAAYYPDLPTPEQQQDMAQFIHLFSKFYPCEECAEDLRKRLCRNHPDTRTRACFTQWLCHLHNEVNRKLGKPDFDCSKVDERWRDGWKDGSCD

SEQ ID NO: 10049 - DNA, 2683 bp, Homo sapiens
gctggcctggaggctgacctggaggctcatctggaggccgagctgacccggcaggccttgcgcgggcaacatggcggcgcccggcgagcggggccgcttccacggcgggaacctcttcttcctgccggggggcgcgcgctccgagatgatggacgacctggcgaccgacgcgcggggccggggcgcggggcggagagacgcggccgcctcggcctcgacgccagcccaggcgccgacctccgattctcctgtcgccgaggacgcctcccggaggcggccgtgccgggcctgcgtcgacttcaagacgtggatgcggacgcagcagaaggtgcagttccctgcccgatttctcccagccccgcgcagcccctgtccccgcccccgcccaggtaccccggcagagcttcccagggttgcctgtccctgaaccttgccccccgggtaggcccggccttacagccttcatccgcgcgtgggttggatcgtctgcaggactttggccggagtccagtgggccaccggctgggccgtacagtggggagctttgggcgcctttgttcggagaatgaactcactctcggtcggcctgcttccgcagcgggacaccaagtttagggaggactgcccgccggatcgcgaggaactgggccgccacagctgggctgtcctccacaccctggccgcctactaccccgacctgcccaccccagaacagcagcaagacatggcccagttcatacatttattttctaagttttacccctgtgaggagtgtgctgaagacctaagaaaaaggctgtgcaggaaccacccagacacccgcacccgggcatgcttcacacagtggctgtgccacctgcacaatgaagtgaaccgcaagctgggcaagcctgacttcgactgctcaaaagtggatgagcgctggcgcgacggctggaaggatggctcctgtgactagagggtggtcagccagagctcatgggacagctagccaggcatggttggataggggcagggcactcattaaagtgcatcacagccagagcctgttgtgtctcagttgggtggtccccaggacactgcctgtggggacctgccctgcccctcttaggtttggagcagaagtggaggtgcccacagcaggtacccactggccccctcctcagtggagaccccaaggagctgcagctgaactgcaggggagggaaggaggagcagcctgggctgccccttgacattcaggatgtagcttcctgcccaccgcataccctggcgcctcactcctcacacgggaagacagcgggcctggctgggcatccctgtgcctgtccctggcggccaggccattgccttcccactatgcagccagggatgcccctgccccccatggctctgtgctgctcactttagggggctcaattctccactctgctcagtccctacagggaaagctcaggtcgggtctttctgagggtccaccagccatcctaccctctccctgcctggcacatgcctgccagcgttgtgtcatgcctgtccacaggggattcgtggggctcacttcatcagagtttgaagcccaaatgaaacgctgaagtgactgagaacctggcttcagtatattttctgctggggcttaataaagcagtagacagggcttgttccatccctctgtgctcagctgcatttcctgctggggtcctggttcctcaggagagagagaccacagggtgagagtgagccaggaacagcaaggacgttgattggttggggcaggggggccagagtagctgatgtaggagtactgggaggccagacggcacgaggtctccaaggccccagcaaagccatggcttctacccctagttcccctgacaggaagttcttggcgggtttggagccaggggatggcatggagtgatgtggctttgaagggtcctctggctgctgagctgggatgaggcaggtaagggtggaacaggaggggtggggaggaagccggggcagtcaccgagtgaccaccaagaggaagacccaccccacggcggggacagatgcggggtacgttaaagggagagccagagaactcatggggtgaggatggagtccgaggagactgctgggagccgccgtgtgggtcagagatggagaaggctgagtgcagcaaggtggggggtgactgggacccagcctttgggcctccccagccagagcagcccagcaacagtgtgtcctgtggtcataaaactccagggacctctatcctccaggagtctcagcctttccctgggcgcaggcccaccttggcatggccgcctcaggcctccatggagggagctgctatgtccccaccagattggccccgtgcggctgctggcttctgtagaggctgcccagaggggccaggtggcacaaataagagaggggagatggggggcagccaggagaggaggtgtcccttcctcgcccagacacagcgcgcttctctctggcctttcccgaggcctgtgagtgcctcaggaagcagctgggccctctgggaaggctgtgttcagcttaggaacataccgcctgtatctgctgtccctcccctgcccccctgccccccccaccgccttccctttttccctgtcttccttaaagtttcactcctgaataaaacttcactttgccttagaatctg

SEQ ID NO: 10050 - protein, 130 aa, Homo sapiens; identical to SEQ ID NO: 10048

SEQ ID NO: 10051 - DNA, 547 bp, Homo sapiens
gacccggcaggccttgcgcgggcaacatggcggcgcccggcgagcggggccgcttccacggcgggaacctcttcttcctgccggggggcgcgcgctccgagatgatggacgacctggcgaccgacgcgcggggccggggcgcggggcggagagacgcggccgcctcggcctcgacgccagcccaggcgccgacctccgattctcctgtcgccgaggacgcctcccggaggcggccgtgccgggcctgcgtcgacttcaagacgtggatgcggacgcagcagaagcgggacaccaagtttagggaggactgcccgccggatcgcgaggaactgggccgccacagctgggctgtcctccacaccctggccgcctactaccccgacctgcccaccccagaacagcagcaagacatggcccagttcatacatttattttctaagttttacccctgtgaggagtgtgctgaagacctaagaaaaaggtaagatgtgtttgcacgcagcagagctttgcactggagcctgggcctggggctcctggctgacgt

SEQ ID NO: 10052 - protein, 152 aa, Homo sapiens [sequence omitted]

SEQ ID NO: 10053 - DNA, 532 bp, Homo sapiens
gacccggcaggccttgcgcgggcaacatggcggcgcccggcgagcggggccgcttccacggcgggaacctcttcttcctgccggggggcgcgcgctccgagatgatggacgacctggcgaccgacgcgcggggccggggcgcggggcggagagacgcggccgcctcggcctcgacgccagcccaggcgccgacctccgattctcctgtcgccgaggacgcctcccggaggcggccgtgccgggcctgcgtcgacttcaagacgtggatgcggacgcagcagaaggctgtgcaggaaccacccagacacccgcacccgggcatgcttcacacagtggctgtgccacctgcacaatgaagtgaaccgcaagctgggcaagcctgacttcgactgctcaaaagtggatgagcgctggcgcgacggctggaaggatggctcctgtgactagagggtggtcagccagagctcatgggacagctagccaggcatggttggataggggcagggcactcattaaagtgcatcacagccag

SEQ ID NO: 10054 - protein, 109 aa, Homo sapiens
MAAPGERGRFHGGNLFFLPGGARSEMMDDLATDARGRGAGRRDAAASASTPAQAPTSDSPVAEDASRRRPCRACVDFKTWMRTQQKAVQEPPRHPHPGMLHTVAVPPAQ

SEQ ID NO: 10055 - DNA, 2172 bp, Homo sapiens
gacccggcaggccttgcgcgggcaacatggcggcgcccggcgagcggggccgcttccacggcgggaacctcttcttcctgccggggggcgcgcgctccgagatgatggacgacctggcgaccgacgcgcggggccggggcgcggggcggagagacgcggccgcctcggcctcgacgccagcccaggcgccgacctccgattctcctgtcgccgaggacgcctcccggaggcggccgtgccgggcctgcgtcgacttcaagacgtggatgcggacgcagcagaaggctgtgcaggaaccacccagacacccgcacccgggcatgcttcacacagtggctgtgccacctgcacaatgaagtgaaccgcaagctgggcaagcctgacttcgactgctcaaaagtggatgagcgctggcgcgacggctggaaggatggctcctgtgactagagggtggtcagccagagctcatgggacagctagccaggcatggttggataggggcagggcactcattaaagtgcatcacagccagagcctgttgtgtctcagttgggtggtccccaggacactgcctgtggggacctgccctgcccctcttaggtttggagcagaagtggaggtgcccacagcaggtacccactggccccctcctcagtggagaccccaaggagctgcagctgaactgcaggggagggaaggaggagcagcctgggctgccccttgacattcaggatgtagcttcctgcccaccgcataccctggcgcctcactcctcacacgggaagacagcgggcctggctgggcatccctgtgcctgtccctggcggccaggccattgccttcccactatgcagccagggatgcccctgccccccatggctctgtgctgctcactttagggggctcaattctccactctgctcagtccctacagggaaagctcaggtcgggtctttctgagggtccaccagccatcctaccctctccctgcctggcacatgcctgccagcgttgtgtcatgcctgtccacaggggattcgtggggctcacttcatcagagtttgaagcccaaatgaaacgctgaagtgactgagaacctggcttcagtatattttctgctggggcttaataaagcagtagacagggcttgttccatccctctgtgctcagctgcatttcctgctggggtcctggttcctcaggagagagagaccacagggtgagagtgagccaggaacagcaaggacgttgattggttggggcaggggggccagagtagctgatgtaggagtactgggaggccagacggcacgaggtctccaaggccccagcaaagccatggcttctacccctagttcccctgacaggaagttcttggcgggtttggagccaggggatggcatggagtgatgtggctttgaagggtcctctggctgctgagctgggatgaggcaggtaagggtggaacaggaggggtggggaggaagccggggcagtcaccgagtgaccaccaagaggaagacccaccccacggcggggacagatgcggggtacgttaaagggagagccagagaactcatggggtgaggatggagtccgaggagactgctgggagccgccgtgtgggtcagagatggagaaggctgagtgcagcaaggtggggggtgactgggacccagcctttgggcctccccagccagagcagcccagcaacagtgtgtcctgtggtcataaaactccagggacctctatcctccaggagtctcagcctttccctgggcgcaggcccaccttggcatggccgcctcaggcctccatggagggagctgctatgtccccaccagattggccccgtgcggctgctggcttctgtagaggctgcccagaggggccaggtggcacaaataagagaggggagatggggggcagccaggagaggaggtgtcccttcctcgcccagacacagcgcgcttctctctggcctttcccgaggcctgtgagtgcctcaggaagcagctgggccctctgggaaggctgtgttcagcttaggaacataccgcctgtatctgctgtccctcccctgcccccctgccccccccaccgccttccctttttccctgtcttccttaaagtttcactcctgaataaaacttcactttgccttagaatctg

SEQ ID NO: 10056 - protein, 109 aa, Homo sapiens; identical to SEQ ID NO: 10054

SEQ ID NO: 10057 - DNA, 561 bp, Homo sapiens
gagatgatggacgacctggcgaccgacgcgcggggccggggcgcggggcggagagacgcggccgcctcggcctcgacgccagcccaggcgccgacctccgattctcctgtcgccgaggacgcctcccggaggcggccgtgccgggcctgcgtcgacttcaagacgtggatgcggacgcagcagaaggtgcaaccctggccgcctactaccccgacctgcccaccccagaacagcagcaagacatggcccagttcatacatttattttctaagttttacccctgtgaggagtgtgctgaagacctaagaaaaaggctgtgcaggaaccacccagacacccgcacccgggcatgcttcacacagtggctgtgccacctgcacaatgaagtgaaccgcaagctgggcaagcctgacttcgactgctcaaaagtggatgagcgctggcgcgacggctggaaggatggctcctgtgactagagggtggtcagccagagctcatgggacagctagccaggcatggttggataggggcagggcactcattaaagtgcatcacagccag

SEQ ID NO: 10058 - protein, 100 aa, Homo sapiens
MMDDLATDARGRGAGRRDAAASASTPAQAPTSDSPVAEDASRRRPCRACVDFKTWMRTQQKVQPWPPTTPTCPPQNSSKTWPSSYIYFLSFTPVRSVLKT

SEQ ID NO: 10059 - DNA, 2201 bp, Homo sapiens
gagatgatggacgacctggcgaccgacgcgcggggccggggcgcggggcggagagacgcggccgcctcggcctcgacgccagcccaggcgccgacctccgattctcctgtcgccgaggacgcctcccggaggcggccgtgccgggcctgcgtcgacttcaagacgtggatgcggacgcagcagaaggtgcaaccctggccgcctactaccccgacctgcccaccccagaacagcagcaagacatggcccagttcatacatttattttctaagttttacccctgtgaggagtgtgctgaagacctaagaaaaaggctgtgcaggaaccacccagacacccgcacccgggcatgcttcacacagtggctgtgccacctgcacaatgaagtgaaccgcaagctgggcaagcctgacttcgactgctcaaaagtggatgagcgctggcgcgacggctggaaggatggctcctgtgactagagggtggtcagccagagctcatgggacagctagccaggcatggttggataggggcagggcactcattaaagtgcatcacagccagagcctgttgtgtctcagttgggtggtccccaggacactgcctgtggggacctgccctgcccctcttaggtttggagcagaagtggaggtgcccacagcaggtacccactggccccctcctcagtggagaccccaaggagctgcagctgaactgcaggggagggaaggaggagcagcctgggctgccccttgacattcaggatgtagcttcctgcccaccgcataccctggcgcctcactcctcacacgggaagacagcgggcctggctgggcatccctgtgcctgtccctggcggccaggccattgccttcccactatgcagccagggatgcccctgccccccatggctctgtgctgctcactttagggggctcaattctccactctgctcagtccctacagggaaagctcaggtcgggtctttctgagggtccaccagccatcctaccctctccctgcctggcacatgcctgccagcgttgtgtcatgcctgtccacaggggattcgtggggctcacttcatcagagtttgaagcccaaatgaaacgctgaagtgactgagaacctggcttcagtatattttctgctggggcttaataaagcagtagacagggcttgttccatccctctgtgctcagctgcatttcctgctggggtcctggttcctcaggagagagagaccacagggtgagagtgagccaggaacagcaaggacgttgattggttggggcaggggggccagagtagctgatgtaggagtactgggaggccagacggcacgaggtctccaaggccccagcaaagccatggcttctacccctagttcccctgacaggaagttcttggcgggtttggagccaggggatggcatggagtgatgtggctttgaagggtcctctggctgctgagctgggatgaggcaggtaagggtggaacaggaggggtggggaggaagccggggcagtcaccgagtgaccaccaagaggaagacccaccccacggcggggacagatgcggggtacgttaaagggagagccagagaactcatggggtgaggatggagtccgaggagactgctgggagccgccgtgtgggtcagagatggagaaggctgagtgcagcaaggtggggggtgactgggacccagcctttgggcctccccagccagagcagcccagcaacagtgtgtcctgtggtcataaaactccagggacctctatcctccaggagtctcagcctttccctgggcgcaggcccaccttggcatggccgcctcaggcctccatggagggagctgctatgtccccaccagattggccccgtgcggctgctggcttctgtagaggctgcccagaggggccaggtggcacaaataagagaggggagatggggggcagccaggagaggaggtgtcccttcctcgcccagacacagcgcgcttctctctggcctttcccgaggcctgtgagtgcctcaggaagcagctgggccctctgggaaggctgtgttcagcttaggaacataccgcctgtatctgctgtccctcccctgcccccctgccccccccaccgccttccctttttccctgtcttccttaaagtttcactcctgaataaaacttcactttgccttagaatctg

SEQ ID NO: 10060 - protein, 100 aa, Homo sapiens; identical to SEQ ID NO: 10058

SEQ ID NO: 10061 - DNA, 611 bp, Homo sapiens
cccctgccccaaccaatcaacgtccttgctgttcctggctcactctcaccctgtggtctctctctcctgaggaaccaggaccccagcaggaaatgcagctgagcacagagggatggaacaagccctgtctactgctttattaagccccagcagaaaatatactgaagccaggttctcagtcacttcagcgtttcatttgggcttcaaactctgatgaagtgagccccacgaatcccctgtggacaggcatgacacaacgctggcaggcatgtgccaggcagggagagggtaggatggctggtggaccctcagaaagacccgacctgagctttccctgtagggactgagcagagtggagaattgagccccctaaagtgagcagcacagagccatggggggcaggggcatccctggctgcatagtgggaaggcaatggcctggccgccagggacaggcacagggatgcccagccaggcccgctgtcttcccgtgtgaggagcccaggctccagtgcaaagctctgctgcgtgcaaacacatcttacctttttcttaggtcttcagcacactcctcacaggggtaaaacttagaaaataaatgtatgaactggg

SEQ ID NO: 10062 - protein, 63 aa, Homo sapiens
MGGRGIPGCIVGRQWPGRQGQAQGCPARPAVFPCEEPRLQCKALLRANTSYLFLRSSAHSSQG

SEQ ID NO: 10063 - DNA, 570 bp, Homo sapiens
aacctgaggccggcgggggaggggccggcgaggatgagagaccccagcaggaaatgcagctgagcacagagggatggaacaagccctgtctactgctttattaagccccagcagaaaatatactgaagccaggttctcagtcacttcagcgtttcatttgggcttcaaactctgatgaagtgagccccacgaatcccctgtggacaggcatgacacaacgctggcaggcatgtgccaggcagggagagggtaggatggctggtggaccctcagaaagacccgacctgagctttccctgtagggactgagcagagtggagaattgagccccctaaagtgagcagcacagagccatggggggcaggggcatccctggctgcatagtgggaaggcaatggcctggccgccagggacaggcacagggatgcccagccaggcccgctgtcttcccgtgtgaggagtgaggcgccagggtatgcggtgggcaggaagctacatcctgaatgtcaaggggcagcccaggctgctcctccttccctcccctgcagttcagctgcagctccttggggtc

SEQ ID NO: 10064 - protein, 36 aa, Homo sapiens
MGGRGIPGCIVGRQWPGRQGQAQGCPARPAVFPCEE

SEQ ID NO: 10065 - DNA, 1966 bp, Homo sapiens
cctacccctttactccctcacccaagtgcccttcccagaggagcggactcctcctgtctgtcctcccggctctagcaaagtctgcgcccagcacccgagccccaccctgcccccggggacctggctggtgggttcctgaggatggtctccatctcgggaccggggcaggcaggtgttctccatcgccgtcttcgggcccatcgtcaacgagggctacgtgaacaccgacagcggccccgagctgcgctgcgtgttcaacgggaacgcgggcgcctgccgcttcggcgtcgcgctgggcctcggagccttcctcgcctgcgccgccttcctgctgctcgatgtgcgcttccagcaaatcagcagcgtccgcgaccgccggcgcgcggtgttgctggacctgggcttctcaggactctggtccttcctgtggttcgtgggcttctgcttcctcaccaatcagtggcagcgcacggcgccagggccggccacgacgcaggcgggggacgcggcgcgggccgccatcgccttcagcttcttctccatcctcagctgggtggcgctcaccgtgaaggccctgcagcggttccgcctgggcaccgacatgtcactcttcgccaccgaacagctgagcaccggggcgagccaggcctaccccggctatccggtgggcagcggcgtggagggcaccgagacctaccagagcccgcccttcaccgagaccctggacaccagccccaaagggtaccaggtgcccgcctactagcggctggcaggcacagaccagggctccaaggccaccccaccaacgcaggccccagggtctccgggacctcccttgggtccttccagctcagtgccgcggacagagtaggtggccgctttgcgccatccggggccaagagggggtggacccgcgtgtctgggctgcccctgccaagttcccccagtccctcagcacctggccccaggactgaggtcctgagaaggggatagcactgcccaggacgtgtgtccctagcctggaatggactggcctggggaaggctttcccctcttgggccacacctgctcactctggggttgggggtccagctgccctctacgatcaggtgcaggggctgcccaggacaaagcgggggcaggggaaagacaccaccctcgccccaagactggggatcctggccactgttcccatcccatgtccctgtgggtagtgactgtctcgtttctgtcatggtggtgcgtcccgtccggagccactctccactttctctcacaggctgctagaacagcccagccctgtcagtgttgtgatcatggtccagtcttcgggtttcacctcctagtactccacaagctgctcctctctctgtggccccggcccctgcccaggtgtgggtggttctggccaggaaggcacaaggtagctgtgggccaagacaccagccctgtcctagcccttcagtaagaccttgccaggagaggagaaggatgcctgggtgccaggcaagacaagcccctcagcaggagagaggcccagaggctccagctggccaccgtgccccacaagatggcccctgtgtggttccctttaccttggcttcctggcccagtccctgcctctccacctgcaccctgcttcctggcccagtcccaggttggagtccctctgcatagctgactactcatgcattgctcaaagctggcttttcacattaagtcaacaccaaacgtggttgccacatttcatcagacagacacctccctctggagatgcagttgagtgacaaccttgttacattgtagcctagaccaattctgtgtggatatttaagtgaacatgtttacaatttttgtatatatcactctctccctctcctgaaagaccagagattgtgtattttcagtgtcccatgttccgactgcaccttctttacaataaagactgtaactgagctgactgtga

SEQ ID NO: 10066 - protein, 283 aa, Homo sapiens
MVSISGPGQAGVLHRRLRAHRQRGLREHRQRPRAALRVQRERGRLPLRRRAGPRSLPRLRRLPAARCALPANQQRPRPPARGVAGPGLLRTLVLPVVRGLLLPHQSVAAHGARAGHDAGGGRGAGRHRLQLLLHPQLGGAHREGPAAVPPGHRHVTLRHRTAEHRGEPGLPRLSGGQRRGGHRDLPEPALHRDPGHQPQRVPGARLLAAGRHRPGLQGHPTNAGPRVSGTSLGSFQLSAADRVGGRFAPSGAKRGWTRVSGLPLPSSPSPSAPGPRTEVLRRG

SEQ ID NO: 10067 - DNA, 2051 bp, Homo sapiens
cgccgcggccggcgcgcgctcccgggaggcggcagcggctgcagcgttggtagcatcagcatcagcatcagcggcagcggcagcggcctcgggcggggccggccggacggacaggcggacagaaggcgccaggggcgcgcgtcccgcccgggccggccatggagggcgcctccttcggcgcgggccgcgcaggggccgccctggaccccgtgagctttgcgcggcggccccagaccctgctccgggtcgcgtcctgggtgttctccatcgccgtcttcgggcccatcgtcaacgagggctacgtgaacaccgacagcggccccgagctgcgctgcgtgttcaacgggaacgcgggcgcctgccgcttcggcgtcgcgctgggcctcggagccttcctcgcctgcgccgccttcctgctgctcgatgtgcgcttccagcaaatcagcagcgtccgcgaccgccggcgcgcggtgttgctggacctgggcttctcaggactctggtccttcctgtggttcgtgggcttctgcttcctcaccaatcagtggcagcgcacggcgccagggccggccacgacgcaggcgggggacgcggcgcgggccgccatcgccttcagcttcttctccatcctcagctgggtggcgctcaccgtgaaggccctgcagcggttccgcctgggcaccgacatgtcactcttcgccaccgaacagctgagcaccggggcgagccaggcctaccccggctatccggtgggcagcggcgtggagggcaccgagacctaccagagcccgcccttcaccgagaccctggacaccagccccaaagggtaccaggtgcccgcctactagcggctggcaggcacagaccagggctccaaggccaccccaccaacgcaggccccagggtctccgggacctcccttgggtccttccagctcagtgccgcggacagagtaggtggccgctttgcgccatccggggccaagagggggtggacccgcgtgtctgggctgcccctgccaagttcccccagtccctcagcacctggccccaggactgaggtcctgagaaggggatagcactgcccaggacgtgtgtccctagcctggaatggactggcctggggaaggctttcccctcttgggccacacctgctcactctggggttgggggtccagctgccctctacgatcaggtgcaggggctgcccaggacaaagcgggggcaggggaaagacaccaccctcgccccaagactggggatcctggccactgttcccatcccatgtccctgtgggtagtgactgtctcgtttctgtcatggtggtgcgtcccgtccggagccactctccactttctctcacaggctgctagaacagcccagccctgtcagtgttgtgatcatggtccagtcttcgggtttcacctcctagtactccacaagctgctcctctctctgtggccccggcccctgcccaggtgtgggtggttctggccaggaaggcacaaggtagctgtgggccaagacaccagccctgtcctagcccttcagtaagaccttgccaggagaggagaaggatgcctgggtgccaggcaagacaagcccctcagcaggagagaggcccagaggctccagctggccaccgtgccccacaagatggcccctgtgtggttccctttaccttggcttcctggcccagtccctgcctctccacctgcaccctgcttcctggcccagtcccaggttggagtccctctgcatagctgactactcatgcattgctcaaagctggcttttcacattaagtcaacaccaaacgtggttgccacatttcatcagacagacacctccctctggagatgcagttgagtgacaaccttgttacattgtagcctagaccaattctgtgtggatatttaagtgaacatgtttacaatttttgtatatatcactctctccctctcctgaaagaccagagattgtgtattttcagtgtcccatgttccgactgcaccttctttacaataaagactgtaactgagctgactgtga

SEQ ID NO: 10068 - protein, 229 aa, Homo sapiens; identical to SEQ ID NO: 1558

SEQ ID NO: 10069 - DNA, 1997 bp, Homo sapiens
gcggccggcgcgcgctcccgggaggcggcagcggctgcagcgttggtagcatcagcatcagcatcagcggcagcggcagcggcctcgggcggggccggccggacggacaggcggacagaaggcgccaggggcgcgcgtcccgcccgggccggccatggagggcgcctccttcggcgcgggccgcgcaggggccgccctggaccccgtgagctttgcgcggcggccccagaccctgctccgggtcgcgtcctgggtgttctccatcgccgtcttcgggcccatcgtcaacgagggctacgtgaacaccgacagcggccccgagctgcgctgcgtgttcaacgggaacgcgggcgcctgccgcttcggcgtcgcgctgggcctcggagccttcctcgcctgcgccgccttcctgctgctcgatgtgcgcttccagcaaatcagcagcgtccgcgaccgccggcgcgcggtgttgctggacctgggcttctcagtggcagcgcacggcgccagggccggccacgacgcaggcgggggacgcggcgcgggccgccatcgccttcagcttcttctccatcctcagctgggtggcgctcaccgtgaaggccctgcagcggttccgcctgggcaccgacatgtcactcttcgccaccgaacagctgagcaccggggcgagccaggcctaccccggctatccggtgggcagcggcgtggagggcaccgagacctaccagagcccgcccttcaccgagaccctggacaccagccccaaagggtaccaggtgcccgcctactagcggctggcaggcacagaccagggctccaaggccaccccaccaacgcaggccccagggtctccgggacctcccttgggtccttccagctcagtgccgcggacagagtaggtggccgctttgcgccatccggggccaagagggggtggacccgcgtgtctgggctgcccctgccaagttcccccagtccctcagcacctggccccaggactgaggtcctgagaaggggatagcactgcccaggacgtgtgtccctagcctggaatggactggcctggggaaggctttcccctcttgggccacacctgctcactctggggttgggggtccagctgccctctacgatcaggtgcaggggctgcccaggacaaagcgggggcaggggaaagacaccaccctcgccccaagactggggatcctggccactgttcccatcccatgtccctgtgggtagtgactgtctcgtttctgtcatggtggtgcgtcccgtccggagccactctccactttctctcacaggctgctagaacagcccagccctgtcagtgttgtgatcatggtccagtcttcgggtttcacctcctagtactccacaagctgctcctctctctgtggccccggcccctgcccaggtgtgggtggttctggccaggaaggcacaaggtagctgtgggccaagacaccagccctgtcctagcccttcagtaagaccttgccaggagaggagaaggatgcctgggtgccaggcaagacaagcccctcagcaggagagaggcccagaggctccagctggccaccgtgccccacaagatggcccctgtgtggttccctttaccttggcttcctggcccagtccctgcctctccacctgcaccctgcttcctggcccagtcccaggttggagtccctctgcatagctgactactcatgcattgctcaaagctggcttttcacattaagtcaacaccaaacgtggttgccacatttcatcagacagacacctccctctggagatgcagttgagtgacaaccttgttacattgtagcctagaccaattctgtgtggatatttaagtgaacatgtttacaatttttgtatatatcactctctccctctcctgaaagaccagagattgtgtattttcagtgtcccatgttccgactgcaccttctttacaataaagactgtaactgagctgactgtga

SEQ ID NO: 10070 - protein, 289 aa, Homo sapiens
MEGASFGAGRAGAALDPVSFARRPQTLLRVASWVFSIAVFGPIVNEGYVNTDSGPELRCVFNGNAGACRFGVALGLGAFLACAAFLLLDVRFQQISSVRDRRRAVLLDLGFSVAAHGARAGHDAGGGRGAGRHRLQLLLHPQLGGAHREGPAAVPPGHRHVTLRHRTAEHRGEPGLPRLSGGQRRGGHRDLPEPALHRDPGHQPQRVPGARLLAAGRHRPGLQGHPTNAGPRVSGTSLGSFQLSAADRVGGRFAPSGAKRGWTRVSGLPLPSSPSPSAPGPRTEVLRRG

SEQ ID NO: 10071 - DNA, 1266 bp, Homo sapiens
ggcgcgcgctcccgggaggcggcagcggctgcagcgttggtagcatcagcatcagcatcagcggcagcggcagcggcctcgggcggggccggccggacggacaggcggacagaaggcgccaggggcgcgcgtcccgcccgggccggccatggagggcgcctccttcggcgcgggccgcgcaggggccgccctggaccccgtgagctttgcgcggcggccccagaccctgctccgggtcgcgtcctgggtgttctccatcgccgtcttcgggcccatcgtcaacgagggctacgtgaacaccgacagcggccccgagctgcgctgcgtgttcaacgggaacgcgggcgcctgccgcttcggcgtcgcgctgggcctcggagccttcctcgcctgcgccgccttcctgctgctcgatgtgcgcttccagacaaagcgggggcaggggaaagacaccaccctcgccccaagactggggatcctggccactgttcccatcccatgtccctgtgggtagtgactgtctcgtttctgtcatggtggtgcgtcccgtccggagccactctccactttctctcacaggctgctagaacagcccagccctgtcagtgttgtgatcatggtccagtcttcgggtttcacctcctagtactccacaagctgctcctctctctgtggccccggcccctgcccaggtgtgggtggttctggccaggaaggcacaaggtagctgtgggccaagacaccagccctgtcctagcccttcagtaagaccttgccaggagaggagaaggatgcctgggtgccaggcaagacaagcccctcagcaggagagaggcccagaggctccagctggccaccgtgccccacaagatggcccctgtgtggttccctttaccttggcttcctggcccagtccctgcctctccacctgcaccctgcttcctggcccagtcccaggttggagtccctctgcatagctgactactcatgcattgctcaaagctggcttttcacattaagtcaacaccaaacgtggttgccacatttcatcagacagacacctccctctggagatgcagttgagtgacaaccttgttacattgtagcctagaccaattctgtgtggatatttaagtgaacatgtttacaatttttgtatatatcactctctccctctcctgaaagaccagagattgtgtattttcagtgtcccatgttccgactgcaccttctttacaataaagactgtaactgagctgactgtga

SEQ ID NO: 10072 - protein, 121 aa, Homo sapiens
MEGASFGAGRAGAALDPVSFARRPQTLLRVASWVFSIAVFGPIVNEGYVNTDSGPELRCVFNGNAGACRFGVALGLGAFLACAAFLLLDVRFQTKRGQGKDTTLAPRLGILATVPIPCPCG

SEQ ID NO: 10073 - DNA, 295 bp, Homo sapiens
tccgtttttcctgttctcgtgacctggaagcagggacggggtggggacggaattctccgaggggcaggagggggctacgggaaccgagaagcgcctccccttcccccgcacacacaccctcgggtctccttggcagggagcctgtcccctggcccccagttccagctgtgttctccatcgccgtcttcgggcccatcgtcaacgagggctacgtgaacaccgacagcggccccgagctgcgctgcgtgttcaacgggaacgcgggcgcctgccgcttcggcgtcgcgctgggcct

SEQ ID NO: 10074 - protein, 96 aa, Homo sapiens
RFSCSRDLEAGTGWGRNSPRGRRGLREPRSASPSPAHTPSGLLGREPVPWPPVPAVFSIAVFGPIVNEGYVNTDSGPELRCVFNGNAGACRFGVAL

SEQ ID NO: 10075 - DNA, 880 bp, Homo sapiens
atttgcatgctagaaaacaggccagacagttcccaaccgcgcaggaagcaacagctccgctgcctccataccctccctcccgccccgctctgcctgctgcactctcacctccccttcgccgttccggctccagcctgggaatcgcgggcccaggtgaaggctcctgttcccacactcttgagtgggctctgaggggactccacgggcccacgcggtgcagagtacctggcttgaatcaaccccggcttttgtcagccatgtgatcccggacaagtcacttcacctgttggggtcccaatgtcccccgcatttataaagagaataagaacaatggcgatcccacggggactttctgaggatttggtgaggggacgcatgtaaagtggctgtttaacacaatgtctgggcatagtagatgctcactaaacggcccgtgttgtcaataattactaaatacgcgagggttcgggaaagaaagaggtgacaccgccccccacccagatacgggcctgggaacgcagggacaggcccaggggcgtgggcgctcgaggcgggctcgcagaggtcgggtcgccgcagggccctgagcgccgcgccgcacgcaggtgttctccatcgccgtcttcgggcccatcgtcaacgagggctacgtgaacaccgacagcggccccgagctgcgctgcgtgttcaacgggaacgcgggcgcctgccgcttcggcgtcgcgctgggcctcggagccttcctcgcctgcgccgccttcctgctgctcgatgtgcgcttccagcaaatcagcagcgtccgcgaccgccggcgcgcggtgttgctggacctgggcttctcaggactctggtccttcctgtggttcgtgggcttctgctt

SEQ ID NO: 10076 - protein, 35 aa, Homo sapiens
MCASSKSAASATAGARCCWTWASQDSGPSCGSWAS

SEQ ID NO: 10077 - DNA, 1729 bp, Homo sapiens
ggcgctcccgggtgggcggggtcagcgcaggagagggaggcgggacctcgcgccacgcggcgagcccaggcgaggcgccccaagcctcgggcccaccgacctttcctcctccgggcgaggccgccgtgggccaccgcgtggagcgtcgccctgacgcgccgcactgttcgcaggactctggtccttcctgtggttcgtgggcttctgcttcctcaccaatcagtggcagcgcacggcgccagggccggccacgacgcaggcgggggacgcggcgcgggccgccatcgccttcagcttcttctccatcctcagctgggtggcgctcaccgtgaaggccctgcagcggttccgcctgggcaccgacatgtcactcttcgccaccgaacagctgagcaccggggcgagccaggcctaccccggctatccggtgggcagcggcgtggagggcaccgagacctaccagagcccgcccttcaccgagaccctggacaccagccccaaagggtaccaggtgcccgcctactagcggctggcaggcacagaccagggctccaaggccaccccaccaacgcaggccccagggtctccgggacctcccttgggtccttccagctcagtgccgcggacagagtaggtggccgctttgcgccatccggggccaagagggggtggacccgcgtgtctgggctgcccctgccaagttcccccagtccctcagcacctggccccaggactgaggtcctgagaaggggatagcactgcccaggacgtgtgtccctagcctggaatggactggcctggggaaggctttcccctcttgggccacacctgctcactctggggttgggggtccagctgccctctacgatcaggtgcaggggctgcccaggacaaagcgggggcaggggaaagacaccaccctcgccccaagactggggatcctggccactgttcccatcccatgtccctgtgggtagtgactgtctcgtttctgtcatggtggtgcgtcccgtccggagccactctccactttctctcacaggctgctagaacagcccagccctgtcagtgttgtgatcatggtccagtcttcgggtttcacctcctagtactccacaagctgctcctctctctgtggccccggcccctgcccaggtgtgggtggttctggccaggaaggcacaaggtagctgtgggccaagacaccagccctgtcctagcccttcagtaagaccttgccaggagaggagaaggatgcctgggtgccaggcaagacaagcccctcagcaggagagaggcccagaggctccagctggccaccgtgccccacaagatggcccctgtgtggttccctttaccttggcttcctggcccagtccctgcctctccacctgcaccctgcttcctggcccagtcccaggttggagtccctctgcatagctgactactcatgcattgctcaaagctggcttttcacattaagtcaacaccaaacgtggttgccacatttcatcagacagacacctccctctggagatgcagttgagtgacaaccttgttacattgtagcctagaccaattctgtgtggatatttaagtgaacatgtttacaatttttgtatatatcactctctccctctcctgaaagaccagagattgtgtattttcagtgtcccatgttccgactgcaccttctttacaataaagactgtaactgagctgactgtga

SEQ ID NO: 10078 - protein, 147 aa, Homo sapiens [sequence omitted]

SEQ ID NO: 10079 - DNA, 988 bp, Homo sapiens
ccagacccaggctgctgcctgccccacgggcgtacctagtccccgagaacttccgggagaggaaccttcagctcatccagtccatcagggacttcctgcagagcgacgaggcccgcttcagcgagttcaagagccactcaggggagttcagacaggtcaggcgggcccggggagtccagatgggtcaggcgggcccggggcggggtgccagcccgtcttcatccagggcccgggccagaggggatgactgagtccggctctccggtggcagggcctgatctccgcagcccagtattacaagagttgccgggacctgctgggggagaatttccagaaggtctttaatgagctgctggtcctgctgcccgacacggccaagcagcaggagctcctgtctgcacacacggacttctgcaaccgcgagaagcctctgagcaccaagtccaagaagaacaagaagagcgcgtggcaggccaccacccagcaggcgggcctggactgccgtgtgtgccccacctgccagcaggtgctcgcgcatggcgatgccagcagccaccaggcgctgcatgctgcccgggacgacgacttcccctccctgcaagccatcgccaggatcatcacgtagctcccgccagcgtggccagagctgtcgcaccgtgagcgtccttcctccttcctctccgggctgccaggcagccaggtaaggcctgatctgggccctcccaaagctgagggctgcagcccgtggggcctcagagctgaaagctgcggcgccactggtgccagagtcagatgtcacagatgtgttgtgtaaacagttggctgtttcatgcttcaagaatgttcaggattaaaagcagacaagaaattgtgctacttgaagttgaatctttttatgagacaagctgaatctgggatctcaaattgcctctgaccttttataagacagtttatcttcaaataaatttattttgcaataccacgcata

SEQ ID NO: 10080 - protein, 55 aa, Homo sapiens
MAMPAATRRCMLPGTTTSPPCKPSPGSSRSSRQRGQSCRTVSVLPPSSPGCQAAR

SEQ ID NO: 10081 - DNA, 1316 bp, Homo sapiens
gaagctggccctggaggccaggcagcccgcagtcagcgagggtcctctctgggtcttgtcctgccacccctcaggcttcagcgctgtggtgctcctgaagggcacgcctcccccacccccgccgggcctggtgcccccaatcagcaagccgccccctggcttctctggccttctgcctagcccccacccggcctgtgtccccagccccgccaccaccaccaccacaaaagcacccaggctgctgcctgccccacgggcgtacctagtccccgagaacttccgggagaggaaccttcagctcatccagtccatcagggacttcctgcagagcgacgaggcccgcttcagcgagttcaagagccactcaggggagttcagacagggcctgatctccgcagcccagtattacaagagttgccgggacctgctgggggagaatttccagaaggtctttaatgagctgctggtcctgctgcccgacacggccaagcagcaggagctcctgtctgcacacacggacttctgcaaccgcgagaagcctctgagcaccaagtccaagaagaacaagaagagcgcgtggcaggccaccacccagcaggcgggcctggactgccgtgtgtgccccacctgccagcaggtgctcgcgcatggcgatgccagcagccaccaggcgctgcatgctgcccgggacgacgacttcccctccctgcaagccatcgccaggatcatcacgtagctcccgccagcgtggccagagctgtcgcaccgtgagcgtccttcctccttcctctccgggctgccaggcagccaggtaaggcctggtgaggccacttggcctcttggttggccaggcccaccaggaagtcaccaggacagtccacccgccctgttggcacactcaagcgggagtccacccctgcctcagtggtgggccagtctcggtttgcattcttgtgcttttgggaggtgccaggggagggaagggctgggatgctgggacctgttgttgctggcaaagccagaggtcacagtggcctgatctgggccctcccaaagctgagggctgcagcccgtggggcctcagagctgaaagctgcggcgccactggtgccagagtcagatgtcacagatgtgttgtgtaaacagttggctgtttcatgcttcaagaatgttcaggattaaaagcagacaagaaattgtgctacttgaagttgaatctttttatgagacaagctgaatctgggatctcaaattgcctctgaccttttataagacagtttatcttcaaataaatttattttgcaataccacgcata

SEQ ID NO: 10082 - protein, 63 aa, Homo sapiens [sequence omitted]

SEQ ID NO: 10083 - DNA, 4460 bp, Homo sapiens
ggccgctcggcgccacgaccggccgagaggggggccggatcccggaccatggcggcggccggggggcgccgaggggcggcgcgcggacatggaggcggaggcggcggcagctcctgagcgggaaggcgggagctgcgtgctgtgctgcggagacctggaggccacggcgctggggccgctgcgaccacccggtgtgctaccgctgctctaccaagatgcgggtgctctgcgagcagcgctactgcgccgtgtgccgcgaggagctgcgccaggtggtctttgggaagaagcttcctgcctttgccaccatccccatccaccagctgcagcatgagaagaaatatgatatctactttgcagatggaaaggtgtacgcattgtacaggtgagcagggcctctccctgggtcctggcctccctgtggttgtggcccttcacgtcccactctcctcacaaccggaggcacttcgggggccacctggtgcaccaatgctggggccaggcacctgggtttccatcctgtgactggggaggcttaccaggccctcctgggggtagagctggtggttgtgctggggaaaggcatgcccaggtggtgcagcacctgcctcgggggcaccttgaggggcacacgaggtgtgtgagccaggcccgtggcctgaaaatcctataaagggtacagctgtcccagggctggtctctcagaggaggggcagctcatgggctcagggctagagccaggcttctgacccaggccatgtgcacagccatggccttgcatctgtcctgggtcacgggcctggggcctggtgagtggccctgctcccggcggtgacactgaatgtcctggggccgtgggcggctctcggtgtcttcctaggcagctgctgcagcacgagtgcccgcggtgccccgagctgccacctttcagcctcttcggggacctggagcagcacatgcggaggcagcatgagctcttctgctgccgtctgtgcctccagcacctccaggtgtgcccccccagcgaccccggagagagcctaggcggtgggtggtgcaagggatgtggccacacggctgggaggggcttgtccacctgctgcttctggccccggatggccccctgagggtcaggctgcacgtggcagggaggcctctggctgctggcggggccctctcccgccccttgctgctccgccactggcctgtgggaagaggcaggaggcttggggtcccccagcctgtgcccagcctcctgtgccttgtagatcttcacatatgagcgcaagtggtactcgcgcaaggacctggcccggcatcgcatgcagggtgaccccgatgacacgtcgcaccgtgggcacccgctctgcaagttctgtgacgagcgctacctggacaatgatgagctgcttaagcacctgcgccgcgaccactacttctgccacttctgcgactcggacggggcccaggactactacagcgactatgcctacctgcgtgagcacttccgggagaagcactttctgtgtgaggaaggccgctgcagcacggagcagttcacccacgccttccgcaccgagatcgacctcaaggcccacaggacggcctgccacagtcgcagccgcgccgaggcacgccagaaccgccacatcgacctgcagttcagctacgcgccacggcactcgcgccggaacgagggggtcgttggtggcgaagactacgaggaggtggacaggtacagccgccagggccgagtggcccgggctggcactcgcggagcccagcagagccgccgaggaagctggaggtacaaaagggaagaagaggaccgagaagtagcagctgctgtccgggcctccgtggccgcacagcagcaggaggaggctcgcaggagtgaggatcaggaggaaggcggtaggcccaagaaggaggaggcagcggcgcggggacctgaggatccccgtggcccccggcgctcaccccggactcagggcgaaggcccaggccccaaggaaacctcgacaaatggtcctgtaagccaagaagccttctcggtgacaggcccagccgccccagggtgtgtgggggtgccagggtgagagtatgggcgcccaggggtgaatggtgcatggtgggcgggtgcgggcagccacaggtgggtgccgggagggcaggtatggagccacggggcctgatagctgttgaccagctgtgcttccctgcacccagcgccctcccaccacccagcccgaagctcaaggacgaagacttccccagcctctctgcctccacttcctcctcctgctccactgcagcaaccccgggccctgtggggttggcgctgccgtacgccatccctgccagaggcaggagtgccttccaggaggaggacttccccgccctggtgtcctcggtgcccaagcctggcaccgcccccaccagccttgtctctgcctggaacagcagcagtagcagcaagaaggtagcacagcccccactctcggcgcaggctaccggcagcggccagcccaccaggaaggctgggaaggggagcaggggcggcaggaagggcggcccgcccttcacacaggaggaggaggaggacggcggcccggccctgcaggagcttctgagcacacgccccacgggctccgtctcctccacactggggctggcctccatccaaccctctaaagttgggaagaagaagaaagtgggctcggagaagccaggcaccacattgccacagcccccgcccgctacctgtcccccaggggctttgcaggccccggaagctcctgccagcagagccgaggggccagttgccgtcgtcgttaatggacacatggagggcccggcccctgctcggagtgcccccaaggaaccccctgggctcccaaggcccctggggtccttcccctgccccacgccacaggaggacttcccagcgctcggcggcccctgcccaccccggatgccgccgcccccaggcttcagcgctgtggtgctcctgaagggcacgcctcccccacccccgccgggcctggtgcccccaatcagcaagccgccccctggcttctctggccttctgcctagcccccacccggcctgtgtccccagccccgccaccaccaccaccacaaaagcgtaagtgtgggtgagctgcctggtgtccaccgggggtggaggaacggtaccctccccttgggccactgtgaaggctgaagcctccacctcctctttaccttctgacccccagacccaggctgctgcctgccccacgggcgtacctagtccccgagaacttccgggagaggaaccttcagctcatccagtccatcagggacttcctgcagagcgacgaggcccgcttcagcgagttcaagagccactcaggggagttcagacaggtcaggcgggcccggggagtccagatgggtcaggcgggcccggggcggggtgccagcccgtcttcatccagggcccgggccagaggggatgactgagtccggctctccggtggcagggcctgatctccgcagcccagtattacaagagttgccgggacctgctgggggagaatttccagaaggtctttaatgagctgctggtcctgctgcccgacacggccaagcagcaggagctcctgtctgcacacacggacttctgcaaccgcgagaagcctctgagcaccaagtccaagaagaacaagaagagcgcgtggcaggccaccacccagcaggcgggcctggactgccgtgtgtgccccacctgccagcaggtgctcgcgcatggcgatgccagcagccaccaggcgctgcatgctgcccgggacgacgacttcccctccctgcaagccatcgccaggatcatcacgtagctcccgccagcgtggccagagctgtcgcaccgtgagcgtccttcctccttcctctccgggctgccaggcagccaggtaaggcctggtgaggccacttggcctcttggttggccaggcccaccaggaagtcaccaggacagtccacccgccctgttggcacactcaagcgggagtccacccctgcctcagtggtgggccagtctcggtttgcattcttgtgcttttgggaggtgccaggggagggaagggctgggatgctgggacctgttgttgctggcaaagccagaggtcacagtggcctgatctgggccctcccaaagctgagggctgcagcccgtggggcctcagagctgaaagctgcggcgccactggtgccagagtcagatgtcacagatgtgttgtgtaaacagttggctgtttcatgcttcaagaatgttcaggattaaaagcagacaagaaattgtgctacttgaagttgaatctttttatgagacaagctgaatctgggatctcaaattgcctctgaccttttataagacagtttatcttcaaataaatttattttgcaataccacgcata

SEQ ID NO: 10084 - protein, 340 aa, Homo sapiens
MVGGCGQPQVGAGRAGMEPRGLIAVDQLCFPAPSALPPPSPKLKDEDFPSLSASTSSSCSTAATPGPVGLALPYAIPARGRSAFQEEDFPALVSSVPKPGTAPTSLVSAWNSSSSSKKVAQPPLSAQATGSGQPTRKAGKGSRGGRKGGPPFTQEEEEDGGPALQELLSTRPTGSVSSTLGLASIQPSKVGKKKKVGSEKPGTTLPQPPPATCPPGALQAPEAPASRAEGPVAVVVNGHMEGPAPARSAPKEPPGLPRPLGSFPCPTPQEDFPALGGPCPPRMPPPPGFSAVVLLKGTPPPPPPGLVPPISKPPPGFSGLLPSPHPACVPSPATTTTTKA

SEQ ID NO: 10085 - DNA, 1203 bp, Homo sapiens
gaagctggccctggaggccaggcagcccgcagtcagcgagggtcctctctgggtcttgtcctgccacccctcaggcttcagcgctgtggtgctcctgaagggcacgcctcccccacccccgccgggcctggtgcccccaatcagcaagccgccccctggcttctctggccttctgcctagcccccacccggcctgtgtccccagccccgccaccaccaccaccacaaaagcacccaggctgctgcctgccccacgggcgtacctagtccccgagaacttccgggagaggaaccttcagctcatccagtccatcagggacttcctgcagagcgacgaggcccgcttcagcgagttcaagagccactcaggggagttcagacagggcctgatctccgcagcccagtattacaagagttgccgggacctgctgggggagaatttccagaaggtctttaatgagctgctggtcctgctgcccgacacggccaagcagcaggagctcctgtctgcacacacggacttctgcaaccgcgagaagcctctgagcaccaagtccaagaagaacaagaagagcgcgtggcaggccaccacccagcaggcgggcctggactgccgtgtgtgccccacctgccagcaggtgctcgcgcatggcgatgccagcagccaccaggcgctgcatgctgcccgggacgacgacttcccctccctgcaagccatcgccaggatcatcacgtagctcccgccagcgtggccagagctgtcgcaccgtgagcgtccttcctccttcctctccgggctgccaggcagccaggtaaggcctggtgaggccacttggcctcttggttggccaggcccaccaggaagtcaccaggacagtccacccgccctgttggcacactcaagcgggagtccacccctgcctcagtggtgggccagtctcggtttgcattcttgtgcttttgggaggtgccaggggagggaagggctgggatgctgggacctgttgttgctggcaaagccagaggtcacagtggcctgatctgggccctcccaaagctgagggctgcagcccgtggggcctcagagctgaaagctgcggcgccactggtgccagagtcagatgtcacagatgtgttgtgtaaacagttggctgtttcatgcttcaagaatgttcaggattaaaagcagacaagaaattgtgct

SEQ ID NO: 10086 - protein, 63 aa, Homo sapiens [sequence omitted]

SEQ ID NO: 10087 - DNA, 3242 bp, Homo sapiens
ccggaaggggcgggcccgccgggagccaggccgctcggcgccacgaccggccgagaggggggccggatcccggaccatggcggcggccggggggcgccgaggggcggcgcgcggacatggaggcggaggcggcggcagctcctgagcgggaaggcgggagctgcgtgctgtgctgcggagacctggaggccacggcgctggggccgctgcgaccacccggtgtgctaccgctgctctaccaagatgcgggtgctctgcgagcagcgctactgcgccgtgtgccgcgaggagctgcgccaggtggtctttgggaagaagcttcctgcctttgccaccatccccatccaccagctgcagcatgagaagaaatatgatatctactttgcagatggaaaggtgtacgcattgtacaggcagctgctgcagcacgagtgcccgcggtgccccgagctgccacctttcagcctcttcggggacctggagcagcacatgcggaggcagcatgagctcttctgctgccgtctgtgcctccagcacctccagatcttcacatatgagcgcaagtggtactcgcgcaaggacctggcccggcatcgcatgcagggtgaccccgatgacacgtcgcaccgtgggcacccgctctgcaagttctgtgacgagcgctacctggacaatgatgagctgcttaagcacctgcgccgcgaccactacttctgccacttctgcgactcggacggggcccaggactactacagcgactatgcctacctgcgtgagcacttccgggagaagcactttctgtgtgaggaaggccgctgcagcacggagcagttcacccacgccttccgcaccgagatcgacctcaaggcccacaggacggcctgccacagtcgcagccgcgccgaggcacgccagaaccgccacatcgacctgcagttcagctacgcgccacggcactcgcgccggaacgagggggtcgttggtggcgaagactacgaggaggtggacaggtacagccgccagggccgagtggcccgggctggcactcgcggagcccagcagagccgccgaggaagctggaggtacaaaagggaagaagaggaccgagaagtagcagctgctgtccgggcctccgtggccgcacagcagcaggaggaggctcgcaggagtgaggatcaggaggaaggcggtaggcccaagaaggaggaggcagcggcgcggggacctgaggatccccgtggcccccggcgctcaccccggactcagggcgaaggcccaggccccaaggaaacctcgacaaatggtcctgtaagccaagaagccttctcggtgacaggcccagccgccccaggcgccctcccaccacccagcccgaagctcaaggacgaagacttccccagcctctctgcctccacttcctcctcctgctccactgcagcaaccccgggccctgtggggttggcgctgccgtacgccatccctgccagaggcaggagtgccttccaggaggaggacttccccgccctggtgtcctcggtgcccaagcctggcaccgcccccaccagccttgtctctgcctggaacagcagcagtagcagcaagaaggtagcacagcccccactctcggcgcaggctaccggcagcggccagcccaccaggaaggctgggaaggggagcaggggcggcaggaagggcggcccgcccttcacacaggaggaggaggaggacggcggcccggccctgcaggagcttctgagcacacgccccacgggctccgtctcctccacactggggctggcctccatccaaccctctaaagttgggaagaagaagaaagtgggctcggagaagccaggcaccacattgccacagcccccgcccgctacctgtcccccaggggctttgcaggccccggaagctcctgccagcagagccgaggggccagttgccgtcgtcgttaatggacacatggagggcccggcccctgctcggagtgcccccaaggaaccccctgggctcccaaggcccctggggtccttcccctgccccacgccacaggaggacttcccagcgctcggcggcccctgcccaccccggatgccgccgcccccaggcttcagcgctgtggtgctcctgaagggcacgcctcccccacccccgccgggcctggtgcccccaatcagcaagccgccccctggcttctctggccttctgcctagcccccacccggcctgtgtccccagccccgccaccaccaccaccacaaaagcacccaggctgctgcctgccccacgggcgtacctagtccccgagaacttccgggagaggaaccttcagctcatccagtccatcagggacttcctgcagagcgacgaggcccgcttcagcgagttcaagagccactcaggggagttcagacagggcctgatctccgcagcccagtattacaagagttgccgggacctgctgggggagaatttccagaaggtctttaatgagctgctggtcctgctgcccgacacggccaagcagcaggagctcctgtctgcacacacggacttctgcaaccgcgagaagcctctgagcaccaagtccaagaagaacaagaagagcgcgtggcaggccaccacccagcaggcgggcctggactgccgtgtgtgccccacctgccagcaggtgctcgcgcatggcgatgccagcagccaccaggcgctgcatgctgcccgggacgacgacttcccctccctgcaagccatcgccaggatcatcacgtagctcccgccagcgtggccagagctgtcgcaccgtgagcgtccttcctccttcctctccgggctgccaggcagccaggtaaggcctggtgaggccacttggcctcttggttggccaggcccaccaggaagtcaccaggacagtccacccgccctgttggcacactcaagcgggagtccacccctgcctcagtggtgggccagtctcggtttgcattcttgtgcttttgggaggtgccaggggagggaagggctgggatgctgggacctgttgttgctggcaaagccagaggtcacagtggcctgatctgggccctcccaaagctgagggctgcagcccgtggggcctcagagctgaaagctgcggcgccactggtgccagagtcagatgtcacagatgtgttgtgtaaacagttggctgtttcatgcttcaagaatgttcaggattaaaagcagacaagaaattgtgct

SEQ ID NO: 10088 - protein, 843 aa, Homo sapiens
MRVLCEQRYCAVCREELRQVVFGKKLPAFATIPIHQLQHEKKYDIYFADGKVYALYRQLLQHECPRCPELPPFSLFGDLEQHMRRQHELFCCRLCLQHLQIFTYERKWYSRKDLARHRMQGDPDDTSHRGHPLCKFCDERYLDNDELLKHLRRDHYFCHFCDSDGAQDYYSDYAYLREHFREKHFLCEEGRCSTEQFTHAFRTEIDLKAHRTACHSRSRAEARQNRHIDLQFSYAPRHSRRNEGVVGGEDYEEVDRYSRQGRVARAGTRGAQQSRRGSWRYKREEEDREVAAAVRASVAAQQQEEARRSEDQEEGGRPKKEEAAARGPEDPRGPRRSPRTQGEGPGPKETSTNGPVSQEAFSVTGPAAPGALPPPSPKLKDEDFPSLSASTSSSCSTAATPGPVGLALPYAIPARGRSAFQEEDFPALVSSVPKPGTAPTSLVSAWNSSSSSKKVAQPPLSAQATGSGQPTRKAGKGSRGGRKGGPPFTQEEEEDGGPALQELLSTRPTGSVSSTLGLASIQPSKVGKKKKVGSEKPGTTLPQPPPATCPPGALQAPEAPASRAEGPVAVVVNGHMEGPAPARSAPKEPPGLPRPLGSFPCPTPQEDFPALGGPCPPRMPPPPGFSAVVLLKGTPPPPPPGLVPPISKPPPGFSGLLPSPHPACVPSPATTTTTKAPRLLPAPRAYLVPENFRERNLQLIQSIRDFLQSDEARFSEFKSHSGEFRQGLISAAQYYKSCRDLLGENFQKVFNELLVLLPDTAKQQELLSAHTDFCNREKPLSTKSKKNKKSAWQATTQQAGLDCRVCPTCQQVLAHGDASSHQALHAARDDDFPSLQAIARIIT

SEQ ID NO: 10089 - DNA, 949 bp, Homo sapiens
gcggcggccggggggcgccgaggggcggcgcgcggacatggaggcggaggcggcggcagctcctgagcgggaaggcgggagctgcgtgctgtgctgcggagacctggaggccacggcgctggggccgctgcgaccacccggtgtgctaccgctgctctaccaagatgcgggtgctctgcgagcagcgctactgcgccgtgtgccgcgaggagctgcgccaggtggtctttgggaagaagcttcctgcctttgccaccatccccatccaccagctgcagcatgagaagaaatatgatatctactttgcagatggaaaggtgtacgcattgtacaggcagctgctgcagcacgagtgcccgcggtgccccgagctgccacctttcagcctcttcggggacctggagcagcacatgcggaggcagcatgagctcttctgctgccgtctgtgcctccagcacctccagatcttcacatatgagcgcaagtggtactcgcgcaaggacctggcccggcatcgcatgcagggtgaccccgatgacacgtcgcaccgtgggcacccgctctgcaagttctgtgacgagcgctacctggacaatgatgagctgcttaagcacctgcgccgcgaccactacttctgccacttctgcgactcggacggggcccaggactactacaggtgggccgggcagcagacagacagatgaccctccctccccgagggcgtggggctaaccgggctgcagccctcctaccgacaccccatctcctgccagcgactatgcctacctgcgtgagcacttccgggagaagcactttctgtgtgaggaaggccgctgcagcacggagcagttcacccacgccttccgcaccgagatcgacctcaaggcccacaggacggcctgccacagtcgcagccgcgccgaggcacgccagaaccgccacatcgacc

SEQ ID NO: 10090 - protein, 179 aa, Homo sapiens
MRVLCEQRYCAVCREELRQVVFGKKLPAFATIPIHQLQHEKKYDIYFADGKVYALYRQLLQHECPRCPELPPFSLFGDLEQHMRRQHELFCCRLCLQHLQIFTYERKWYSRKDLARHRMQGDPDDTSHRGHPLCKFCDERYLDNDELLKHLRRDHYFCHFCDSDGAQDYYRWAGQQTDR

SEQ ID NO: 10091 - DNA, 375 bp, Homo sapiens
ggtcatgtcttagtgaaaccggtctctggtatttggaacacacacaagcgtggtcccgcctccacttccctaatgccctgtttaaatccctacatgaaagacaacgtgaaaggcagcacgtggtgacgtccatctcgcagcccagggcagtctcgccaggcctgcccagaaggggcctctggaaggcacgaacggaacctgtcctctttacgctgggcccagcacaggacgtgtttggatggatgctgcagtaacagggcctcctccctacccttgagggccaggcacactcaggacctccctccctctgccatccagaaggcaggtccagatctaaaccctactggaaaagaggcagtaaattgtatcaatgag

SEQ ID NO: 10092 - protein, 82 aa, Homo sapiens
RPSRSPGQSRQACPEGASGRHERNLSSLRWAQHRTCLDGCCSNRASSLPLRARHTQDLPPSAIQKAGPDLNPTGKEAVNCIN

SEQ ID NO: 10093 - DNA, 4917 bp, Homo sapiens
aggggaagggggagggggcgctccctcgcgcaccagattatttttggctccgcagccggggctgctcgctgcttgtcgcgcgctcacacacacacagacacacacgcacacacacacatgcacacattttctcgcgctctctccggctctcctttgtttattttctaatctatatttttactggaagatttcctctttattctctcccgccctcctacaagcgctcttgctggccgtctgggtgcacacaccgctccctcgatcaccccagcccccttcctggtctcccgagcgcggggtttgaaggtcacctcctttccagtccccgtgcgagccgcgctgccgccgcctcctccagccagagtcggtgggactggctgcgctgccctgaagtggttctccaagcagcgcggagggtggcggacggcggacggagcccaggggccgcgtcgggtggggaaacccgaactcgcggaggggaatccctccccctccgccccagccccccagcagcacccgcggtggggcgggggcgctctgccagccccgggaacagcagaggcggcggcactggctggacccacgcgcgcgcctccggggctgaagaaggaaggagtgagccgagccgagcaccccacatctggaggggacagccagccgtgggccccgccccggcgtccggagcaggagaactccgagcttcttgcccaggcagagagagcaggagcggaccgcgcgcccgggattgagagtccttgcgctccagacccccacccagtggccgccagggtccccgcctgtccggaccctcgccgcgcccaggcaggcgcgccagggcggggctgacctgcccgcgaagttgcggacagtgcgtgagaaaccagcacccccttccgccgcctccagcttatggtgagtgtggctgggggtgcagagagcgcacgggaattcgggggtctggggccgagaacgtgaccgcagccgggctcgccgggagttctaggaaactggtcaaagaactcatgcaagtggaacttacagcttccttgatcggactcagcattcagatatcaaagcagactgcaatacctgcgtggaaatagaagacagaaaggtttcaagacaacagatgaattgtgaaagagagcagctaaggggtaatcaggaagcagccgctgcccctgacacaatggctcagccttacgcttcggcccagtttgctcccccgcagaacggtatccccgcggaatacacggcccctcatccccaccccgcgccagagtacacaggccagaccacggttcccgagcacacattaaacctgtaccctcccgcccagacgcactccgagcagagcccggcggacacgagcgctcagaccgtctctggcaccgccacacagacagatgacgcagcaccgacggatggccagccccagacacaaccttctgaaaacacggaaaacaagtctcagcccaagcggctgcatgtctccaatatccccttcaggttccgggatccggacctcagacaaatgtttggtcaatttggtaaaatcttagatgttgaaattatttttaatgagcgaggctcaaagggatttggtttcgtaactttcgaaaatagtgccgatgcggacagggcgagggagaaattacacggcaccgtggtagagggccgtaaaatcgaggtaaataatgccacagcacgtgtaatgacaaataaaaagaccgtcaacccttatacaaatggctggaaattgaatccagttgtgggtgcagtctacagtcccgaattctatgcaggcacggtcctgttgtgccaggccaaccaggagggatcttccatgtacagtgcccccagttcacttgtatatacttctgcaatgccaggcttcccgtatccagcagccaccgccgcggccgcctaccgaggggcgcacctgcgaggccgcggtcgcaccgtgtacaacaccttcagggccgcggcgcccccgcccccgatcccggcctacggcggtgttgtttaccaggatggattttatggtgcagacatttatggtggttatgctgcataccgctacgcccagcctacccctgccactgccgctgcctacagtgacagttacggacgagtttatgctgccgacccctaccaccacgcacttgctccagcccccacctacggcgttggtgccatgaatgcttttgcacctttgactgatgccaagactaggagccatgctgatgatgtgggtctcgttctttcttcattgcaggctagtatataccgagggggatacaaccgttttgctccatactaaatgacaaaaccataaaaaccttccaatgtggggagaaaggaagctttccgaggcctgagtattgcaatacatgcagtagtacatcattttagcaactctaaaaaaaaaaaaaatacaaataaaaaggaaaaaaaattacattttttatcttatacctcagatattttgttctgtgtattttaatattgtgggtctttaatttctgaaggttccgtagtttggttgctggctgtaggagtttttgtggttgatctagacagatgctagataatgaataaaaactggtttagggccatatccagagtgctatattatgtaaatgaattatatatgctgaatattaagctactggggttatcagctatttgggaagagtgtaagtgactacagtagtcatttttttctgcacctgcattattttattttgcgaaaggggaggttgggaggggcttaggggattggaactggggtttggctgaaagaaaaaaaaaaaaatgtaactgatgaatctaaacgacccactgcaccaacaatcatttatcaatggttctaagttactcattgccagttcaagccaaaggtcatgttgttaagggggtgcttctagtagcacttgtgcatctgagttgaatgaagctgtgcaaacccaccctttaaaccattccacccggcagtattcagcttcttaaccagtcgctatttaggaaaaaaaacccactagttaggccatcaacaagcattctttttatatttcttccagtataataaattattgatatcactgctgacttttatattatgggagggaaaaaataacattaataaaaaggtgataaaaaagcactgtttctatttttttctttttttccaaaaaaagaaagtaataaaaacttaaattctttgtaccagttaaaaaaaatgtataaaatttacatctgtgcagtggagttgttaagttctagaaacagtctatgaagctttagttttagcctagtagaacaactgttagagacagacgtataatttttatggaattacatgataatcatattcggatttatagaagcattttacaagtattgcaatcattgagtagagataatcatggtattttcatcagcttggtactttttgaaacgtgactgcgttgtgtgaacaatctgcaatttttcagtccgtgagatcctgcccttccacctctttcccatacccccaaggattatctcaaaatgatctctttagttctgtctccaaggcccaggacacttgtcagaaggatgcaaaaaaagaaaaaagtacatccaccctcttaatcccaaaagaacaaagtctccccacctttctcggatgcagggccagagtgacacagccgaaaaattgcagtttgtctgtacttctgtttgaactttccacgttgtcctgtttacaagttaacttaagttggggtatccgtcacgggtcttcctgttttgtatttaaataaaaacaacagcagcaggctgtccctgagtagttttgctgccataggttaagtcctcatgtgtacagtgcaggccctgtggcccgcacttcagtaagttatcaactctcaccgctgtgaacctgccaatccgctgtaacaactctgctttaaaacaaaaccaaacaaaactttaaaaaaaaatgtgtgatccagctttctcttgccatcctatgtgcatgccgtaagatcagttggatattaaaccatcaataaagtttcacaagatttgaaaacaaagtttctgtagcttcgatacctaagacagacgatagtgatcttgaaaagagaaaagggggaggggggagctacttatcagccaaaagcatataaagtgttcttttcaccagacttctttgggtgggtgaggggaggggcaagagggtgttttatagcatcactaagacattctcattcccccacctggaaaacagtgttatggcaatgggtgcctggttgatgttcttaaaggaaacgaattattaaaacactatgacatcctccagagggaagaaagagtaggagcagggggctatggagaataaatttctcccaattgccgcctcagatttcaaaatccagaatttgtattgtgtttcgaatcacaaacatagaattcttactgtgttggttaaagtaaaattcatttgcagttttgattttcatcaatgagctgtactttcccccatgactgtatgtagttttaataaaatcatttagagtgagtgagtgccaaccgatgttgcagaatcttttgtctaggcactccaagatgccaataagtcattttaaaatgtatgtcagagatgtaaacaaacattttggattttttttaaacagtatttatttggaatgttttcatttatctaaataactattgctattatgaattatggaaaattaatattatgtgtggcatatagtgacttcttaacacacacatcacgcaatctgcaaacccagaaaatgtgtatatctgtctttagaaattagtgtttatatcacttacagtggtttgtgaataaagaaaactggtttgtaatatcaaaaaaataaaagcttagtctgaaaaggt

SEQ ID NO: 10094 - protein, 397 aa, Homo sapiens; identical to SEQ ID NO: 1562

SEQ ID NO: 10095 - DNA, 4836 bp, Homo sapiens
aggggaagggggagggggcgctccctcgcgcaccagattatttttggctccgcagccggggctgctcgctgcttgtcgcgcgctcacacacacacagacacacacgcacacacacacatgcacacattttctcgcgctctctccggctctcctttgtttattttctaatctatatttttactggaagatttcctctttattctctcccgccctcctacaagcgctcttgctggccgtctgggtgcacacaccgctccctcgatcaccccagcccccttcctggtctcccgagcgcggggtttgaaggtcacctcctttccagtccccgtgcgagccgcgctgccgccgcctcctccagccagagtcggtgggactggctgcgctgccctgaagtggttctccaagcagcgcggagggtggcggacggcggacggagcccaggggccgcgtcgggtggggaaacccgaactcgcggaggggaatccctccccctccgccccagccccccagcagcacccgcggtggggcgggggcgctctgccagccccgggaacagcagaggcggcggcactggctggacccacgcgcgcgcctccggggctgaagaaggaaggagtgagccgagccgagcaccccacatctggaggggacagccagccgtgggccccgccccggcgtccggagcaggagaactccgagcttcttgcccaggcagagagagcaggagcggaccgcgcgcccgggattgagagtccttgcgctccagacccccacccagtggccgccagggtccccgcctgtccggaccctcgccgcgcccaggcaggcgcgccagggcggggctgacctgcccgcgaagttgcggacagtgcgtgagaaaccagcacccccttccgccgcctccagcttatggtgagtgtggctgggggtgcagagagcgcacgggaattcgggggtctggggccgagaacgtgaccgcagccgggctcgccgggagttctaggaaactggtcaaagaactcatgcaagtggaacttacagcttccttgatcggactcagcattcagatatcaaagcagactgcaatacctgcgtggaaatagaagacagaaaggtttcaagacaacagatgaattgtgaaagagagcagctaaggggtaatcaggaagcagccgctgcccctgacacaatggctcagccttacgcttcggcccagtttgctcccccgcagaacggtatccccgcggaatacacggcccctcatccccaccccgcgccagagtacacaggccagaccacggttcccgagcacacattaaacctgtaccctcccgcccagacgcactccgagcagagcccggcggacacgagcgctcagaccgtctctggcaccgccacacagacagatgacgcagcaccgacggatggccagccccagacacaaccttctgaaaacacggaaaacaagtctcagcccaagcggctgcatgtctccaatatccccttcaggttccgggatccggacctcagacaaatgtttggtcaatttggtaaaatcttagatgttgaaattatttttaatgagcgaggctcaaagggatttggtttcgtaactttcgaaaatagtgccgatgcggacagggcgagggagaaattacacggcaccgtggtagagggccgtaaaatcgaggtaaataatgccacagcacgtgtaatgacaaataaaaagaccgtcaacccttatacaaatggctggaaattgaatccagttgtgggtgcagtctacagtcccgaattctatgcagtgccaggcttcccgtatccagcagccaccgccgcggccgcctaccgaggggcgcacctgcgaggccgcggtcgcaccgtgtacaacaccttcagggccgcggcgcccccgcccccgatcccggcctacggcggtgttgtttaccaggatggattttatggtgcagacatttatggtggttatgctgcataccgctacgcccagcctacccctgccactgccgctgcctacagtgacagttacggacgagtttatgctgccgacccctaccaccacgcacttgctccagcccccacctacggcgttggtgccatgaatgcttttgcacctttgactgatgccaagactaggagccatgctgatgatgtgggtctcgttctttcttcattgcaggctagtatataccgagggggatacaaccgttttgctccatactaaatgacaaaaccataaaaaccttccaatgtggggagaaaggaagctttccgaggcctgagtattgcaatacatgcagtagtacatcattttagcaactctaaaaaaaaaaaaaatacaaataaaaaggaaaaaaaattacattttttatcttatacctcagatattttgttctgtgtattttaatattgtgggtctttaatttctgaaggttccgtagtttggttgctggctgtaggagtttttgtggttgatctagacagatgctagataatgaataaaaactggtttagggccatatccagagtgctatattatgtaaatgaattatatatgctgaatattaagctactggggttatcagctatttgggaagagtgtaagtgactacagtagtcatttttttctgcacctgcattattttattttgcgaaaggggaggttgggaggggcttaggggattggaactggggtttggctgaaagaaaaaaaaaaaaatgtaactgatgaatctaaacgacccactgcaccaacaatcatttatcaatggttctaagttactcattgccagttcaagccaaaggtcatgttgttaagggggtgcttctagtagcacttgtgcatctgagttgaatgaagctgtgcaaacccaccctttaaaccattccacccggcagtattcagcttcttaaccagtcgctatttaggaaaaaaaacccactagttaggccatcaacaagcattctttttatatttcttccagtataataaattattgatatcactgctgacttttatattatgggagggaaaaaataacattaataaaaaggtgataaaaaagcactgtttctatttttttctttttttccaaaaaaagaaagtaataaaaacttaaattctttgtaccagttaaaaaaaatgtataaaatttacatctgtgcagtggagttgttaagttctagaaacagtctatgaagctttagttttagcctagtagaacaactgttagagacagacgtataatttttatggaattacatgataatcatattcggatttatagaagcattttacaagtattgcaatcattgagtagagataatcatggtattttcatcagcttggtactttttgaaacgtgactgcgttgtgtgaacaatctgcaatttttcagtccgtgagatcctgcccttccacctctttcccatacccccaaggattatctcaaaatgatctctttagttctgtctccaaggcccaggacacttgtcagaaggatgcaaaaaaagaaaaaagtacatccaccctcttaatcccaaaagaacaaagtctccccacctttctcggatgcagggccagagtgacacagccgaaaaattgcagtttgtctgtacttctgtttgaactttccacgttgtcctgtttacaagttaacttaagttggggtatccgtcacgggtcttcctgttttgtatttaaataaaaacaacagcagcaggctgtccctgagtagttttgctgccataggttaagtcctcatgtgtacagtgcaggccctgtggcccgcacttcagtaagttatcaactctcaccgctgtgaacctgccaatccgctgtaacaactctgctttaaaacaaaaccaaacaaaactttaaaaaaaaatgtgtgatccagctttctcttgccatcctatgtgcatgccgtaagatcagttggatattaaaccatcaataaagtttcacaagatttgaaaacaaagtttctgtagcttcgatacctaagacagacgatagtgatcttgaaaagagaaaagggggaggggggagctacttatcagccaaaagcatataaagtgttcttttcaccagacttctttgggtgggtgaggggaggggcaagagggtgttttatagcatcactaagacattctcattcccccacctggaaaacagtgttatggcaatgggtgcctggttgatgttcttaaaggaaacgaattattaaaacactatgacatcctccagagggaagaaagagtaggagcagggggctatggagaataaatttctcccaattgccgcctcagatttcaaaatccagaatttgtattgtgtttcgaatcacaaacatagaattcttactgtgttggttaaagtaaaattcatttgcagttttgattttcatcaatgagctgtactttcccccatgactgtatgtagttttaataaaatcatttagagtgagtgagtgccaaccgatgttgcagaatcttttgtctaggcactccaagatgccaataagtcattttaaaatgtatgtcagagatgtaaacaaacattttggattttttttaaacagtatttatttggaatgttttcatttatctaaataactattgctattatgaattatggaaaattaatattatgtgtggcatatagtgacttcttaacacacacatcacgcaatctgcaaacccagaaaatgtgtatatctgtctttagaaattagtgtttatatcacttacagtggtttgtgaataaagaaaactggtttgtaatatcaaaaaaataaaagcttagtctgaaaaggt

SEQ ID NO: 10096 - protein, 370 aa, Homo sapiens
MNCEREQLRGNQEAAAAPDTMAQPYASAQFAPPQNGIPAEYTAPHPHPAPEYTGQTTVPEHTLNLYPPAQTHSEQSPADTSAQTVSGTATQTDDAAPTDGQPQTQPSENTENKSQPKRLHVSNIPFRFRDPDLRQMFGQFGKILDVEIIFNERGSKGFGFVTFENSADADRAREKLHGTVVEGRKIEVNNATARVMTNKKTVNPYTNGWKLNPVVGAVYSPEFYAVPGFPYPAATAAAAYRGAHLRGRGRTVYNTFRAAAPPPPIPAYGGVVYQDGFYGADIYGGYAAYRYAQPTPATAAAYSDSYGRVYAADPYHHALAPAPTYGVGAMNAFAPLTDAKTRSHADDVGLVLSSLQASIYRGGYNRFAPY

SEQ ID NO: 10097 - DNA, 557 bp, Homo sapiens
ctgcacctgctggcggtcgtgccaggcagcccgggcgagcgaaggcgcgcggcgcgcacgacagatgactggagtcatttacattgctagcacgtgggtgccgtttgctgttgcctcggacttctcccgtgctgtgttttcccggtgaggaaacaggaggcactttgcagccgacaatgaaatcttggcagctaattgcagtcgtgggagatgcccttcaggatatcaaagcagactgcaatacctgcgtggaaatagaagacagaaaggcttaattataaatctcttgggagaagaggcaaggcctgtcggttcctgggaaaacagtgttgcatctctaggcttgaaggtctgctcttctgctcagaagtttcaagacaacagatgaattgtgaaagagagcagctaagggtggagggatgagattgaactatcaaagcctggctaagaaaaagcaaaatccttgatggaaatctctggcacagggaaaatgagcagaactggcaccaaggaagcattaggagagagaagaagatagtggggaagcagaaaggaac

SEQ ID NO: 10098 - protein, 32 aa, Homo sapiens
MKSWQLIAVVGDALQDIKADCNTCVEIEDRKA

SEQ ID NO: 10099 - DNA, 4008 bp, Homo sapiens
gtgcatttgtgttgtgggggcatggggtgcatttgtgtgtatatatgtgtggatgtagggtgcgtttgtctgtgtgtatttgtgtgggcatggagtgcatttgcgttgcgggggtgtggagtgtgtttgtgtgtgtgcacacgcacatggttctcatggtcctcccgttttcaactgaacctgtaattagctcctcagagaccaggtttcaagacaacagatgaattgtgaaagagagcagctaaggggtaatcaggaagcagccgctgcccctgacacaatggctcagccttacgcttcggcccagtttgctcccccgcagaacggtatccccgcggaatacacggcccctcatccccaccccgcgccagagtacacaggccagaccacggttcccgagcacacattaaacctgtaccctcccgcccagacgcactccgagcagagcccggcggacacgagcgctcagaccgtctctggcaccgccacacagacagatgacgcagcaccgacggatggccagccccagacacaaccttctgaaaacacggaaaacaagtctcagcccaagcggctgcatgtctccaatatccccttcaggttccgggatccggacctcagacaaatgtttggtcaatttggtaaaatcttagatgttgaaattatttttaatgagcgaggctcaaagggatttggtttcgtaactttcgaaaatagtgccgatgcggacagggcgagggagaaattacacggcaccgtggtagagggccgtaaaatcgaggtaaataatgccacagcacgtgtaatgacaaataaaaagaccgtcaacccttatacaaatggctggaaattgaatccagttgtgggtgcagtctacagtcccgaattctatgcaggcacggtcctgttgtgccaggccaaccaggagggatcttccatgtacagtgcccccagttcacttgtatatacttctgcaatgccaggcttcccgtatccagcagccaccgccgcggccgcctaccgaggggcgcacctgcgaggccgcggtcgcaccgtgtacaacaccttcagggccgcggcgcccccgcccccgatcccggcctacggcggtgttgtttaccaggatggattttatggtgcagacatttatggtggttatgctgcataccgctacgcccagcctacccctgccactgccgctgcctacagtgacagttacggacgagtttatgctgccgacccctaccaccacgcacttgctccagcccccacctacggcgttggtgccatgaatgcttttgcacctttgactgatgccaagactaggagccatgctgatgatgtgggtctcgttctttcttcattgcaggctagtatataccgagggggatacaaccgttttgctccatactaaatgacaaaaccataaaaaccttccaatgtggggagaaaggaagctttccgaggcctgagtattgcaatacatgcagtagtacatcattttagcaactctaaaaaaaaaaaaaatacaaataaaaaggaaaaaaaattacattttttatcttatacctcagatattttgttctgtgtattttaatattgtgggtctttaatttctgaaggttccgtagtttggttgctggctgtaggagtttttgtggttgatctagacagatgctagataatgaataaaaactggtttagggccatatccagagtgctatattatgtaaatgaattatatatgctgaatattaagctactggggttatcagctatttgggaagagtgtaagtgactacagtagtcatttttttctgcacctgcattattttattttgcgaaaggggaggttgggaggggcttaggggattggaactggggtttggctgaaagaaaaaaaaaaaaatgtaactgatgaatctaaacgacccactgcaccaacaatcatttatcaatggttctaagttactcattgccagttcaagccaaaggtcatgttgttaagggggtgcttctagtagcacttgtgcatctgagttgaatgaagctgtgcaaacccaccctttaaaccattccacccggcagtattcagcttcttaaccagtcgctatttaggaaaaaaaacccactagttaggccatcaacaagcattctttttatatttcttccagtataataaattattgatatcactgctgacttttatattatgggagggaaaaaataacattaataaaaaggtgataaaaaagcactgtttctatttttttctttttttccaaaaaaagaaagtaataaaaacttaaattctttgtaccagttaaaaaaaatgtataaaatttacatctgtgcagtggagttgttaagttctagaaacagtctatgaagctttagttttagcctagtagaacaactgttagagacagacgtataatttttatggaattacatgataatcatattcggatttatagaagcattttacaagtattgcaatcattgagtagagataatcatggtattttcatcagcttggtactttttgaaacgtgactgcgttgtgtgaacaatctgcaatttttcagtccgtgagatcctgcccttccacctctttcccatacccccaaggattatctcaaaatgatctctttagttctgtctccaaggcccaggacacttgtcagaaggatgcaaaaaaagaaaaaagtacatccaccctcttaatcccaaaagaacaaagtctccccacctttctcggatgcagggccagagtgacacagccgaaaaattgcagtttgtctgtacttctgtttgaactttccacgttgtcctgtttacaagttaacttaagttggggtatccgtcacgggtcttcctgttttgtatttaaataaaaacaacagcagcaggctgtccctgagtagttttgctgccataggttaagtcctcatgtgtacagtgcaggccctgtggcccgcacttcagtaagttatcaactctcaccgctgtgaacctgccaatccgctgtaacaactctgctttaaaacaaaaccaaacaaaactttaaaaaaaaatgtgtgatccagctttctcttgccatcctatgtgcatgccgtaagatcagttggatattaaaccatcaataaagtttcacaagatttgaaaacaaagtttctgtagcttcgatacctaagacagacgatagtgatcttgaaaagagaaaagggggaggggggagctacttatcagccaaaagcatataaagtgttcttttcaccagacttctttgggtgggtgaggggaggggcaagagggtgttttatagcatcactaagacattctcattcccccacctggaaaacagtgttatggcaatgggtgcctggttgatgttcttaaaggaaacgaattattaaaacactatgacatcctccagagggaagaaagagtaggagcagggggctatggagaataaatttctcccaattgccgcctcagatttcaaaatccagaatttgtattgtgtttcgaatcacaaacatagaattcttactgtgttggttaaagtaaaattcatttgcagttttgattttcatcaatgagctgtactttcccccatgactgtatgtagttttaataaaatcatttagagtgagtgagtgccaaccgatgttgcagaatcttttgtctaggcactccaagatgccaataagtcattttaaaatgtatgtcagagatgtaaacaaacattttggattttttttaaacagtatttatttggaatgttttcatttatctaaataactattgctattatgaattatggaaaattaatattatgtgtggcatatagtgacttcttaacacacacatcacgcaatctgcaaacccagaaaatgtgtatatctgtctttagaaattagtgtttatatcacttacagtggtttgtgaataaagaaaactggtttgtaatatcaaaaaaataaaagcttagtctgaaaaggt

SEQ ID NO: 10100 - protein, 397 aa, Homo sapiens; identical to SEQ ID NO: 1562

SEQ ID NO: 10101 - DNA, 569 bp, Homo sapiens
actcactctgaccctccctccttcacacacgcgcggcccgggtcgggggcgcgtccgatgctagagcgggagctagctggggggcgtgcagagctgagccaggcgagcggacggggaggagcgagctcggcagcagccgaggctagaggagccgctcggatttccaggcaggtggaaaaccgcggcaggacctcccgcgccctctctgggtaggaggcgcggctcagccctgtccagagcgcagaggcggctcagctcgtagctttttcaccggtgcgtgtgcaggagcggcggccgaaatctgtgcatcaggggaaggatgactcggagaggatggggacagactaaatggctttcactccaagacagactgggtgcagtctggtcaggatcgcccctcccaggcgtgcggggcctccttgcccttcccggctgcgccctccagccctgagcgcaacccgcatggctcaactctctgggcccaagcaaggacccaggcggagctgggaaggacaggtggcaagcccctgagccagggataagcaccctccgggggagaggggctcggg

SEQ ID NO: 10102 - protein, 51 aa, Homo sapiens [sequence omitted]

SEQ ID NO: 10103 - DNA, 4154 bp, Homo sapiens
gaggtgagagggatactgcgagagggctaggggcggccagtccggggctgccggccaaggctaggcgctgccagcccgattctcctctgctctccacccccgcctcacccagtggccggccggacctgcaccccgcgcttgaccccgctcatcctccccccgcccggccgggcgcgctcctccccggccggcccctcggcgcgcggcgcgctggaggcgaacgcgggctgaggcgaacgcgggctgagccgagcgcagtggccgccgaccaccgagcgccccgcgccgctccctgcatgtgcggcccgcggcggctcgcagctcccggcagcagcctcggcagcttcggccgcgcctcgagaggcggccgcagaggctccagcggcggccgagcggccgagcccgggctgggagacaccatgcgccgcgtccttcggctgctcctcggttgcttcctcaccgagctgtgcgcccgcgtgtgccgggcgcaggagcgagcgggacacgggcagctggcgcaactgggcggcgtgttgctgctggcggggggcaaccgctccggggccgcctccggagaggccagcgagggcgctgaggcatcggacgcgcccccgacccgggcgcccacgccggacttctgccggggctacttcgatgtcatgggccagtgggacccgccgttcaactgcagctcgggcgacttcatcttctgctgcgggacttgtggcttccggttctgctgcacgtttaagaagcggcgactgaaccaaagcacctgcaccaactacgacacgccgctctggctcaacaccggcaagccccccgcccgcaaggacgaccccttgcacgaccccaccaaggacaagaccaacctgatcgtctacatcatctgcggggtggtggccgtcatggtgctcgtgggcatcttcaccaagctggggctggagaaagcgcaccggccccaaagggagcacatgtccaggctctatgacaatctgctgtttatggaggcacagatttctttccaagaggacgaacctgcccctggagagtggagtgtcggacttcaaacctggacagtctgagtgcacggatccttggccgctaggctgcactgcgtttgagtgcaaacctgcaggaattccagacttctcagatcacagagaagtacgcgatgccctgcaaacaacagctcatgcatcggggccagttcaagaagctaccgtaagatgaagtctaggaatgctttctatatcggccccggcaggcccagacgtcttggtggaggcgttggtgagaaatgaccttggggacagaagcacatatgtgaagctctctacacttgaagccagtagggaacacatgtcattattttgtccaccttcaaacagaattggaaatccaagtggcaaatggcagataagggtcctgtgtgtttttaaaacatgcttcagaagaactggcaccccttggaaagaaatagcaacaaataatgataaatgcacctcctcctcttgccttttgccttccagtttctctcctgcctctcatctttctatgcatttgtggttatcctaaggctttgaccagcttcccaggctggagaagtccatgtgtgcatgcatctactgttggccacagaaaagtcttaatttatttttctttgcagggtatgttgacttctctttgggcactgagtccttgcattttaaaaatcaacttcattgaagtataatttacacaataaaatgcacacattgtaagtgtgtagtttgatgagcttggacaaatgtctatacctgtgtaatcattactctagaaagctcactcatgcccattgcccttgcatttttgaaaaataattgatgcttcttgtgcaagaagaagtgctcaggaactctattcaagtgtttaaaagtcaacacatagattggacattgggatacctggaggctttgaagcaagataccgggactctgagttctgtttggaaatattggtgtcatatatttgtcattgtaattggaaagaaaagagatgcaccattttcttcttgttctttggataagctaagctcattcccatcttggagctgttgcactggcccttgtgtggctggtccctcctcatcaccagggtcccagctccaatgtcatcttctctgagaagccgtccctgaccaggcttagttgcttcccaccccagcctgacacactccagcccatcacccagtcagtgttatttgcttcatttttacattatggtctaaaattaacttgctagtttactggtttactagtttattatctgtctccttccattatccctctccttccctccttcccttccccttccttccttccttccttccttccttcgagacacagtcgtactctgtcaccccggctggagtgcagtggtgtgatcttgcctcactacaacccctgcctcctgggttttagcgattcttctgcctcagcctcccgagtagctgggactacaggcacccaccatgatgccaggctaatttttgtatttttattggagacagggtttcaccatgttggccaggctggtctcgaactcttgacctcaagtgatccacctgtctcggcctcccaaagtgctgggattacaggcatgagccactgcacctggcccttttattattcatagtaagacacacagggaccacaattgtctcttctactcagtagttggattctgagtgcctagttcagtatttggcaagtaagagttctgcatttgatatcctggtttacctggcacaacaaagtatctccaaattcattcattcattctttcattcattcgataggtatttactgaacatctaacttatgcccaacactgtgctgagagatatgagataaccatgaatagtacaaaagcaatccctgcccttgaagagcaaacagccaaatatcaggagacaggtaacacacaaggaaatgtacaagaaagttgagccagcacttttataagtactggttctagtactagctttcataagaaagtactggttctagtactagctttcagtactctcttgtgaaattttcaatattcagtcatttcaacctcaaaaatggcaacataattatgtttcaacataattgttgttttaaacaaacaattttgtttcaacataattctcctgaactgggtggaaggctatcaagaaaaagcttagcttcttcttcaggtaactgcaagagacagggttctctagagaaacagaacaaatatacaaagagattcattataaggaattggaagtccaaaatctccagagcctctgtacttgtacaagtctgaaggccgacaggcaggagaattctctctttttggggcaaaggtcagtgttttgttctatccaggctttcagatgattggttgaggctcactcacattagaagggcaatctgtcttactgccattagaatgcaacctgttttacttagcttactgatttcaatgttaatctatttcaagagcaccctcacagaaacacccagaataatgtttgatgaaatatctgggcaccctgtgacccagtcaagttgacacatgacactaaccatcacagtacgcttagggtcttgtcactcggagtgtggcctgtgaaccagcagcatttttatcttctgggagcttgggcacgatctcaggccccacctcctgcttattgattcagaatctgcattttaacaagatccccaggtgatctggatgcaccgtaacatctgagaagcactcaaactatgtgccgcaaacaaacgccaaattcttaggcatttgtgtggcttggagcacatagttggttctttctactgtctaattcattacattttttcagcacattcctgtctataaaatgtttttttgtatgcaccccaatatatgcacatttataagcatatgcatgaacccacgaacaatgattaggtacattatgaagcatacgtaaggacagaaatttcaaaccaagcttgagggtgaaataaatattatttgaaaacctgttgctaattgtgatgacttcatactatcattagttactatctcaatgcataatgtacagtgacgggtgaagtttatcattaataaaaaaaatctggattttaaccatt

SEQ ID NO: 10104 - protein, 262 aa, Homo sapiens; identical to SEQ ID NO: 1572

SEQ ID NO: 10105 - DNA, 1499 bp, Homo sapiens
ctcaccctctggccgcctcctcccgctggtgactgaggcggacttgagacacgtagcctgggagcccgtggccccgaaatcttcgggtttggggagagggtccatggcacccctcggattccaggctctatgacaatctgctgtttatggaggcacagatttctttccaagaggacgaacctgcccctggagagtggagtgtcggacttcaaacctggacagtctgagtgcacggatccttggccgctaggctgcactgcgtttgagtgcaaacctgcaggaattccagacttctcagatcacagagaagtacgcgatgccctgcaaacaacagctcatgcatcggggccagttcaagaagctaccgtaagatgaagtctaggaatgctttctatatcggccccggcaggcccagacgtcttggtggaggcgttggtgagaaatgaccttggggacagaagcacatatgtgaagctctctacacttgaagccagtagggaacacatgtcattattttgtccaccttcaaacagaattggaaatccaagtggcaaatggcagataagggtcctgtgtgtttttaaaacatgcttcagaagaactggcaccccttggaaagaaatagcaacaaataatgataaatgcacctcctcctcttgccttttgccttccagtttctctcctgcctctcatctttctatgcatttgtggttatcctaaggctttgaccagcttcccaggctggagaagtccatgtgtgcatgcatctactgttggccacagaaaagtcttaatttatttttctttgcagggtatgttgacttctctttgggcactgagtccttgcattttaaaaatcaacttcattgaagtataatttacacaataaaatgcacacattgtaagtgtgtagtttgatgagcttggacaaatgtctatacctgtgtaatcattactctagaaagctcactcatgcccattgcccttgcatttttgaaaaataattgatgcttcttgtgcaagaagaagtgctcaggaactctattcaagtgtttaaaagtcaacacatagattggacattgggatacctggaggctttgaagcaagataccgggactctgagttctgtttggaaatattggtgtcatatatttgtcattgtaattggaaagaaaagagatgcaccattttcttcttgttctttggataagctaagctcattcccatcttggagctgttgcactggcccttgtgtggctggtccctcctcatcaccagggtcccagctccaatgtcatcttctctgagaagccgtccctgaccaggcttagttgcttcccaccccagcctgacacactccagcccatcacccagtcagtgttatttgcttcatttttacattatggtctaaaattaacttgctagtttactggtttactagtttattatctgtctccttccattatccctctccttccctccttcccttccccttcctt

SEQ ID NO: 10106 - protein, 111 aa, Homo sapiens
MLSISAPAGPDVLVEALVRNDLGDRSTYVKLSTLEASREHMSLFCPPSNRIGNPSGKWQIRVLCVFKTCFRRTGTPWKEIATNNDKCTSSSCLLPSSFSPASHLSMHLWLS

SEQ ID NO: 10107 - DNA, 2534 bp, Homo sapiens
ggtcgctgggatattcagttaagggagcttcactttggagatatatcctgaatataaccccttgaccccagacaaatgatttagaccataaagaaatattcacgcagcccagaattgtgcttctaacaagagcacgaagagctgctttgtaggagaatcacttgaacccgggaggcagaggtttcagtgagctgagatggcgtcaccgcactcctgcctgggcgacagagcgagactccatctccaaaaaaaaaaaaagaaaaaagaaaaaaaaaaaaagacctactttgtgagagagtatagtgtcctccatgatgtcaacctcaatgaatcagataggtcccaagccatatctgtgggttaataatccatcatgaatcaattgccattaacttgccaagaactttttttcaatttcagtttgaagtttcactcttctgtgtgcttatttgtttgttggtttgttatgttttagccactgtaggcttctagagagaataaccattcctttcctggcccacgccctttccagtttgctttccagggtagagttactaattaaattccagacacttattaacaaacttttattactagacaggatcatgcacatggatgtaactccttttagctccatcttttcctcactccctctgattggttggtatgaccaaagggccattgtccagttccatatagggaagggatctgtggggtcttgctggctagctccctcacccttccaccttctcactctctccatgcattatgtatgcttcacatgggccttgctcatgtgaaacgaatgcccaggagttcaaggttgcagtgcaaggaggcccaagcattcttctctttgcaatctggtacttacagggttctaagtactccattaaaactgggtgtgtgggaggagaagaaacactgggcagctctcctacaaccagtatccctaggaaggaaatggaagaaaagaccctgtaatttggatgactatgtatggggacagctgaaatacataccacttaagttctccttcactgctgctgctgctgatcggcaatgtgtgaaagcagctgagccaggagagcccagcatgcacgcggctgccactgcaatggcaggtaccagggccggtactacatttgatgaattacaatgccaagaagacatggtttgtaccaggtttgaaaacaaggcctatgtgaataccaatgactttacgagacaataaggaaaaacaacgtagactgagttccccatctagtgacacccacagccctagcttcctccttaagcccctcagactgttttatctctgaactggttagtgaagacttaaaaacatagtcctgcaggttgactaagaaaaatctttaagaatggcaactggtgggtgttaccttcactcactgcaagatctgccgtatatatggtttaaaaagaattttaaaagttagttaaggtcaatcatggtggctcacacctataattttagagctttgggaggtcgagaagcaggaagattgcttgaggccaggagttcaatatcagcctgggcaatatagcaagacctcatctctacaaaattaaattagctggggtggtggcacacgtctgtagtcctagctactcaggaggctgaggcaggaggatcgcttgagcccagaagttcaagggtgcagtgagctatgattgcaccattgcactccagcctgggcaacagagtgagactctgtcaaaaaaaaaaaaaaaaaagttggtagggaaaagctaacaagagacttttgaaaatagaaaatagagtaaatagcattattcaagacacagaaagaaagcaggaaagcatatttgtgagaaataattattaaaggggctaggcacagtggctcacacctgtaatcccagcactttggtaggccaagatggctggatcacctgaggtcaggcgttcaataccagcctggccaacatggtgaaaccccgtctctactaaaaatacaaaaaattagccgagatggctggatcatctgaggtcaggagttcaataccagcctagccaacatggtgaaaccccgtctctactaaaaatacaaaaaattagcgcccaggctggtcttgaactcgtgagctcaagcgatctgctcacctcggcctcccaaagtgctgggattacaggtgtgagccaccttgcctggcacgttttgtctttctttctacttttttttttttttttacactttaagctctaggttacatgtgcacaacgtgcaggtttgttacatatgtatacatgtgtcatgttggtgtgctgcacccattaactcgtcatttacattaggtatatctcctaatgctatccctccccgatcccccaaccccatgacaggccccggtgtgtgatgttccccttcctgtgtccaagtgttctcattgttcaattcccatctatgagtgagaacatgcatttcattcttgatgatggtggtggtgatgatgttgatgacaattatattaataaagcaattgctatg

SEQ ID NO: 10108 - protein, 43 aa, Homo sapiens
MFPFLCPSVLIVQFPSMSENMHFILDDGGGDDVDDNYINKAIA

SEQ ID NO: 10109 - DNA, 12394 bp, Homo sapiens
atgggagctacagggcgcctcgagctcacactggccgcccctccccatccgggcccagcctttcagcgttcaaaagccagggagacccaaggagaggaggaagggagtgaaatgcagatcgccaaaagtgactccatacatcacatgagccactcccaggggcagccagagctgcctcctctgcctgcttctgctaatgaggaaccgtctggactctatcagactgtcatgtcacacagcttttacccgcccttgatgcaacgcacgtcatggaccttggctgcacccttcaaagaacagcatcaccaccgtggacccagtgattccatcgccaacaactactccttgatggcccaggacctgaagctgaaagatctgctgaaggtctaccaaccggccaccatcagtgtccctagggacaggaccggtcaggggctgccatcatcaggaaatagaagctcatcagagcccatgaggaaaaaaacgaagttttcctccagaaacaaagaggattccactaggatcaagttggccttcaagacgtcaatcttctcacccatgaagaaggaggtaaagacatctttgacgttcccaggaagcagaccaatgagtccagaacagcagctcgatgtcatgttacagcaggagatggaaatggaaagtaaagaaaagaagccatctgaatcggacctggagagatactattactatctgaccaatggaattcgcaaagacatgattgcccctgaggagggtgaagtgatggttcggatttcaaagctgatttctaacacgctgctgacgagtcccttcctggagcccctgatggtggtcctcgtgcaggagaaggagaatgactattactgtagcctcatgaaaagcatcgttgattacatcctcatggacccaatggagagaaaacggctctttattgagagcatcccccgcttgtttcctcaaagagtgatccgggcccctgtgccctggcacagtgtctacaggagcgccaagaagtggaacgaggagcatctgcacacggtgaaccccatgatgctcaggctgaaagaactgtggtttgcagaattcagagacctcaggtttgttcgaacagcagaaatactagcgggaaaattgcctctgcagcctcaggaattttgggatgtgatccagaaacactgcctggaggcacaccagactcttctcaacaagtggatccccacctgcgcccagctttttacctcacggaaggagcactggattcattttgctcccaagagcaactatgactcaagtcgaaacattgaggaatattttgcttctgtggcatcattcatgtcgctgcagcttagggagctggtcattaagtcacttgaggacctcgtttcccttttcatgatacacaaagatgggaatgattttaaggagccctaccaagagatgaagtttttcatacctcagctaatcatgatcaaacttgaagtcagtgaacccattattgtcttcaatccatcttttgatggctgctgggaattaatacgtgactctttcctggaaattattaagaactctaatgggatccccaagctgaaatacataccacttaagttctccttcactgctgctgctgctgatcggcaatgtgtgaaagcagctgagccaggagagcccagcatgcacgcggctgccactgcaatggcagagctgaaaggatataatctgctccttggaactgttaacgcagaagaaaaacttgtttctgattttttgattcaaactttcaaggtatttcagaaaaatcaagttggcccctgcaaatatttaaatgtctacaaaaagtatgttgacttattggataacacggcagagcaaaacatcgctgcgttcctgaaagaaaatcatgacattgatgattttgtgacgaagatcaatgccataaagaaacggagaaatgaaattgcatccatgaacatcaccgtgcctttagccatgttctgccttgatgctacggccctaaatcatgatctctgtgagcgagctcaaaatcttaaagaccatctgattcaattccaagtggatgtaaaccgagacaccaataccagcatttgtaatcagtacagccacatcgcagacaaagtcagtgaggttcctgccaacactaaggagctggtatccctcattgaattcctaaagaaatccagtgctgtcactgtgttcaaactcaggaggcaacttagagatgcaagtgaacggctggagttcctgatggactatgcagacttgccgtaccagattgaagatatctttgacaacagccggaacttgctccttcacaagagggatcaggcagaaatggatctgattaaaagatgctcagaatttgagttgagacttgagggctaccacagagaactggaaagttttaggaagcgcgaagtgatgactacagaagaaatgaagcacaatgttgaaaagcttaatgagctttcaaagaacctaaatcgggcgtttgcagagtttgagttgatcaataaggaggaagagctattggaaaaggagaagagtacttaccctcttctgcaggccatgctgaagaacaaagtaccttatgagcagctgtggtcgacagcctatgagttcagcatcaagtcagaggaatggatgaatggacccctcttcttactgaatgctgagcaaattgcggaggagatagggaatatgtggaggacaacgtataaactgatcaagaccttgtctgatgtgcctgcacccaggcgcttagcagagaatgtgaagatcaagatcgataagttcaagcagtacattcccatcctcagtatttcctgcaacccaggaatgaaagaccgacactggcagcagatcagtgagattgttggctatgagataaagcccaccgaaacgacctgcctctcaaatatgctcgaatttggattcggcaaattcgttgaaaaattggagcccattggtgcagctgccagcaaggaatactctctggagaaaaacttggatagaatgaagttggattgggttaacgtgacgttcagcttcgtgaaatacagggacactgatacaaacatcttgtgtgcaattgatgacattcaaatgctacttgatgatcacgtgataaagacccagaccatgtgtggctccccattcatcaaaccaatagaagcagaatgccggaaatgggaagaaaagctaattcgcatacaagacaatttggatgcctggttgaaatgccaagccacctggctgtacctggaaccaatcttcagttcagaggacatcatagcccagatgccagaagaggggaggaaatttggcattgttgatagttactggaaatcacttatgtcccaagcggtgaaagataacaggattctggtggcagccgaccagccacggatggcagagaagcttcaagaagccaactttctcttggaggacatccagaaagggctgaatgattacttggagaagaagagactattcttccccagattcttcttcctatcaaacgatgagctgctggaaatcttgtccgagacaaaggaccctctccgagtgcagccgcacttgaagaagtgctttgaaggaattgccaagcttgagtttacagacaatctggaaattgtgggcatgatcagctcggaaaaagaaactgttccattcatacagaaaatctacccagctaatgccaagggcatggtggaaaagtggctccagcaggtggagcagatgatgctggccagtatgcgagaagtcattggacttgggattgaagcatatgtcaaggtccctcgaaatcactgggtcttacagtggcctggacaggtggttatctgtgtctcctccatcttttggacccaggaggtgtcccaagccctggcggaaaataccttactggattttctgaaaaagagcaatgatcagattgcgcagattgtccagctggtgcgagggaagctgagcagtggagctcgactcactctcggggccctcacggtcatcgatgtccacgcccgcgacgtggtggccaagttatctgaggacagggtctccgatctgaatgatttccaatggatctcacagctgcgctactactgggtggccaaggatgtgcaggtgcagattatcaccacagaagccttgtatggctatgagtacctgggaaactccccccggctggtgatcacacccctcaccgaccgctgctacaggacactgatgggagctttgaagctgaaccttgggggtgctccagagggtccagctgggactggcaagacagaaaccaccaaagatttggccaaagccttggctaagcagtgtgtggtcttcaactgctccgatggtttggattacaaagctatggggaagttcttcaaggggctggcacaggctggagcatgggcgtgctttgatgagttcaacaggatcgaggtagaagtgctgtctgtggtcgctcagcagatcctcagcatccaacaagccatcattcggaagctaaagacattcatctttgaagggactgagctctctctgaacccaacctgcgctgtgttcatcaccatgaaccccgggtatgctggcagggctgaactgcccgacaatctcaaggccttgttccggacagtggccatgatggtcccagattacgccctcattggagaaatctccctctactccatggggtttctggactccagaagtctcgcccagaagatcgttgcgacctaccgcctgtgctcggaacaactgtcctctcagcatcactatgactacggtatgcgcgctgtcaagtctgtgcttactgccgcaggaaacctgaagctcaagtatccagaggagaatgaaagtgtcctgctgctccgggcattgcttgatgtcaatctggccaagttcttagcgcaagatgtccctctgtttcagggaattatatctgatttatttcctggagttgttcttccaaagccagactatgaagtttttctgaaagtgctgaatgataacatcaaaaagatgaaactccagccagtaccttggtttatagggaaaattatccagatctacgaaatgatgctggtgagacatggctatatgattgtaggagaccccatgggcggcaagacctctgcttataaagtgttggctgcagctctcggcgatttacacgcagccaatcagatggaggagtttgctgtggagtacaagatcatcaaccccaaggctatcacgatggggcagctgtatgggtgctttgaccaagtgagccacgagtggatggatggtgtccttgccaatgctttccgggagcaagcgtcttcactctctgatgatcgcaagtggattatatttgatgggccagtggatgctatttggattgaaaatatgaacactgttctggatgacaataaaaagctgtgtctcatgagtggggaaattatccagatgaactccaagatgagcctgatcttcgagcccgccgacctcgagcaagcctctccagccactgtgagcaggtgtgggatgatctacatggagccccatcaactaggctggaagcccctgaaggattcctacatggacaccctgccctccagtctcaccaaggagcacaaagaattggtcaatgacatgttcatgtggcttgtccagccctgcctggaatttggtcgccttcattgtaaatttgttgtccagacatctcccatccaccttgccttctcaatgatgagactgtactcttctctgcttgatgaaatcagggcagtagaagaggaggaaatggaattaggtgaaggcctgtcaagtcaacagatctttctctggctccaaggactgtttctcttttccttggtgtggaccgtggctggcaccatcaacgcagacagcagaaagaaatttgatgtgtttttccgcaacctgatcatgggcatggatgataaccacccaaggcccaaaagcgtcaaactcaccaaaaacaacatctttccagaaagaggaagcatctatgatttttattttatcaaacaagctagtggacattgggaaacgtggacacagtatatcaccaaagaggaggaaaaagttccagctggtgcaaaggtctcagaactcatcatccccacaatggagacagcccggcagtccttcttcttgaaaacctacttagaccatgagattccaatgctgttcgtgggtcccacaggcactggcaaatcagccatcaccaacaacttccttctccaccttcccaaaaatacgtacctacccaactgcatcaatttctctgccagaacctcagccaatcagacccaggatatcatcatgtccaagctggatcgacgacggaagggccttttcgggcctcccatagggaagaaagcagtggtgtttgtggatgacctcaacatgccagccaaagaggtgtatggggcccagccacccatcgagctcctgaggcagtggattgaccatggttactggtttgacaaaaaagacacaaccaggctggacatcgtggacatgctgctcgtgacagccatggggccccccgggggaggaaggaatgacattactggacgattcactcgccatctgaatatcatttccatcaatgcctttgaggatgacattttaaccaagattttcagttcgattgttgactggcacttcgggaaagggtttgatgtgatgtttttaaggtacggaaagatgctggtccaagctactaagacaatttatagagatgcagtggagaacttcttgccaactccctcgaagtcacattacgtctttaacctgcgggacttctcacgagtgattcaaggggtcctgctgtgccctcacacacacctgcaggatgtagaaaaatgtatccggctttggatccatgaggtttatcgggtcttctatgatcgtctgattgacaaggaggacagacaggtctttttcaacatggtgaaggaaaccacctccaattgcttcaagcagaccatagagaaggtgcttatccacttgtcacccactggaaagatagtcgatgataacattcgaagcctcttctttggagattatttcaagccagaaagtgaccaaaaaatctacgatgagatcactgacctgaaacagctgactgtggtcatggagcactatctggaagaattcaacaacatcagcaaggcccccatgtccctggtcatgttcaggtttgccattgagcacatctctaggatctgccgtgtcctgaagcaggacaaaggccacctgctcctggtgggcatagggggcagcgggcggcaaagtgccgccaaactgtccacattcatgaacgcatacgagctataccagattgagatcaccaagaactacgcaggcaatgactggcgagaagatcttaagaagatcatactgcaggtcggtgtggccaccaagagcaccgtgttcctcttcgccgacaaccagatcaaggatgaatcattcgtggaggacatcaacatgcttctgaacacaggtgacgtgcctaacatcttccctgctgacgagaaggctgacatcgtggagaagatgcagactgcagccaggacccaaggagagaaggttgaagtcactcctctttctatgtataacttctttattgagagggtaattaacaaaatctccttttcattagccatgagtccaataggggatgccttcaggaaccgcctgcggatgttcccttcgctgatcaattgctgtacgattgattggttccagtcctggcccacagatgccctagagttggtggctaacaaatttctagaggatgtggagcttgatgacaacattcgggtagaggtcgtgtccatgtgcaaatatttccaagagagcgtcaagaagctgtcactcgattattacaacaaacttcgaagacacaactatgttacccccacctcctaccttgaattgattctaaccttcaagacgctcctgaatagcaagaggcaagaggtggctatgatgaggaaccgctacctgacaggcttgcagaaactcgactttgcagcttctcaggtagcggttatgcaaagagaactgacagctcttcaacctcaactcatcctcacctccgaggaaactgccaagatgatggtgaaaattgaagcggagacgagagaagctgatggaaagaaacttctggtgcaggcagatgaaaaagaagccaatgttgctgctgccattgcccaaggaatcaagaacgaatgtgagggggacctagctgaggcaatgcctgcactcgaggctgcactagctgctctggacaccctgaacccggccgacatctcgctggtgaagtcgatgcagaacccaccaggccctgtcaaactggtcatggagagcatctgcatcatgaaagggatgaagccagagaggaagccagaccccagtggctccggtaagatgatagaagattactggggggtatccaaaaagattcttggggatctgaaattcttggagagtcttaagacatatgacaaagacaacatccccccactgaccatgaagcggatccgggaaaggtttatcaatcacccggaattccagccagctgtcattaaaaatgtatcgtcggcctgcgagggtctgtgcaagtgggtgagggccatggaggtgtacgatcgcgtggccaaggtggtggctcccaaacgggagcgactgagggaggcagaggggaagctggctgcacagatgcagaagctgaaccagaaaagagcagagctgaagctggtggtagatcggctccaggccctgaatgacgactttgaagagatgaacaccaagaaaaaggacttggaggaaaacattgaaatctgctcccaaaagctggtcagggcagagaaactgatcagtggtcttgggggagagaaggacagatggaccgaagctgcccgacagctggggatccgctatactaatctgactggtgacgtgttgctgtcctcaggaactgtggcttacctgggcgcttttacagtggattatcgggtccagtgccaaaatcagtggttggctgaatgtaaggacaaggtcatccctggcttcagtgacttcagtctcagccacacgttaggggatcccataaaaatccgtgcctggcagattgctgggcttcccgttgactccttctccatcgacaatggcatcattgtatccaattccagacgctgggccttaatgattgaccctcacgggcaggccaataaatggattaagaacatggagaaggcgaataaactggctgtcatcaagttctctgatagcaactacatgaggatgctggaaaacgcgctgcagttaggcacccctgtcttgattgaaaacattggagaagagctggatgcttctatcgaacctatcttgctcaaggcaacattcaaacagcaaggagttgagtacatgaggctgggtgaaaacatcattgaatattccagggattttaagttatacatcacaacccgtttgaggaatccacattacctcccagaagttgccgtgaaggtctgtctcctcaacttcatgatcacccccttgggtctccaagatcaactccttggcatcgtggctgcgaaggagaagccagagctggaagagaaaaagaaccagttgattgtggaaagtgccaagaacaagaagcatctcaaggaaattgaagataagatcttggaggttctctccatgtccaagggtaacatcctggaggatgaaaccgccatcaaagttctgtcctcctccaaagtgctatctgaagagatctcagagaaacagaaagttgcttccatgacagaaacgcagattgacgagactcggatgggctacaagccagtggctgtgcattctgccaccatcttcttttgtatctcggacctggccaacatcgagccgatgtaccagtactccctgacttggttcataaatctctacatgcattccttgacccacagcacgaagagcgaggaactgaatctgcgcatcaagtacatcattgaccatttcaccctgagcatctacaacaacgtgtgccgttctctgtttgagaaggacaagctactcttctctctcctcctgaccatcggcatcatgaaacagaagaaggaaattacggaggaggtgtggtacttccttctcactggaggcatcgcactggataacccctaccccaatccagctccccaatggctgtctgagaaggcatgggcagagattgtccgtgcatctgccttacccaaactgcatggcctgatggagcatttggaacagaacctgggtgaatggaagctgatctatgactcggcctggccccatgaggagcaactccctgggtcttggaagttctctcaaggattggagaagatggtgatccttcgatgtttgcggcctgacaaaatggtgccagcggtccgggagttcattgctgaacatatgggaaagctgtatatcgaagcccctacgttcgatctccagggatcctacaatgattccagctgctgtgcgcctttgatttttgtgttgtctccaagtgcagacccaatggcaggcctgctgaagtttgctgatgatcttggtatgggaggtaccagaacacagaccatctcccttggccaaggccaaggccctattgctgccaaaatgatcaacaatgccatcaaagacgggacctgggtggtcttacagaactgccacctggccgcaagctggatgcctaccctggagaagatttgtgaggaggtgattgttcctgagagcaccaatgccagattcagactctggctaaccagctatccatcagagaagtttccagtcagcattctccagaatggaatcaaaatgaccaatgagccccccaaagggctccgggccaacctgttgcgctcctacctcaatgaccccatctcagatcctgtgttcttccaaagctgtgcaaaggcggtgatgtggcaaaagatgttatttggcctttgtttcttccacgccgttgttcaagagagaagaaacttcggccccctagggtggaatattccctatgaattcaacgaatctgacctgaggattagtatgtggcagatccagatgtttctcaatgactacaaggaggtgccctttgatgctctgacctacctgacaggggaatgtaattacggaggcagagtgactgatgacaaagaccggcgtctcctgctgtcacttctgtccatgttctactgtaaggaaattgaggaggactattactccctcgctcctggagacacttactacatccctcctcatggctcctaccagtcctatatcgactatctcaggaatctccccatcacagcccacccagaagtgttcggcctccatgagaacgcagacatcaccaaagacaaccaggaaaccaaccagctgtttgagggggtcctgctgaccctccctagacagtcaggaggaagtggcaagtcccctcaggaagtggttgaggagttggcacaagacattctctccaagcttcccagagactttgacctggaagaggtcatgaagttgtaccccgtggtctatgaagaatccatgaataccgtcctaaggcaggagctcatcagattcaacaggctgaccaaagtggttcggaggagcctcatcaatcttggccgagccatcaaaggacaggtcctgatgtcctcggagctagaggaagtctttaacagcatgcttgtgggtaaagtgccagccatgtgggcagccaagtcttacccatcactgaagcctctggggggctacgtggctgacctgctggcccgcctgaccttcttccaggaatggattgacaaggggccccctgtggtattttggatctctggattctacttcacacagtcttttttgactggcgtctctcaaaattatgcccggaaatataccatccccattgaccacattggatttgagtttgaggtaaccccacaagaaacagtgatggagaataaccccgaagatggggcctacatcaaagggctcttcttagaaggtgcccgttgggacaggaaaacgatgcagattggggaatctctccccaaaatcctctatgacccactgcccatcatttggctgaaacctggggagagcgcaatgtttctgcatcaggacatctatgtgtgtccagtctacaaaacaagtgcccgcagaggaaccctctccaccacaggccactctaccaactatgtcctctccattgagcttccaacagacatgccccagaagcactggataaaccgaggggtggcctcactgtgccagctggataactgatggcatttgtctcaagacagaaaataaaaagcatttcattctt

SEQ ID NO: 10110 - protein, 4116 aa, Homo sapiens; identical to SEQ ID NO: 1574

SEQ ID NO: 10111 - DNA, 3742 bp, Homo sapiens
agagtcaaaaccatctccaagctgggtgcaatgtctcatgccagtaatcccagctactcaggaggctgaggagagaggattgcttgagcccaggagttcaagtctagcctgggcaatatggcaagacctcatctcttaagaaaagcaaaactccaccttccatgccccagatgaaaagtgataaaagagagtgggcctttgtgaagaccgcaagacataactggtattcacgtagattcttcttcctatcaaacgatgagctgctggaaatcttgtccgagacaaaggaccctctccgagtgcagccgcacttgaagaagtgctttgaaggaattgccaagcttgagtttacagacaatctggaaattgtgggcatgatcagctcggaaaaagaaactgttccattcatacagaaaatctacccagctaatgccaagggcatggtggaaaagtggctccagcaggtggagcagatgatgctggccagtatgcgagaagtcattggacttgggattgaagcatatgtcaaggtccctcgaaatcactgggtcttacagtggcctggacaggtggttatctgtgtctcctccatcttttggacccaggaggtgtcccaagccctggcggaaaataccttactggattttctgaaaaagagcaatgatcagattgcgcagattgtccagctggtgcgagggaagctgagcagtggagctcgactcactctcggggccctcacggtcatcgatgtccacgcccgcgacgtggtggccaagttatctgaggacagggtctccgatctgaatgatttccaatggatctcacagctgcgctactactgggtggccaaggatgtgcaggtgcagattatcaccacagaagccttgtatggctatgagtacctgggaaactccccccggctggtgatcacacccctcaccgaccgctgctacaggacactgatgggagctttgaagctgaaccttgggggtgctccagagggtccagctgggactggcaagacagaaaccaccaaagatttggccaaagccttggctaagcagtgtgtggtcttcaactgctccgatggtttggattacaaagctatggggaagttcttcaaggggctggcacaggctggagcatgggcgtgctttgatgagttcaacaggatcgaggtagaagtgctgtctgtggtcgctcagcagatcctcagcatccaacaagccatcattcggaagctaaagacattcatctttgaagggactgagctctctctgaacccaacctgcgctgtgttcatcaccatgaaccccgggtatgctggcagggctgaactgcccgacaatctcaaggccttgttccggacagtggccatgatggtcccagattacgccctcattggagaaatctccctctactccatggggtttctggactccagaagtctcgcccagaagatcgttgcgacctaccgcctgtgctcggaacaactgtcctctcagcatcactatgactacggtatgcgcgctgtcaagtctgtgcttactgccgcaggaaacctgaagctcaagtatccagaggagaatgaaagtgtcctgctgctccgggcattgcttgatgtcaatctggccaagttcttagcgcaagatgtccctctgtttcagggaattatatctgatttatttcctggagttgttcttccaaagccagactatgaagtttttctgaaagtgctgaatgataacatcaaaaagatgaaactccagccagtaccttggtttatagggaaaattatccagatctacgaaatgatgctggtgagacatggctatatgattgtaggagaccccatgggcggcaagacctctgcttataaagtgttggctgcagctctcggcgatttacacgcagccaatcagatggaggagtttgctgtggagtacaagatcatcaaccccaaggctatcacgatggggcagctgtatgggtgctttgaccaagtgagccacgagtggatggatggtgtccttgccaatgctttccgggagcaagcgtcttcactctctgatgatcgcaagtggattatatttgatgggccagtggatgctatttggattgaaaatatgaacactgttctggatgacaataaaaagctgtgtctcatgagtggggaaattatccagatgaactccaagatgagcctgatcttcgagcccgccgacctcgagcaagcctctccagccactgtgagcaggtgtgggatgatctacatggagccccatcaactaggctggaagcccctgaaggattcctacatggacaccctgccctccagtctcaccaaggagcacaaagaattggtcaatgacatgttcatgtggcttgtccagccctgcctggaatttggtcgccttcattgtaaatttgttgtccagacatctcccatccaccttgccttctcaatgatgagactgtactcttctctgcttgatgaaatcagggcagtagaagaggaggaaatggaattaggtgaaggcctgtcaagtcaacagatctttctctggctccaaggactgtttctcttttccttggtgtggaccgtggctggcaccatcaacgcagacagcagaaagaaatttgatgtgtttttccgcaacctgatcatgggcatggatgataaccacccaaggcccaaaagcgtcaaactcaccaaaaacaacatctttccagaaagaggaagcatctatgatttttattttatcaaacaagctagtggacattgggaaacgtggacacagtatatcaccaaagaggaggaaaaagttccagctggtgcaaaggtctcagaactcatcatccccacaatggagacagcccggcagtccttcttcttgaaaacctacttagaccatgagattccaatgctgttcgtgggtcccacaggcactggcaaatcagccatcaccaacaacttccttctccaccttcccaaaaatacgtacctacccaactgcatcaatttctctgccagaacctcagccaatcagacccaggatatcatcatgtccaagctggatcgacgacggaagggccttttcgggcctcccatagggaagaaagcagtggtgtttgtggatgacctcaacatgccagccaaagaggtgtatggggcccagccacccatcgagctcctgaggcagtggattgaccatggttactggtttgacaaaaaagacacaaccaggctggacatcgtggacatgctgctcgtgacagccatggggccccccgggggaggaaggaatgacattactggtatgtgaagggaagagctcattcctctttccctccatccccagcagagctgggccacctttatgaaaggtgggttggtgtgccacagtctgtcctgccaaaccacgtggcaggagcatggagcagaagcatgtgtaggctacaggcttcatgttggaaattgtgtgaaatagaaggggacgatggcaagaagatgtgaggagtgtttggctaggccctagagaaacagagagtctcataggaaaaggagagttcagtgtggccagcatgtgttccgggagggaggctccatccagaagcctcaactaggggtgcatgacagtcatccattgtattcgttataattctttaggttgccagagacagaatgcctaacccaaagtgccctaagcaaaattaataacaataaaaatagcaaataaat

SEQ ID NO: 10112 - protein, 1054 aa, Homo sapiens
MPQMKSDKREWAFVKTARHNWYSRRFFFLSNDELLEILSETKDPLRVQPHLKKCFEGIAKLEFTDNLEIVGMISSEKETVPFIQKIYPANAKGMVEKWLQQVEQMMLASMREVIGLGIEAYVKVPRNHWVLQWPGQVVICVSSIFWTQEVSQALAENTLLDFLKKSNDQIAQIVQLVRGKLSSGARLTLGALTVIDVHARDVVAKLSEDRVSDLNDFQWISQLRYYWVAKDVQVQIITTEALYGYEYLGNSPRLVITPLTDRCYRTLMGALKLNLGGAPEGPAGTGKTETTKDLAKALAKQCVVFNCSDGLDYKAMGKFFKGLAQAGAWACFDEFNRIEVEVLSVVAQQILSIQQAIIRKLKTFIFEGTELSLNPTCAVFITMNPGYAGRAELPDNLKALFRTVAMMVPDYALIGEISLYSMGFLDSRSLAQKIVATYRLCSEQLSSQHHYDYGMRAVKSVLTAAGNLKLKYPEENESVLLLRALLDVNLAKFLAQDVPLFQGIISDLFPGVVLPKPDYEVFLKVLNDNIKKMKLQPVPWFIGKIIQIYEMMLVRHGYMIVGDPMGGKTSAYKVLAAALGDLHAANQMEEFAVEYKIINPKAITMGQLYGCFDQVSHEWMDGVLANAFREQASSLSDDRKWIIFDGPVDAIWIENMNTVLDDNKKLCLMSGEIIQMNSKMSLIFEPADLEQASPATVSRCGMIYMEPHQLGWKPLKDSYMDTLPSSLTKEHKELVNDMFMWLVQPCLEFGRLHCKFVVQTSPIHLAFSMMRLYSSLLDEIRAVEEEEMELGEGLSSQQIFLWLQGLFLFSLVWTVAGTINADSRKKFDVFFRNLIMGMDDNHPRPKSVKLTKNNIFPERGSIYDFYFIKQASGHWETWTQYITKEEEKVPAGAKVSELIIPTMETARQSFFLKTYLDHEIPMLFVGPTGTGKSAITNNFLLHLPKNTYLPNCINFSARTSANQTQDIIMSKLDRRRKGLFGPPIGKKAVVFVDDLNMPAKEVYGAQPPIELLRQWIDHGYWFDKKDTTRLDIVDMLLVTAMGPPGGGRNDITGM

SEQ ID NO: 10113 - DNA, 3073 bp, Homo sapiens
gttaagagtccagggaggaggagggagaacagttcgggctgccaggatgttgtttggagggggaactcctcagcgggccaaagtctatgacctcagagaggcaacctcatgaacagagctttcagaacatctggaaagttccattgttggtgtcatccccattatgctataaggaagtgtgaatttcagaccaactggataggagaggcacatccctggagaagctgaaagctctttattcattttaaaaaaatagctacaattagagtggacaccatgggtgacatggattgctcatctcagaagatcgccaaaagtgactccatacatcacatgagccactcccaggggcagccagagctgcctcctctgcctgcttctgctaatgaggaaccgtctggactctatcagactgtcatgtcacacagcttttacccgcccttgatgcaacgcacgtcatggaccttggctgcacccttcaaagaacagcatcaccaccgtggacccagtgattccatcgccaacaactactccttgatggcccaggacctgaagctgaaagatctgctgaaggtctaccaaccggccaccatcagtgtccctagggacaggaccggtcaggggctgccatcatcaggaaatagaagctcatcagagcccatgaggaaaaaaacgaagttttcctccagaaacaaagaggattccactaggatcaagttggccttcaagacgtcaatcttctcacccatgaagaaggaggtaaagacatctttgacgttcccaggaagcagaccaatgagtccagaacagcagctcgatgtcatgttacagcaggagatggaaatggaaagtaaagaaaagaagccatctgaatcggacctggagagatactattactatctgaccaatggaattcgcaaagacatgattgcccctgaggagggtgaagtgatggttcggatttcaaagctgatttctaacacgctgctgacgagtcccttcctggagcccctgatggtggtcctcgtgcaggagaaggagaatgactattactgtagcctcatgaaaagcatcgttgattacatcctcatggacccaatggagagaaaacggctctttattgagagcatcccccgcttgtttcctcaaagagtgatccgggcccctgtgccctggcacagtgtctacaggagcgccaagaagtggaacgaggagcatctgcacacggtgaaccccatgatgctcaggctgaaagaactgtggtttgcagaattcagagacctcaggtttgttcgaacagcagaaatactagcgggaaaattgcctctgcagcctcaggaattttgggatgtgatccagaaacactgcctggaggcacaccagactcttctcaacaagtggatccccacctgcgcccagctttttacctcacggaaggagcactggattcattttgctcccaagagcaactatgactcaagtcgaaacattgaggaatattttgcttctgtggcatcattcatgtcgctgcagcttagggagctggtcattaagtcacttgaggacctcgtttcccttttcatgatacacaaagatgggaatgattttaaggagccctaccaagagatgaagtttttcatacctcagctaatcatgatcaaacttgaagtcagtgaacccattattgtcttcaatccatcttttgatggctgctgggaattaatacgtgactctttcctggaaattattaagaactctaatgggatccccaaggtggaatctgtcctgttcccagagctgaaaggatataatctgctccttggaactgttaacgcagaagaaaaacttgtttctgattttttgattcaaactttcaaggtatttcagaaaaatcaagttggcccctgcaaatatttaaatgtctacaaaaagtatgttgacttattggataacacggcagagcaaaacatcgctgcgttcctgaaagaaaatcatgacattgatgattttgtgacgaagatcaatgccataaagaaacggagaaatgaaattgcatccatgaacatcaccgtgcctttagccatgttctgccttgatgctacggccctaaatcatgatctctgtgagcgagctcaaaatcttaaagaccatctgattcaattccaagtggatgtaaaccgagacaccaataccagcatttgtaatcagtacagccacatcgcagacaaagtcagtgaggttcctgccaacactaaggagctggtatccctcattgaattcctaaagaaatccagtgctgtcactgtgttcaaactcaggaggcaacttagagatgcaagtgaacggctggagttcctgatggactatgcagacttgccgtatgaggacatcaaattgaacagcactctgttcctctggccagaccagattgaagatatctttgacaacagccggaacttgctccttcacaagagggatcaggcagaaatggatctgattaaaaggtaccgggagagtctgggattgtcttggaaatgagacctgacttcttcacccatgctgcaggttcctggttctgtctaagccatcccccagctcactccatggcaacgtgtgggcgaagtctgaaaacaattggtggagaaggcatttcctttggtttcccactgagggatgttttctttaagactgcttcactgtaataacctctgctaatgtcttcccttcctgccttgaataattggaatttggtggtgcagagagaaaaacgcaaaactagtggcatgttataacggcctccccaataataatagtgaaattgtcagccttacattggagaccacagatctgtaagatatcaagatatcaagataataaaggcatggcaggggggctgagaaattgcctattttgcagctggtcttattcagagctaatgtggctgtaatcacttattcattcattatttgtcaattcagttggtatttattgcggattttcatgatgtgctatgctctgttctagacatctatgtgtgtttggctgctaaataaagattttaatccagcgacat

SEQ ID NO: 10114 - protein, 753 aa, Homo sapiens
MGDMDCSSQKIAKSDSIHHMSHSQGQPELPPLPASANEEPSGLYQTVMSHSFYPPLMQRTSWTLAAPFKEQHHHRGPSDSIANNYSLMAQDLKLKDLLKVYQPATISVPRDRTGQGLPSSGNRSSSEPMRKKTKFSSRNKEDSTRIKLAFKTSIFSPMKKEVKTSLTFPGSRPMSPEQQLDVMLQQEMEMESKEKKPSESDLERYYYYLTNGIRKDMIAPEEGEVMVRISKLISNTLLTSPFLEPLMVVLVQEKENDYYCSLMKSIVDYILMDPMERKRLFIESIPRLFPQRVIRAPVPWHSVYRSAKKWNEEHLHTVNPMMLRLKELWFAEFRDLRFVRTAEILAGKLPLQPQEFWDVIQKHCLEAHQTLLNKWIPTCAQLFTSRKEHWIHFAPKSNYDSSRNIEEYFASVASFMSLQLRELVIKSLEDLVSLFMIHKDGNDFKEPYQEMKFFIPQLIMIKLEVSEPIIVFNPSFDGCWELIRDSFLEIIKNSNGIPKVESVLFPELKGYNLLLGTVNAEEKLVSDFLIQTFKVFQKNQVGPCKYLNVYKKYVDLLDNTAEQNIAAFLKENHDIDDFVTKINAIKKRRNEIASMNITVPLAMFCLDATALNHDLCERAQNLKDHLIQFQVDVNRDTNTSICNQYSHIADKVSEVPANTKELVSLIEFLKKSSAVTVFKLRRQLRDASERLEFLMDYADLPYEDIKLNSTLFLWPDQIEDIFDNSRNLLLHKRDQAEMDLIKRYRESLGLSWK

SEQ ID NO: 10115 - DNA, 860 bp, Homo sapiens
gaattcgcaaagacatgattgcccctgaggagggtgaagtgatggttcggatttcaaagctgatttctaacacgctgctgacgagtcccttcctggagcccctgatggtggtcctcgtgcaggagaaggagaatgactattactgtagcctcatgaaaagcatcgttgattacatcctcatggacccaatggagagaaaacggctctttattgagagcatcccccgcttgtttcctcaaagagtgatccgggcccctgtgccctggcacagtgtctacaggagcgccaagaagtggaacgaggagcatctgcacacggtgaaccccatgatgctcaggctgaaagaactgtggtttgcagagtaagaagtccctccctttttttttcattccctttcttgaccacatccacgtgtaagcaagcctattctgctgtgcacagtgggggtagccctgacagcatagagaaatgaaagaaaaaaaaatctaggccaaatatgcatgtgaattataagtgacacctttccttgcaggcttacgtggccctcctttgtgtccccagggcaccctgtgcctgtctctaagcactggaatatcctggcattacctccattacaacatcaccctcagcacccttggttataatagaacatttacttatttgtctccctttagcctatgaagtgtgtgcgggcttgggacggtcttattcctttatgtaactcagtgccagtacagggctggcaagcagtgatctctcaggtatatttatcaataattaaatttgcgaaactccgtctcaaaaaaaaaaaaattgtaggagtccagatgagacagaagccaccttttttcattctttca

SEQ ID NO: 10116 - protein, 116 aa, Homo sapiens
MIAPEEGEVMVRISKLISNTLLTSPFLEPLMVVLVQEKENDYYCSLMKSIVDYILMDPMERKRLFIESIPRLFPQRVIRAPVPWHSVYRSAKKWNEEHLHTVNPMMLRLKELWFAE

SEQ ID NO: 10117 - DNA, 555 bp, Homo sapiens
acagttgaacccatgatccaatcatgaccattttctcgctggtggtttgtttatggaagagatactattactatctgaccaatggaattcgcaaagacatgattgcccctgaggagggtgaagtgatggttcggatttcaaagctgatttctaacacgctgctgacgagtcccttcctggagcccctgatggtggtcctcgtgcaggagaaggagaatgactattactgtagcctcatgaaaagcatcgttgattacatcctcatggacccaatggagagaaaacggctctttattgagagcatcccccgcttgtttcctcaaagagtgatccgggcccctgtgccctggcacagtgtctacaggagcgccaagaagtggaacgaggagcatctgcacacggtgaaccccatgatgctcaggctgaaagaactgtggtttgcagagtaagaagtccctccctttttttttcattccctttcttgaccacatccacgtgtaagcaagcctattctgctgtgcacagtgggggtagccctgacagcatagagaaatg

SEQ ID NO: 10118 - protein, 141 aa, Homo sapiens
MTIFSLVVCLWKRYYYYLTNGIRKDMIAPEEGEVMVRISKLISNTLLTSPFLEPLMVVLVQEKENDYYCSLMKSIVDYILMDPMERKRLFIESIPRLFPQRVIRAPVPWHSVYRSAKKWNEEHLHTVNPMMLRLKELWFAE

SEQ ID NO: 10119 - DNA, 2011 bp, Homo sapiens
tgtcttgaaggtggtctgagctttctcactccaagccagtcgtgtgggaagggacactctctgagcctcagtttcctcagctgtcaacctctcagggcttgttctagtggctccgaaagccagtgggagcgagcgcgctttgcaaagccttgggcgccgggccttggcgcgcctttgccggatccttccggccacgggcggggcgagcccagaggagaagagccgaggggcggtgcccgggccagggggcggaggcaggcggctctggctccctctcgggacgctctttccttcttcctcttgttcctcctcctgcctctcttcgcttcgcctgcaaacgcggtgggggctgctcggcggtcaggagcagcaagagacagagcgacatgagagattggaccgcgggctgcactggagaatttactggtaggataattcatccctaaagagattgaagtgagcttcagaatggcaaaagaggagccccagagtatctcaagggacttgcaggaactgcagaagaagctgtctctgctgatagactccttccagaataactcaaaggtggtggcctttatgaagtctccagtgggtcagtacttggacagccatccgtttctggccttcaccttgctggtgttcattgtcatgtcggccgttcctgttggattcttcctgctcatcgtggtgcttaccaccctggctgctctgctgggggtcataatattggaaggattggtcatctctgtgggtggcttctcactgctctgcatcctctgtggtttgggcttcgtatcactcgccatgtcggggatgatgatagcatcttatgtagtggtctccagcctcatcagctgctggttttctcccaggccactgacacagcaaaacaccagttgtgactttctgccagccatgaagtctgcagaattcgaggggctttaccaggaatgagtgactgctcagaggccgggcttcttttcaagtactgctggatcatactcaccccttgggattatggcttagaagaagggggctgggtaggcaagcactccttggctgtgtcctctcgctttttcacttacttgtaggatcccgcagcagccaatttagggattgtgttgttcttgtgttggttcccatgtaaagaagcagcagagaaatgcgatggttcaacagctcgccctgccccaagtatgcagacttgaccttggcggggtcctgggcttctagagtctagcccgttgaccccaaagcctcagggcttatgtccaacggtcccattgggagcaacagtgattgtttatagttttttgttttcagaaatgagggcagctgttaattttttcactcatgtgaaacaaaatgaaaaaaaaaatccaaaacagaacaagcccttctgtggtatttgctttttatcagaaagaacagcaacatttggcctctccaagttggaaaatagagtccaaatgtaactttgtggccaagagtattttcaaaaaagtctaaaggtgtagtttccactgtaactgttgagtactgttaagtactgttaatcttttacatatttgcacttggtactgttgtattgttctaaagagcttgtcctttaagtaatttctttcttttttttttttttttttttttgtgacggagtttccctcttgttgcccaggctggagtgcaatggtgcagtctcggctcactgcaacctccaactcccaggttcaagtgagtctcgtgcctcagcctcccaagtagctgggattacaggcacccgccaccgtgcccggctagtttttttttgtattttttttagtacagatggggtttcaccatgttggtcaggctagtctcaaactcctgacctcaggtgctccacctgccttggcctcccaaagtgctgggattacaggcgtgagccactgtgcccagcctaagccatttcttaaaataaaaatgctaaaggactagtaagtaaaaataaaacttcctatgggatttcccagtg

SEQ ID NO: 10120 - protein, 161 aa, Homo sapiens
MAKEEPQSISRDLQELQKKLSLLIDSFQNNSKVVAFMKSPVGQYLDSHPFLAFTLLVFIVMSAVPVGFFLLIVVLTTLAALLGVIILEGLVISVGGFSLLCILCGLGFVSLAMSGMMIASYVVVSSLISCWFSPRPLTQQNTSCDFLPAMKSAEFEGLYQE

SEQ ID NO: 10121 - DNA, 2219 bp, Homo sapiens
tgtcttgaaggtggtctgagctttctcactccaagccagtcgtgtgggaagggacactctctgagcctcagtttcctcagctgtcaacctctcagggcttgttctagtggctccgaaagccagtgggagcgagcgcgctttgcaaagccttgggcgccgggccttggcgcgcctttgccggatccttccggccacgggcggggcgagcccagaggagaagagccgaggggcggtgcccgggccagggggcggaggcaggcggctctggctccctctcgggacgctctttccttcttcctcttgttcctcctcctgcctctcttcgcttcgcctgcaaacgcggtgggggctgctcggcggtcaggagcagcaagagacagagcgacatgagagattggaccgcgggctgcactggagaatttactggtaggataattcatccctaaagagattgaagtgagcttcagaatggcaaaagaggagccccagagtatctcaagggacttgcaggaactgcagaagaagctgtctctgctgatagactccttccagaataactcaaagctgccccaacacagcaggatctcactggactctgatgatggagtgtccaggctgggcagtgctggctccaaggtggtggcctttatgaagtctccagtgggtcagtacttggacagccatccgtttctggccttcaccttgctggtgttcattgtcatgtcggccgttcctgttggattcttcctgctcatcgtggtgcttaccaccctggctgctctgctgggggtcataatattggaaggattggtcatctctgtgggtggcttctcactgctctgcatcctctgtggtttgggcttcgtatcactcgccatgtcggggatgatgatagcatcttatgtagtggtctccagcctcatcagctgctggttttctcccaggtctcacgagatctgatggttttataaagggcatttcccctgcacatgctctcttgcctgccgccatgtaagaagtgcctctgatcttcctttgccttccaccatgattgtgaggcctccccagccatgtggaattgccactgacacagcaaaacaccagttgtgactttctgccagccatgaagtctgcagaattcgaggggctttaccaggaatgagtgactgctcagaggccgggcttcttttcaagtactgctggatcatactcaccccttgggattatggcttagaagaagggggctgggtaggcaagcactccttggctgtgtcctctcgctttttcacttacttgtaggatcccgcagcagccaatttagggattgtgttgttcttgtgttggttcccatgtaaagaagcagcagagaaatgcgatggttcaacagctcgccctgccccaagtatgcagacttgaccttggcggggtcctgggcttctagagtctagcccgttgaccccaaagcctcagggcttatgtccaacggtcccattgggagcaacagtgattgtttatagttttttgttttcagaaatgagggcagctgttaattttttcactcatgtgaaacaaaatgaaaaaaaaaatccaaaacagaacaagcccttctgtggtatttgctttttatcagaaagaacagcaacatttggcctctccaagttggaaaatagagtccaaatgtaactttgtggccaagagtattttcaaaaaagtctaaaggtgtagtttccactgtaactgttgagtactgttaagtactgttaatcttttacatatttgcacttggtactgttgtattgttctaaagagcttgtcctttaagtaatttctttcttttttttttttttttttttttgtgacggagtttccctcttgttgcccaggctggagtgcaatggtgcagtctcggctcactgcaacctccaactcccaggttcaagtgagtctcgtgcctcagcctcccaagtagctgggattacaggcacccgccaccgtgcccggctagtttttttttgtattttttttagtacagatggggtttcaccatgttggtcaggctagtctcaaactcctgacctcaggtgctccacctgccttggcctcccaaagtgctgggattacaggcgtgagccactgtgcccagcctaagccatttcttaaaataaaaatgctaaaggactagtaagtaaaaataaaacttcctatgggatttcccagtg

SEQ ID NO: 10122 - protein, 163 aa, Homo sapiens
MAKEEPQSISRDLQELQKKLSLLIDSFQNNSKLPQHSRISLDSDDGVSRLGSAGSKVVAFMKSPVGQYLDSHPFLAFTLLVFIVMSAVPVGFFLLIVVLTTLAALLGVIILEGLVISVGGFSLLCILCGLGFVSLAMSGMMIASYVVVSSLISCWFSPRSHEI

SEQ ID NO: 10123 - DNA, 1872 bp, Homo sapiens
tgtcttgaaggtggtctgagctttctcactccaagccagtcgtgtgggaagggacactctctgagcctcagtttcctcagctgtcaacctctcagggcttgttctagtggctccgaaagccagtgggagcgagcgcgctttgcaaagccttgggcgccgggccttggcgcgcctttgccggatccttccggccacgggcggggcgagcccagaggagaagagccgaggggcggtgcccgggccagggggcggaggcaggcggctctggctccctctcgggacgctctttccttcttcctcttgttcctcctcctgcctctcttcgcttcgcctgcaaacgcggtgggggctgctcggcggtcaggagcagcaagagacagagcgacatgagagattggaccgcgggctgcactggagaatttactggtaggataattcatccctaaagagattgaagtgagcttcagaatggcaaaagaggagccccagagtatctcaagggacttgcaggaactgcagaagaagctgtctctgctgatagactccttccagaataactcaaaggtggtggcctttatgaagtctccagtgggtcagtacttggacagccatccgtttctggccttcaccttgctggtgttcattgtcatgtcggccgttcctgttggattcttcctgctcatcgtggtgcttaccaccctggctgctctgctgggggtcataatattggaaggccactgacacagcaaaacaccagttgtgactttctgccagccatgaagtctgcagaattcgaggggctttaccaggaatgagtgactgctcagaggccgggcttcttttcaagtactgctggatcatactcaccccttgggattatggcttagaagaagggggctgggtaggcaagcactccttggctgtgtcctctcgctttttcacttacttgtaggatcccgcagcagccaatttagggattgtgttgttcttgtgttggttcccatgtaaagaagcagcagagaaatgcgatggttcaacagctcgccctgccccaagtatgcagacttgaccttggcggggtcctgggcttctagagtctagcccgttgaccccaaagcctcagggcttatgtccaacggtcccattgggagcaacagtgattgtttatagttttttgttttcagaaatgagggcagctgttaattttttcactcatgtgaaacaaaatgaaaaaaaaaatccaaaacagaacaagcccttctgtggtatttgctttttatcagaaagaacagcaacatttggcctctccaagttggaaaatagagtccaaatgtaactttgtggccaagagtattttcaaaaaagtctaaaggtgtagtttccactgtaactgttgagtactgttaagtactgttaatcttttacatatttgcacttggtactgttgtattgttctaaagagcttgtcctttaagtaatttctttcttttttttttttttttttttttgtgacggagtttccctcttgttgcccaggctggagtgcaatggtgcagtctcggctcactgcaacctccaactcccaggttcaagtgagtctcgtgcctcagcctcccaagtagctgggattacaggcacccgccaccgtgcccggctagtttttttttgtattttttttagtacagatggggtttcaccatgttggtcaggctagtctcaaactcctgacctcaggtgctccacctgccttggcctcccaaagtgctgggattacaggcgtgagccactgtgcccagcctaagccatttcttaaaataaaaatgctaaaggactagtaagtaaaaataaaacttcctatgggatttcccagtg

SEQ ID NO: 10124 - protein, 90 aa, Homo sapiens
MAKEEPQSISRDLQELQKKLSLLIDSFQNNSKVVAFMKSPVGQYLDSHPFLAFTLLVFIVMSAVPVGFFLLIVVLTTLAALLGVIILEGH

SEQ ID NO: 10125 - DNA, 2083 bp, Homo sapiens
tgtcttgaaggtggtctgagctttctcactccaagccagtcgtgtgggaagggacactctctgagcctcagtttcctcagctgtcaacctctcagggcttgttctagtggctccgaaagccagtgggagcgagcgcgctttgcaaagccttgggcgccgggccttggcgcgcctttgccggatccttccggccacgggcggggcgagcccagaggagaagagccgaggggcggtgcccgggccagggggcggaggcaggcggctctggctccctctcgggacgctctttccttcttcctcttgttcctcctcctgcctctcttcgcttcgcctgcaaacgcggtgggggctgctcggcggtcaggagcagcaagagacagagcgacatgagagattggaccgcgggctgcactggagaatttactggtaggataattcatccctaaagagattgaagtgagcttcagaatggcaaaagaggagccccagagtatctcaagggacttgcaggaactgcagaagaagctgtctctgctgatagactccttccagaataactcaaagctgccccaacacagcaggatctcactggactctgatgatggagtgtccaggctgggcagtgctggctccaaggtggtggcctttatgaagtctccagtgggtcagtacttggacagccatccgtttctggccttcaccttgctggtgttcattgtcatgtcggccgttcctgttggattcttcctgctcatcgtggtgcttaccaccctggctgctctgctgggggtcataatattggaaggattggtcatctctgtgggtggcttctcactgctctgcatcctctgtggtttgggcttcgtatcactcgccatgtcggggatgatgatagcatcttatgtagtggtctccagcctcatcagctgctggttttctcccaggccactgacacagcaaaacaccagttgtgactttctgccagccatgaagtctgcagaattcgaggggctttaccaggaatgagtgactgctcagaggccgggcttcttttcaagtactgctggatcatactcaccccttgggattatggcttagaagaagggggctgggtaggcaagcactccttggctgtgtcctctcgctttttcacttacttgtaggatcccgcagcagccaatttagggattgtgttgttcttgtgttggttcccatgtaaagaagcagcagagaaatgcgatggttcaacagctcgccctgccccaagtatgcagacttgaccttggcggggtcctgggcttctagagtctagcccgttgaccccaaagcctcagggcttatgtccaacggtcccattgggagcaacagtgattgtttatagttttttgttttcagaaatgagggcagctgttaattttttcactcatgtgaaacaaaatgaaaaaaaaaatccaaaacagaacaagcccttctgtggtatttgctttttatcagaaagaacagcaacatttggcctctccaagttggaaaatagagtccaaatgtaactttgtggccaagagtattttcaaaaaagtctaaaggtgtagtttccactgtaactgttgagtactgttaagtactgttaatcttttacatatttgcacttggtactgttgtattgttctaaagagcttgtcctttaagtaatttctttcttttttttttttttttttttttgtgacggagtttccctcttgttgcccaggctggagtgcaatggtgcagtctcggctcactgcaacctccaactcccaggttcaagtgagtctcgtgcctcagcctcccaagtagctgggattacaggcacccgccaccgtgcccggctagtttttttttgtattttttttagtacagatggggtttcaccatgttggtcaggctagtctcaaactcctgacctcaggtgctccacctgccttggcctcccaaagtgctgggattacaggcgtgagccactgtgcccagcctaagccatttcttaaaataaaaatgctaaaggactagtaagtaaaaataaaacttcctatgggatttcccagtg

SEQ ID NO: 10126 - protein, 185 aa, Homo sapiens
MAKEEPQSISRDLQELQKKLSLLIDSFQNNSKLPQHSRISLDSDDGVSRLGSAGSKVVAFMKSPVGQYLDSHPFLAFTLLVFIVMSAVPVGFFLLIVVLTTLAALLGVIILEGLVISVGGFSLLCILCGLGFVSLAMSGMMIASYVVVSSLISCWFSPRPLTQQNTSCDFLPAMKSAEFEGLYQE

SEQ ID NO: 10127 - DNA, 877 bp, Homo sapiens
gtcttgaaggtggtctgagctttctcactccaagccagtcgtgtgggaagggacactctctgagcctcagtttcctcagctgtcaacctctcagggcttgttctagtggctccgaaagccagtgggagcgagcgcgctttgcaaagccttgggcgccgggccttggcgcgcctttgccggatccttccggccacgggcggggcgagcccagaggagaagagccgaggggcggtgcccgggccagggggcggaggcaggcggctctggctccctctcgggacgctctttccttcttcctcttgttcctcctcctgcctctcttcgcttcgcctgcaaacgcggtgggggctgctcggcggtcaggagcaggttaccctccgtctgcatgcccaccatcaaggtatgaggatggtagaagctctcgtcgaaccagatggatgaagaccactaacggcttttgtttcctctggtaacagcaagagacagagcgacatgagagattggaccgcgggctgcactggagaatttactggtaggataattcatccctaaagagattgaagtgagcttcagaatggcaaaagaggagccccagagtatctcaagggacttgcaggaactgcagaagaagctgtctctgctgatagactccttccagaataactcaaaggtggtggcctttatgaagtctccagtgggtcagtacttggacagccatccgtttctggccttcaccttgctggtgttcattgtcatgtcggccgttcctgttggattcttcctgctcatcgtggtgcttaccaccctggctgctctgctgggggtcataatattggaagtactgccttggctgactcctcgaggggatccctttgga

SEQ ID NO: 10128 - protein, 100 aa, Homo sapiens
MAKEEPQSISRDLQELQKKLSLLIDSFQNNSKVVAFMKSPVGQYLDSHPFLAFTLLVFIVMSAVPVGFFLLIVVLTTLAALLGVIILEVLPWLTPRGDPF

SEQ ID NO: 10129 - DNA, 1978 bp, Homo sapiens
gtcttgaaggtggtctgagctttctcactccaagccagtcgtgtgggaagggacactctctgagcctcagtttcctcagctgtcaacctctcagggcttgttctagtggctccgaaagccagtgggagcgagcgcgctttgcaaagccttgggcgccgggccttggcgcgcctttgccggatccttccggccacgggcggggcgagcccagaggagaagagccgaggggcggtgcccgggccagggggcggaggcaggcggctctggctccctctcgggacgctctttccttcttcctcttgttcctcctcctgcctctcttcgcttcgcctgcaaacgcggtgggggctgctcggcggtcaggagcaggttaccctccgtctgcatgcccaccatcaaggtatgaggatggtagaagctctcgtcgaaccagatggatgaagaccactaacggcttttgtttcctctggtaacagcaagagacagagcgacatgagagattggaccgcgggctgcactggagaatttactggtaggataattcatccctaaagagattgaagtgagcttcagaatggcaaaagaggagccccagagtatctcaagggacttgcaggaactgcagaagaagctgtctctgctgatagactccttccagaataactcaaaggtggtggcctttatgaagtctccagtgggtcagtacttggacagccatccgtttctggccttcaccttgctggtgttcattgtcatgtcggccgttcctgttggattcttcctgctcatcgtggtgcttaccaccctggctgctctgctgggggtcataatattggaaggccactgacacagcaaaacaccagttgtgactttctgccagccatgaagtctgcagaattcgaggggctttaccaggaatgagtgactgctcagaggccgggcttcttttcaagtactgctggatcatactcaccccttgggattatggcttagaagaagggggctgggtaggcaagcactccttggctgtgtcctctcgctttttcacttacttgtaggatcccgcagcagccaatttagggattgtgttgttcttgtgttggttcccatgtaaagaagcagcagagaaatgcgatggttcaacagctcgccctgccccaagtatgcagacttgaccttggcggggtcctgggcttctagagtctagcccgttgaccccaaagcctcagggcttatgtccaacggtcccattgggagcaacagtgattgtttatagttttttgttttcagaaatgagggcagctgttaattttttcactcatgtgaaacaaaatgaaaaaaaaaatccaaaacagaacaagcccttctgtggtatttgctttttatcagaaagaacagcaacatttggcctctccaagttggaaaatagagtccaaatgtaactttgtggccaagagtattttcaaaaaagtctaaaggtgtagtttccactgtaactgttgagtactgttaagtactgttaatcttttacatatttgcacttggtactgttgtattgttctaaagagcttgtcctttaagtaatttctttcttttttttttttttttttttttgtgacggagtttccctcttgttgcccaggctggagtgcaatggtgcagtctcggctcactgcaacctccaactcccaggttcaagtgagtctcgtgcctcagcctcccaagtagctgggattacaggcacccgccaccgtgcccggctagtttttttttgtattttttttagtacagatggggtttcaccatgttggtcaggctagtctcaaactcctgacctcaggtgctccacctgccttggcctcccaaagtgctgggattacaggcgtgagccactgtgcccagcctaagccatttcttaaaataaaaatgctaaaggactagtaagtaaaaataaaacttcctatgggatttcccagtg

SEQ ID NO: 10130 - protein, 90 aa, Homo sapiens; identical to SEQ ID NO: 10124

SEQ ID NO: 10131 - DNA, 2120 bp, Homo sapiens
gtcttgaaggtggtctgagctttctcactccaagccagtcgtgtgggaagggacactctctgagcctcagtttcctcagctgtcaacctctcagggcttgttctagtggctccgaaagccagtgggagcgagcgcgctttgcaaagccttgggcgccgggccttggcgcgcctttgccggatccttccggccacgggcggggcgagcccagaggagaagagccgaggggcggtgcccgggccagggggcggaggcaggcggctctggctccctctcgggacgctctttccttcttcctcttgttcctcctcctgcctctcttcgcttcgcctgcaaacgcggtgggggctgctcggcggtcaggagcaggttaccctccgtctgcatgcccaccatcaaggtatgaggatggtagaagctctcgtcgaaccagatggatgaagaccactaacggcttttgtttcctctggtaacagcaagagacagagcgacatgagagattggaccgcgggctgcactggagaatttactggtaggataattcatccctaaagagattgaagtgagcttcagaatggcaaaagaggagccccagagtatctcaagggacttgcaggaactgcagaagaagctgtctctgctgatagactccttccagaataactcaaaggtggtggcctttatgaagtctccagtgggtcagtacttggacagccatccgtttctggccttcaccttgctggtgttcattgtcatgtcggccgttcctgttggattcttcctgctcatcgtggtgcttaccaccctggctgctctgctgggggtcataatattggaaggattggtcatctctgtgggtggcttctcactgctctgcatcctctgtggtttgggcttcgtatcactcgccatgtcggggatgatgatagcatcttatgtagtggtctccagcctcatcagctgctggttttctcccaggccactgacacagcaaaacaccagttgtgactttctgccagccatgaagtctgcagaattcgaggggctttaccaggaatgagtgactgctcagaggccgggcttcttttcaagtactgctggatcatactcaccccttgggattatggcttagaagaagggggctgggtaggcaagcactccttggctgtgtcctctcgctttttcacttacttgtaggatcccgcagcagccaatttagggattgtgttgttcttgtgttggttcccatgtaaagaagcagcagagaaatgcgatggttcaacagctcgccctgccccaagtatgcagacttgaccttggcggggtcctgggcttctagagtctagcccgttgaccccaaagcctcagggcttatgtccaacggtcccattgggagcaacagtgattgtttatagttttttgttttcagaaatgagggcagctgttaattttttcactcatgtgaaacaaaatgaaaaaaaaaatccaaaacagaacaagcccttctgtggtatttgctttttatcagaaagaacagcaacatttggcctctccaagttggaaaatagagtccaaatgtaactttgtggccaagagtattttcaaaaaagtctaaaggtgtagtttccactgtaactgttgagtactgttaagtactgttaatcttttacatatttgcacttggtactgttgtattgttctaaagagcttgtcctttaagtaatttctttcttttttttttttttttttttttgtgacggagtttccctcttgttgcccaggctggagtgcaatggtgcagtctcggctcactgcaacctccaactcccaggttcaagtgagtctcgtgcctcagcctcccaagtagctgggattacaggcacccgccaccgtgcccggctagtttttttttgtattttttttagtacagatggggtttcaccatgttggtcaggctagtctcaaactcctgacctcaggtgctccacctgccttggcctcccaaagtgctgggattacaggcgtgagccactgtgcccagcctaagccatttcttaaaataaaaatgctaaaggactagtaagtaaaaataaaacttcctatgggatttcccagtggaa

SEQ ID NO: 10132 - protein, 161 aa, Homo sapiens; identical to SEQ ID NO: 10120

SEQ ID NO: 10133 - DNA, 2368 bp, Homo sapiens
actccttaaatagagccggcagcgcgctccgctcggcatttcccgaagagccagatcgcggccggcgccagcgccaccgtccggtccacccgccagcccgcacagccgcgccgccgccgagcgtttcgtgagcggcgctccgaggatcaggaatggggcttcgggcgctgggcgcgctccgaacccggcgcacgtaagagcctgggagcgcccgagccgcccggctgcccggagccccatcgcctaggaccgggagatgctggaaatgcaaccgcctgttccccgaggagccgctgcccccgggaccccctggcactgtgcgcaccctggtcagcagcccccggagaagacggcgcccccaacgcccgacccgcgtggccgtggcagcgccacgcgagccctctaggcgaccgcagggccacagcagctcagccgccggtgccccctcggaaaccatgacccccggcgcgggcccatggagccatggcctatagggtcctgggccgcgcggggccacctcagccgcggagggcgcgcaggctgctcttcgccttcacgctctcgctctcctgcacttacctgtgttacagcttcctgtgctgctgcgacgacctgggtcggagccgcctcctcggcgcgcctcgctgcctccgcggccccagcgcgggcggccagaaacttctccagaagtcccgcccctgtgatccctccgggccgacgcccagcgagcccagcgctcccagcgcgcccgccgccgccgtgcccgcccctcgcctctccggttccaaccactccggctcacccaagctgggtaccaagcggttgccccaagccctcattgtgggcgtgaagaaggggggcacccgggccgtgctggagtttatccgagtacacccggacgtgcgggccttgggcacggaaccccacttctttgacaggaactacggccgcgggctggattggtacaggagcctgatgcccaggaccctcgagagccagatcacgctggagaagacgcccagctactttgtcactcaagaggctcctcgacgcatcttcaacatgtcccgagacaccaagctgatcgtggttgtgcggaaccctgtgacccgtgccatctctgattacacgcagacactctccaagaagcccgacatcccgacctttgagggcctctccttccgcaaccgcaccctgggcctggtggacgtgtcatggaacgccatccgcatcggcatgtacgtgctgcacctggagagctggctgcagtacttcccgctagctcagattcacttcgtcagtggcgagcgactcatcactgacccggccggcgagatggggcgagtccaggacttcctgggcattaagagattcatcacggacaagcacttctatttcaacaagaccaaaggattcccttgcttgaaaaaaacagaatcgagcctcctgcctcgatgcttgggcaaatcaaaagggagaactcatgtacagattgatcctgaagtgatagaccagctccgagaattttatagaccgtataatatcaaattttatgaaaccgttgggcaggacttcaggtgggaataagcccacgaaaggaaagggctctcaagggctcttctgctcatctcttccgtgagatttgctcccagaccctctgatctccctccaacaaaccctggctccagccccctttcccaacttgagttgcatcatcttggaaccaggaagcccagctaaagccaagagaccagagagtccctgccactagttttcatcagtctgttcaagcaaagttgatctgctcctggcacgtccagtaaattccagaatcattctcctttctgcccataaagggccttggagaattgctttaagaagagtgaatgttccaatgatgatagatattataagcgatgatggttctgttgctatgaacacagcagtcggtccctgtcattgtccacccaggagtggccttgttaattccaagtggcatgtatcttccctctgagcttcatttcttcaagatgctctgggtggtgggatgggagaccatcctcagccctcctcagaccttatcaattcattgagagattgcaaagctgaaagcacctccggccactcctgggagacagaccctttggtgatgaaataaaccagtgacttcagagcctatggtctcaactgtgcttgaaaaacactgtctctgaaaacaactttgtgattctccctgctccctgtggacaaaagcacataattctgctgttacgggtactttgctcatacgagctttcatgttcagcatgcaatggaatcatgcttgtccatgtgaaataaatatggctctctcgtgtccttaatgctg

SEQ ID NO: 10134 - protein, 367 aa, Homo sapiens; identical to SEQ ID NO: 1578
